United States Patent Application Publication US 2013/0096032 A1 - sequence listing, part 14

SEQ ID NO: 439 - DNA, 75508 bp, Arabidopsis thaliana
gatcataagtgaagaagaccaatcatggaagtagagataaacaatgagaagaattaacccgaaactaaaactggtaccaattcttcctggaaataaaaccacacaatgtctcacataaacccaaatagaacctaaattgagtaaaagggaaaaaaaaagtcaaactaaattgaacctaattagagtttaatagataaaattatataaccctaaaattgagaagtagacaagaagatagacagaactcacttgaattcgaatagagctcttcatcactaaaccctaagaccaagcttcttcttcttctagggtttcgaaagaaagtagaacgacaacgagtttgtttagctctggttcttcaaattttccaagttctaggttctatggtttttttttcggagaagtaaattaaaagactcgcacacaaaaaaaaaaaaaaatacaattctttcgcttaggttttgcttctgtgtggttaataggtcccacttgaaggtaagtactcttcagtttaaatccaaccgttgactaaaatccttttaatctcacccgttgattatttcttaaataagccgaacacaacactttattgtccagttggatcttttgtacttttttctatttttcatttctttgacctttttccctttttaatgcgaggacatatgattggagagagctgctaaagtatttttttagcttaagtaatttctgattgtgttttactttacccgtcttaaaacttaaaagcttgcctagggtttttttattcatcaaacattaatcgtataatcaaattctcggcaataagtataacaaaccaaaaaaaatctcagaataacaaaagaggaagtataggaaaagtgtcactaacatgggagacattactagtcttaattctcagcaataaatataacaaacaaaagaatctcaggataacaaaaaaaagaagtagtataagaaaagagtcactagcatgggagacattattagtcttttagtcacattacactaataaataaaagtagacataatcgaaaacttggagatcgatatactgtctcaaactgataattgcactaaccaaaagttataaatatatatgcttcttagttatataactaggagatattaaaaaccaaaaattatgaagctataagagagattgtgatagatcttagagagacctagtattgtttccgttttgatccaaattgaaaacccggtcctgatgttggctgttgtacgttggaaattgaacatactgatgcgaaagaccattagagttaatgctgttgttgttactgtagtcatgcatgttcatgctctgcaacccgttagttccagctccttgcatcccaagtaaccctgcacagtcttgaacattgaagttgttgcggctggacatgttagggttctcaaactcattgtttccgtcttcgtgtaccccaagtaagctagagtaactttccgctctggaattctggtcaaactgttttgagaaatcattaacgctgttgatgttgttataggttaacatgttcatgttctgaagcccattgatcccagttccttgtaccccgagagaccccgagtaatttcccgcatccgaattcgggtaaatcatcagttcaggcggaatcggagctagagattgcgtttggtttgaagccaatgctgagactgggatttgtgagaaagcaccgtttccatggttccacagatacatggaaacctggtttgagtgttgttgaagttgattcatcgtattagccatcatcagttcttgattagccatgttcgtgtactgtaccctcctctgcccctgagcttcaacaacagcgcaagtcctatgttggatcctggttaggtttcgttccaaggactgaaccagtcccatgagttgctccacagagtaattgtcaaacctagggtcccaaactggatacttgactttgggtacacgtctcactttaatcttcttcttctcctccttctcgggatcatccttgttcatcttctcgaggaactcgtgaagatcaacgcttcctttgcgacgcttcgtctcgcttaattcaccgtaccttcgagctatggctttgaccttctctctctcttcaggccatgtcttaagctctccgtttgatccgtaacagatgacgcagacatcgatgtcacagagaattgaaagctctttagctttcttaaagacagtctgttgtcttttgatcaaacttgtggccctcgaagaagaaaaagcagaattaggtttcttgaaaaaggttttgttcttcttcgatgttgaaaacgaaagagaagaggacgaagaagaagccatggttgtgtatattctctgtgaattgaatgaagaggtggtgatcattgtttgcgaatatataaaacccttagttcgagaatttctatttttggtctcgctcggtaattaatgacgaatcaataatgaaagcggtgaagatttcattgccttttttaatatacttttttctcatagaatcaatttatatgtttaacgaaggtgtagttttactaataaggaaaactttggtttttggttgaatattatggaaatctttagtagagattcttttcacatgtacatacatacacaaatacatacactgatatacacacacatagatttatatactatacgtaatgtatacatactacactgcgattcgactaaaaatttggatttttcgaaagtttaattatactacatatgtttagttacatcaattaatttgtgttgtttggctatatgtaagtctataatctatcgtttctgtataaactatttgaatgttactaacatttttgagtttgtgtttgtatacaaaaatggcatataaatacgacatatgttttattttgtggttaaactgcaaaaaaatgttttattcaatttgaacaaactataggaaaaagatatagttacacaactgatattcacctaatctcgcagcaacaattcaaaccaaaaaactcatgaaatccattaataagtatgtataattattgcgtcacaagttatggccgggaagtgatgatctccggtctacggtaatggctggtggggtgggaacaaaagactcgtagtcagtccaatttgattcgccccaatgccgcagcatacttttccaattacataatttgtcgatgcaaattttgaatctcgggtcctttactcttattttccaatgaccgtcggcataatttgcggcctctgcttgccggcgatcatattccagctgtgccttttgcttggatcgcaagtaacagaattggtgaagttcctgcaaaatatcatatatggtaattactaaccgtcacaattttagaataatttgggaaaacgtctaactatttttatatttctgccaaccaatgtttttttaaactaatcataaagaaagaaaatttgaaatgatttttttataaggtgtataaaacatagacattaaaacttgatgcctactgcgtagggggctaattctgcatttactaacccaccaagattttcgtatattcaaatttcatatggttattctaaacttgggtagtaagtaatttttagtttatttattttttcaagttttggaaatttttgagaaagaaataatgctatgcagttagtctctcaacgcatgactaaacgcctaataatattttgaatattgatcacaatatgagattgaaaatattatgtgatttttgagttctattaaggtttttaggagagagtgaatcacctgtggcatggcgtcgtggaccatccaccattttcgatgagcgatatcggtagcaaactcaacgaatatgtcggagttgaagttacagtcgtagtcacggtaacataaccacggcttcatcccaaggtaatgaagaacataaagaacaggaggctctgctccaaaaagctctgttttcttgcgtttcgcgtcatcttcatcgccaatccaaaaatgcttcaagaaattcatatgttttggaatccggtgccaccatgtgaatacctcgtttaagtaaccttgatctccaccgttataagactcaatctcgtttatatgttccatcagaagctgaaacgtacagttgcaaggctcgatcaccataactcctgaattaaacagagttccattgtttcctgtagctgagatctcaggcatcgagaacaagaaatcgatgtttctcaagattaagagatccgcgtcgatgaaaatgattttgtcgtaatcagtcagctgccatagccggaacttgctgtagttccattcgttgtaagcatctttctctgccttagggtttcgaatcctctgtatcgtccggatttgccaacccgcggcttctagtccactccggtggtaaccgctgatgttgtcatcaacaaggataacaaggtctctcgtcgaaccagactgtcttatgctctgagccgcggcgattgcaccgcagacgtaaacgtgagctgagtgaagaattgttgcgtaagcttctcttttagggtttcctaagcttggcctatctgtaaaattcatggaagaaaacagacactagttaacttagcgacgatttttcaaatttgttttcaaatctaaacaagtaatttcgggagtcatttttattctaccttggatgccaagaggaagagatagctcacaagaccctacaggcagctgaagcttgtctctcaaggtatcaagattaggtttgtacaaccaaacatcgcctctccgagacacaagatctttacaccggaaaagattcggaatcggaaagcatctagatacaaaaaacacatgtcccctgaaaaaccctttggccgaagccgccacagttgcagccgctagctgtagatgcaatctcccgacgtctctcgaccaattcccttctttccgacaaggaagtttcacgacgatcagatcgagtcttcttgtaggtaccttaatgttcgggatattaggacaaacagggacctctgtttcttgctcctcatcgatccactctggatatagtgcgtcccaagtcacattcttgtctgcgtaatctagattcaatacaacaactttttcttcatccccattgtccttgctcttggatacttctctccatcgttggatctcgttcgaatcaaaattcaagacaccgatcgtacggccttcttcgatgttctcaagggttttagtcacatcgtcccagtttatatccagatccgagaagtaacgtggatcttgtcttctccatatccatctaatttcataattttaagatagtattataagagatagaggcaaaagtaaaaatttgcatgtgaacatttttgaggtcaagaatgtaaatgttggtgatggaaaaaagaaatagatttaccgagaagatgagtgggaaagagaatgatgataagcttcaggagaatagataatggtgaagagagtggcagagagaaggataaacaagagaagcttcacgatctgaaacttggtgaaacaacaacaactactgtttttgtcttgtgtcgaaaaatttatgatattaaacggtttcaccatatccgatctgccacctcctttgctatttctccggaatctcctcttgcatattgcttctctgcttaaacacacacaaagccacaattagacgattttgttcagatttttttaatcattacttagagagtattatactatacacttacatggacgcggagaggcgtcgccgggagtcaccaccggttgtggtggtgggtgcaggagcagcgggagagtttgccatataaaactgatggattgggacagtagaattggacaaggaagaggagagagcaaatataggtgagacataacgtctcttttaatcttcttatatcacatttcctttgtttctatttttgtttttgttaggaaataagaaaattgtatttttcatacccacctttttaacaaagttaatttttgattttctctttttgaagttatcgtgattttaataaaatgttttaaattgtggataatattgtagctctttagtttaaactccattctcagtttgtgactctcttatgattgacatatatatgtccaccaaactttgatcatttctttgtaaagagaaccataatttattttcaaaataatgagtttttttttcaaaataaagatacactttaccaataactcacttgattatataagcaaaaatatttttttgaaaggttttaagtcattgaattcaatatatatatatagtggaaagaaatatattactatgttttattgcatgtacatattgtacagctggagaaaggtaaaatgatgtacgcatgcatccatgaataactatgattagttaacaataatatacttcttcatgaatagtattcatcaaagatgaaagtatcttagtaacaaagcaaccgttactattaacaattgacaatactaatgtacaacgtttaaaaccttggtggcaaagtaaggtgaagataaggtaacatagcaagacaggtaagcctcttttttttggaaaaatacaggtaagctcaatacattgattcaaacttcgcttgcaatttgcaaagttcggaggtcttttcaagaactgcttccaccaaacttgtgttttgaatttgtatttatttattgattattcgaaatattagtttttgacttttttttataaagaaaatgggttatgtacatttgagcatatgatccagattacaaaattcaacaaaatattaaatgttcacattttttattttacttaattttcttaattttgataataattcagaatctaataaagtaaaagaaactcgtatatgtgaggaaatattatatggtttagatgaaggaataataatatgcataattaataagatccgagagatggtgcaaggttaaaatgatttaattaattaacttctaagcttcattaagacttggaaaaacaaagacaggtgggaacatgtgtcaatcagaggactgaaggagtagctaaattgcacataggagaaggtggggactctagagaccaactttgcttctgataagacccttgcaaccatcgctacgtatgattcaaaatatattattgatcacaattattattcgaaatatttagtattagtctagaaataaaaatcccaatactgaacatgagttatgttcgggccgtaataatcttcacccacatacacatttacgtacgttcgaattttcgattgagcatgttgttgacaaatggcagtgtattggaagcaaagcgaagcaaaggtattttcgtatcttgtacatctttcctttccaaggacaaacactttcaccaaatagttttttttttcccctgaatattttactttagacttatgaaactccaacaaaataaacatatacatatataataggtgaagaaattttgttacatagaaacaatatcaaactaacactaaaaagttcaaagtatccttacagtagtagtttgcaaaccaataacttagatcaaagttctaacaattgtagtttaagtctagatatttaaaaacacatgcacgaatatagcaatatatgtttttgaatcgaaaaaaaatggttcatcgaaatatcaacgttaattttagtgagccagttagtacctttttcgtaaacaagtacgtatgggaattgctctagtagataatttttttttattaaaaaaatctattatatagtggttgcatatggaagagagaattataaaaggaaactggtaaataatgtataatcatcattatttactaaaaacaaaaatcagaagtatatattaatgctagaacacaattaaactctgattttgaaggctcgaacctactactcataaggctttttcatatgtttgtaggaagaattacaagtgaagtggaagaccatcattagtttgatcaccaacattattcctctcgagtctcgatcaaagcttaaacactcgccgaggtttatcaaaaacgttaggacaataagtggcgcggaagatctcaagtaacaccggaaactgaaggacaacgaacatccccagcggaatcaccgcaagaaacataaattgagccgaaacccacgagattttctctccaaccagagtcatgagcgtcacgacaaaagtcacaatcatcgtcgccatcgaaagaaacaaagccaaaagacccacgatcagttttgtcggaagtgatcgaagaaaatcctcttcacggtagcgagacttgagaatgccgaggaacatgaggagagacatacatgaggtgaaaagagagatagcgtcggagatgaggaatatcttaaatctgtgctggtggatgtagagtggcatgccgtctgaacggtaacctccggggacagtaaaggcggaggaaaacatcattgtggtgattagagcggcaacgactgtgcaagaagttgctgtttctttcatccatttctctccttgctccacgagatccttgtgttggtctgtaaacagagcctttggagttttcttctgcttcaagttaaccatttttcgatgcttcggttgcactaacttctccacttcctggaaataatacagagttataatcctaggttccttttcacagaaacagttattgcctaatttcttgtgtagcaagatcatatatacaactatgtatcaccttaaaccattgtagttccctttgcatctgaagagctgcaccaggaatgagattaagccttgaggctggggctctatacgcggcgtgatgaagcatattgttatggaatatgtcccaatttgtagcgaggatgttcttcttagcacctatattgtaaatgaggctaaagatcttttcttgtctctggcttaccgcgtagaagaagatgttaagaccactactatttttggaccatacgatatcaggataatgcctcatcatttcctcgatatactctacgattccattctctaccgccttaaagagagcttggtttagaccagcgttcttttgttgagccgcgtcaaatttaggtatctcttgacagatacagtctagtatttctttagcttgagcatgtcctagctttagtttgtatacacgtctaattatgcgtggaactgtcaatagaaagtttaatctaagattgataaaaacaaaaacaatgagggggtaacaatttgggatggtaattactgcttacaaagatatttgaggtgtttcatcaacttctcttgaatcgaattatgatcctgcgaattcctatattgatggtggtgatggtgattattaacttcatgagggttattaatcttctctatgtgaataccttcaagagaaaaaccatcaacaaaattaaagcctaataaaatcaaacttcctaataacaaaaaacgttatatctattttaaagcataaggtaagtatacccacaagaatatatccaccgttgccaaaatgcaagacgggtaccgctaggaaacgcataaggtgtttgagcaagcgccatgatcgctgtatcgttatcactgtctcgagtataagccaacttaggatacctctgaatcagatccaaagcaatacctttatgtacatgcgccacattagccaaatctcatgaacaagtaatgataatacacgaacatttataaatcattagttaagaacttacaatataatccatcgacaatacaatttgtcacgagcatcgctccgttcttgcccttgtgttcatctgaatcatcacaaggatcaagatcactgagaggtgtgtgactgtaaagatactgaaccaaatgtttgtgaccgtacaatgaagccaccacgatcggtatatgctctttcgcattccgaacactgaccaaaccaggacacttattcaccaaacactctgcaattcttacaattccaccagtggcagcataagtaagcgctgtataaccattatcgttcttgatctttaacacttgctctggatcatgaattcttctaatgatctcttccacgatcttgatgtgacccgacaaaacagctttatggattggagtgtctccattagaggttaagattgcggttaaagcttcagggtttcggtccaagaagtctttcgtggcttccaactctccactgtctatgttcttgaagaggacaagataggtcgagttctcttgtcgtatctcgtctttttgtagatcggctgcttcatcgatctgcatactatcaaaccgaaagcttctggggcccgtttctggtcgtagactctctgctctgaaacctctgggataacctttctcggtatccatttgtcggttgcttctcccgcaagaaacgtggtggtatgtgtttgtttaagtgtaaaattgttcttttataatttttctgtaaaagaaaacatatctttccgttattcgaacagaggcacatgagtaaagtgttaaaagagttgtggtggcttatctttgaagcaaggtttcaaggacaaagaaaagagacaaggattcaagtaattaaacattataataaactgtaatacgaataatccttgactattcataccatgaaagatttcaagatcattatcagtgtttttttcttcttatatgtgtttgttacttttacttttcccgggaatatttaaaagatcgagctttagtgttacaaaaatttacgtcgttgcaaagcaaagaatttagtttcactcttcaaaaacaatgttacttgtaaatttgcaattagtaaacttttaaaacttgaacttggtaagaaaactcatatttttcaagtcattgaaacgaaaataagaatgctttgtggttcttcacttctcttgtaggatgcaaatgtagttatttcaaacctattaatcaattgttataaaaaaagaaaaaaaaccattggtcaataataagtacacataaaatagtgtgaattatttagatataagaaaatatctatctatttgtagctatttgttatatgtagtgcactaaaattggtgttcaattaaatttgattaaaaattacattttttatagaagtatatgtataacgtatgttaaaactctaaaagacattttgacatatatcaaaattttctaaatatattcagaatttaatgaaagttattcgtttttgtatgataagataagattaaatatagtgaattattggggatataattcaaatatatatatatatatatatatatatatatacacattaaatatcacaacaattcatttgattaattagtaaattacattgaaaccagaccttatcttctcagacttaaaacccgtctttgccggcgacacttctctactgaatatttcagtaaataatctcttcttagatctctccggcaatggcaattccgttgcctcttacctcttgctccccaatctcaacttcttcgtctatttcccgaacctccttcgtccctcttacacttcgcaatcgtactttcttctccaaccagaattacagtaggcgtgtacttatcagctgctcttcttctttgtcctcagacaatggttcatctccagactccatgaacggaaacgggaacgggaacgggaggtattattaatcttcaagttttaatctttacgcccaccagatgtttgtgaaaatttgtcaatgaagatacttctgggtttagggtttaagagtttattaaaatatattgcaaatctgattttattgttttggttgaagtaaaacttaacccatttataatgtttggaactttggctgattttgttaatactctgttgcgatcatctgtaattttcagtagcttaaacgggcaatcatctttcccacgactgccttcctttgatggaacatccaaaccaccgcttaaatggagaagggttttactcaaagtcagtggagaagctcttgctggagacgaggagcaaaatatcgacccaaaggtttattgtgataccaaaagaaccctccttgttttgctttctttgttctctgtttccttacttcagaagtctcatccagtttcccgttaattaggttactatggcgattgcaagggaagttgcagcagtgactcgacttggcattgaggttattctctaaacgcttcattcaaacattcttgttctagttgtcattgtgataattggattcaaaattttttagtggatatgtattcagctttgagttcttcctatacataagtataatacccgaagtatttgataattgcctgtgtagatgtaaccaaatatgctggaaatcaattagctcaaacttacaagaaacgggagcttaagttaaggggtggagatatatggcattacacaacttaaagttagaaatttgttatgatttaaacatactatacggcaacagatcatgtgtctgggtcattaagaatcattgcaatgttgtgtgtgctctgtctgatcttcttacgcctttacaataggttgctatagttgttggaggaggaaatatctttcgtggatctacctgggctgggtgcagtggccttgatcgctcctctgctgattatatcgggtaatcatacgcctttgtgtcaaaggatcttcttcttcttactcggagaagatccagaattttcctctactggaggtttttggtctcattggtttatctgaaattggataggatgctggcaactgtgatgaatgcaatatttcttcaagcgacaatggagagtattggcatcccaacccgtgttcaaactgctttccgcatgtcggaagtcgcagagccttacataagaagacgagcaatcagacatctagaaaaaggaagggttgtaatatttgcagctggaacaggcaatccatttttcaccaccgatactgcagcggctcttcgatgtgctgaaagtaagtaaagaggtggtttccgtttaagttttctccaatgattattcgcaacactaaaaaaaaacttttcgcattggacacagttaatgcagaagtagtgctgaaagcaacaaatgttgatggcgtgttcgacgatgatcctaaaagaaacccaaacgctcgtctgcttgactcactaacttaccaagaggtcacctcaaaggacctctctgtaatggatatgactgctatcactttgtgccaagaaaataacatcccaggcttgttttctataacactctctcaaaccttgaccacatgcatacatgatcatctaaaatacaacaagaatgcttatttagttctgtgtcaatttgcagttgtggtattcaatctttcggaacctgggaacatcgccaaagcaatcaaaggagagagagttggtacattgataggaggaacttggaactccattgttacaacaacctcatgaagaagcctattctcaaaacacaaaacttattagagtatcttaggtcaggagaatcttgtaactcctgtatatattagtttgcagacaagttttacattctaggaatctgtctgaaatttttgaaagttaatctttttatacatgaagctcattttaaaccctttgggctactacattggatatgtcaaaatacataatacaaaaaaattacagagcaaaacaccaaaaaaaaatctaatcttgatcccaaatatgactaaagaaatcagcaaaagttggtgaagctaccaaactagtaaagccaggacttcgaaacgggctcataaatcccgccggcgagaataatcccagtggtatagccggcgaaaacatcccaccttgatgatacatcggagagaatatcccggtagaagctgttggcaacaaggccggagatggcgagagtattcccggagcataaccaccaaattcagctgcttcttccatagccgtgttgatttccaccgtctcatctctcgcagccggttcttttcctcctcttggactagcattttccgtggacgctagcctcgccgccggtgaaacatctccaccgccgccagattcgaggaaaacaccagaggagatccctgtgagtcgctggactacgttcatgaactcagacgcggttgcgtgtacaaccttgggggatacggcgtagataaccaccggctctctaggaatatacggcggcggttggtcacgatttggcggcggcgcagggtgttttggaggtttcttgattttgtgagagtctttgtgaacactaagaggtgaaggacgaggaccacagatctgaagctgccgcttctggttctgttgatcggaaggattgccgccggcaaaatactccgacggatccatacttgggaagcttccttttttagaatcaaaacttgttgttcttctgctctgtttggtttgggaattgaatgttttggcgactgagaaaattgaccaaaacaacaaaaaagagaaagaaataaaaagtcatcagaacgattagtttgactttaaaaaatgttgactttttgtgtctccaaccaaattgttacagcacatgcttaattaggaaacttccattcttgtcttaatgttagataattaattagtaggaaagatcttaggaatcaacattatcaacggcacacagttatatatattagtaatgttgtcaatcattaacatacaattattagtgatagttctatttaagttttacaagttctagaagttgcaaattatggtaacaatcaatttctttctttcttagtacctagctaagctattaacgtctgcatgcatagaagtaacaaacctaattaagacctatcatatgagttgttaaaaaaaacaaaaacatgtatattgtatagggtgagttaaatatatatacttagaagactaagtaattaagtatctacccatagaaatcagatatttagttgtcttttgtcagcaaaaaaagaagacgaaattgaacctatgaccaaataagatctacataaacatactagtcctcgttgaaacataaatgattttattaagttacctgataaaagaaaaataaactggctttggttaaaaacatttctacataaaaatattactagtctaataatttttccatatatagataatgataacaatgaacatatattatgaggatggttgctaacaggctttcatttgtttatccaaagcccatatcaattctagtttggtccaagaaaatagctgatcaaagtttgaaactttcgagtgtaataatattttcaaacaattcgaataaaataagagtgtattgagaaagtagttactttttaaaacataattttaaaagtagtcattttattatttataattgtaaagtaatcatttttcgtatacttacatatgtacaatacttttagtatatatatataaatatatatactttgtatattgaatgtattgtataaatttatgtgtacgaaaaatgactactttgtatattataatagtaaagtgaatacttttataaatttattttgaaaaagtgacttattttcaacttattccctaaattaataactatagatatattttttaaatttttatttagtttaaaaactacaaatttaggattgtttgaaagctactaatttaaaaagataaactactcatagaagatgactccaacatggtcctttagaaacctctccagtactgtcgttgagtagtgtgggggaattgacagacacttggtactcgtggttcggcgccatatcgaggtccgaatttgacgatgccttagtatcagggagggctggcaacgacggacatgggtactcctcgccttgctgaaccacatccaccaaacactacaggtcgaaggtagactcaatggctttgtatttacaattttggtatgaagaaagctaagttttaaaaattctaacatattcatagtcattgagttgtttagtgttttgcatagtttctagagaatgtttactagtgtctggttatacatgcaaacgaaacaatttctattgtcatggttccaaaataaaacagagcaaaacgttgcatttgaaactactaacagttattatagatgtagatatgaacgtgactatgaaaagttggaacttttgttttcaaactaccaaaatttggatatgaaactaacaaacaaacaaaaaaagttcacctttcacttcaaatttgatgttcttaaactttaatccgatttcattttccacaaggactgccttctctaaaagattaagaaaaggaagttgaaaaagttattacaaaaacaacatagaaaaagtagcatctgaaagtatttaacaaaaaaatctcacctttcatgttagttttgatgttcttaaactttaatccaatttgttttttcacaaggaatgcattctctaaaaacttcaaaccattgtcctgctgaggatttctcctcggcatgtggatttgacattcaagttataaagcaggtgttttagagattccttgcagagataaaaaatggcgagcgcggtaaagacttcattaaacatctatcggacgattctcttcaagatacagaggagattttgaactccttggtatagaaacatgaactgcaaacaaaaaaacatagaactttactcgcaattcagaggaatttagggttgttgtatagagtttatgtggtaactttggataccttgtaactgtagcgatctgagacatcttgatcgaaaaatcggagagcaataacaagaagggaagagaagaagatgttgaacaacaaaaaccagttgttatttgtgggttgagcagagaaggatgtgtaggaagtaggcattgtcgtagaaaaaaatggtgacaccaaatgtgatgttcttgtaaaagaagtaacataactggcagagatattaaaataaaaaaaatgaaatttattttggaggataatttaatagggtatcaaaaacatatggatatattaaaaattaaaataagttgtagatgatattaatatccatatgtttttgatactctattaaattatcctccaaaataaatttcattttttttttaattaagttataaagttaaataagacaaaagattatggattctgaaaccttctataatatcaactcagataattttaattgttttactaaaacaatctttattgttcctcaatcagtttatatttattatatcgtatataatatataaaaaattcattcaatctgaaaacttacgtgtatagattcctactattcaaaaagataatattttccgttgcaaatcaaatgttgaaacaagtaccattcaaatcaaaattcgaacaaaggatagaatataaaaaagcgggtgggtgtgagagaggcatgaccatgaaatgttgcaacgtcctctaacaagaaagaaaagtaaatttgttaaaaggtactagtttacaagataatttagacattagagaccagttttcgtttgtcacttcaatccaaagggaagaaccttattcctatattttggttcagtaataagcaaaattgcataaccatccatttaactcatagtaataaaacttttagtcagattcagtgaaccatactttaacttaatctagtacacacttacgaagctgtcatttgaattcttttgaaccaaaagtatctatctagtcacactagagagttttaatttatagccttaatcaaattaatcagataatagtcactcgatgcctttccccaccatctaaacttacaaaatcattcttttaactattgattttgttttattcaaatatttttataaactaaatgtttgaaattatgccgaatgattcaaattgcgaatattttaagtgcatatccatctttaaaccttctttactgtttcaaaataatgtttttgaacacacacaagttgtataattgtgtgacacaagctacaaatttgaaagaaaatgatatatttggctctaaatcgtgtaaactattaatgtatcaaattgttgctatgagtaattaaatcgtataattctcaattaacacgaggcaaatattagtaaaactgacaaaatttctcataagatttacaacatctatacgttcaaaatagtttgataataagatttacttatatcatatttattcataatgtactactaaaaaatcaaaaaggcataatatgagtagtcttggtctcgtaagcagccaaagcagaggaattaaacttcaacactttaatcaaatctttcgccatttgtctaaccatcgccgaacaattgctctgtatcaccactaacagcttcgtaactccgttacttctctccaccgtctcttccaccgtcttatcttccctgaaaacataacacaaacaccacaaaatcgtcacggcgtgttccgtcgccgtcgtcgatactttcaagagcttcttcaccactccttccacacatctaccattgtcgtctccacaaatctccaatctcccttctcgctttgacgataaagtctctaacagcttcaacgacttctccgtcacggcaacgtttgttaacgtctccgtcagaagaatgtctttgatcttcgtgattgcttttgcagcgattagtttcgatctcactcgttttgatttggagattgtgattagaaacgataaactcgcttcgatcaaactcggatctgacgactcagtgatacttatcgatttcatcatctctgttaaaactccgtcacgttctgctatcataagctttgatttagcgtcgaaggagatccaatccaaaacccgaaccgattcgatcttcgattccagattcccgcgttgaatcgctaagagaatcgccgttaaacaatctccgccgtcattcgccaacatcagattcgataaccgttcacgatctactttaatcgaatccaaaatcctaatcgccattataactaactcgatcttcgtcttcttcgtgcgtataatatcaacgagcattggtacgaactccatcttcttcgagagaaactctctgttcgaatccgaatccttcacgaatcgaacgatcttcatcaaattctccagactcatcaatctctccaacaacacattcacttcttccttcgtcggaacttctctaccagacggcggattcagaaccggagaatcaccgttgtgacgacggccgattgaatcagaccagatattgataagacgttgaagagtgaggttaggaacaaaatctttagttttgagaagttgcatagtagcgggacaagtgttgttaccaccatcgagccatctctggatactggctcgatcataagtcacgccggtacagagactaaccggagatctcatcacgtcaagagatatcggacatttgaagaaacttggcactgtaatgtacgtctctgtttcatctctccccatcagaaaaaaacaacaaaagaatcagagaaaatctgggcagagaaaatgcgggaaagtgaagatgatgctaagtgaaaggtgaagagagaaagtgagtggaggtgggattttaagagagagtcaaacgcacgcttgcgtcaccgtagcaagattatactatatactatagtagtagtgtattaaagatgttaatgttgatgacaagtcagaaattttaaagaatcaacaaaaattctggtcatgggtcaaaaatcaaagaacgtttcagagtcaggggattgggtcaagtcgtaaccgttaagatgtgttgttgatgggaggactttgaccaacggtgacgatcttttatttatgcttgcttacacgtgtgagtttggaggccagaagcgtgtgggagtggtgggacatgttctctgcacgagtggcctattttggtctcgtcgagagcacatgggtttggtccatataatgtcctgtttttagtactttttttatgaatgaaatttaaaaacaaatgattacaaaagcaatgttataatatttgtgttacttaaaacaaactctgagtcagcaaatgtggtacagatatacaaagatgatattggtccatggccgaataatattttgatgacatttatgttttggatagtttatgtctaatgttgttgataaataaattgtgttgtggcttccactaaggagaaagagtgtttgataattttattattcgagcgaaggtgtttgattcgggggaaaagtaaaagcgttttttttctttttcggattgtcatcttctgttgagtataatgtttgttagataaattagacttttttttgtgatgagcaataacgtatatacaattattaaagtattcgaagatacataacattttagctgtctgaaaagtataatgtatatatgtattatggttggactgtcttattgtctaatgaagaagatgtataactggctcataacaaattagggggttgtattaattataattcaagttcaatggatttgagattggtcttgatttatttattaatcattgctttagttgctcacggttgtgccatttttaatatatataatacatatgtttagatgctaaaacaaggtggtgctttgcatttaataatacataagtttagatgattagttttacttttttcacgtacaattagtttgttgctctttttcagaaaaaaggttaatcgtatctccttcgatccattaatagtacgtatagacgtatagtttcttactttgaatagaagaaaataaaaataaatttgaattttttgaaccgtagatgaaaagcataaggtgatgaccgaaagttgttggcctaatagtaaaatcaaacttaagtgttgaaaatatttcaattttcagaggtgagaggtaggagtaggatgaaatgctttgctgactcgtgaatcatttattttgaatatgttgggacaataattaagtttcttattattaggtcaactttcaattaggtttagcattattaaacgggtaagatcataactaatagccgttaaaaagagtgtaaaatcgtatcaaccttttaatagacatcgatctagctagcacttgccgatatagcacgtacgtgtatttaagtgaaatgaatggtaatcaaaaaaaaatttcttctcgttgtatttgttgtttataatcattcttatggcaggtaaatgaattgagtatcagagtatgtatatattaactcgtgagcatataattgataatagggtaaattgcaccgaaaggaaataaaactataatgatgccaacgtgcatcattgtctacaattagcaattatgccaaatcggaaaaacatctacgccaattatctcaccttttaataattttacctcactcatcatctgatccatccattatggttgttggtggacaataattttcatttgtcctcatatgcaaggaactaaggatagttttgggagctttaatattctctttttttgcaactaatgtatttctaatcgagggaacatgtaattctaataaacaaaagaaatatactaacgaaaaagaagattttacgtacgtcctattttgtcattgataatacatatcaatctcatagaaactgcaactttaaaacttattttgtttcatgtaattagttaatagttaattcacatggtgtcatggtcgatgactatatttgtttaccgcgagatttaaactaaaaatagaatgagataatatactcagtgataagcttttatcgaaaagaagaaaaacacattcagtgaagattaaaaacgttagtctggttgttaaatggcaaagataaatctgtatgaggcatattcaatgttaattctccatacatttggggtgtaaataatttaaactaaatatagggtgaagatagagatatgaagaagaatccagttccaaaagtgtggggttgtattattattcagaggttgccattggcagaggcaactcgtttgcatcacatgaaaaaaaacatatccagtgtcatgttcccattcgaagtcgacatcattcaattcttagcgagttatttatgaggaattttctagaatatttgtaaggaatttatcagatttaaccagcttttttttcttcgattcagatttggtacagttgattttgttgtgtagtatatgttaacttcaacacattattaaatttgggtgatataaaacgggtaatttatatggtaagaaacatctaaacgttatgattctgattaaatcaacaaaaaattggtaaccgcgaaaatgaaatccttttattgaggcgggccaactgatacatattcaatacattagtatatagtactattttcttagaaaatacacaattaccagaactagcttttgtcaaagaatgactagaactacctccaaacgtaattagtgtagaggttagacgcgcggcctccgaacagatccatatagcatctaatgtttttcttttcgaatattgattataacctaatctacacataaaatttaaaatgctattgataataacatactaatgatgaagatttttcacacgctacgggtaattaaggaagatgatgagagtaaaatgaggaaccacaaagtaacataggaaaacaatgatataattcattcgcgtgcgatttacatataatttcacaacaatctacttttgtttgtatcatgtaataaaggtcatccttttgttccttaatatacgggatgattttgatcacacatattacgtatacatgatcaaacaagagttctttagtatatttgaaagaattgttgacaagaaagaaacaaggtttcgcatgtacgagggggtatctgctcgtgtgggctatacatgtttttgagtaaacgtgtcgttatatacatgtaacgtactgaatatatagttttaaaaagtttggaacattgttggttgatcatgtgaccaaatttattatcttacactttgtggtctatctaagttggaaatttttggttaaaggaaattgctgacctagattcattcataaattttcaggttaaagaccaaaaaagttatatctcttatctatgactcgtcattggtgctggaatttgatatttttttccgaattttatagctagttagtatatcggttgagctacaaaactagaatagtatgactttattttatttgtggtgtgattaaaaaaatcaaattattagattaattattgagaactatacagctataaaggtatcatcaatatgcatttatgttaacccacatatagagttaaattgtgcttgttgaaacaaaacatcttaatcgatcggtgacatgcgggatttcgtgttacttgaatcacaaaaatttacgagacattaacgactagactactaacaatttggatattatctgaagaaaaaaaacttttagtaaagtgccgtcaaaaaaatggaaaaacttttcgtaaagtcatatgagtaaccataatggggactgcataagcccatttgaatgggcttgaatttgatgattaaaaaagcaatggcaattatgttttttccttgtcaaagcagtgcaattatgcttttaatttccatcttttccgtaaacatgatagcttaactgttagtggccggaatttgcaaatttctagaaagtttaaagtaccggtgaatttgaaatcggataatcagtctctactttattagaatcatgtatgtaagctatattcgatagtgcatgattggttaaactcatgtgttgaggctgataaactttttttatatactatgaattgaactaatgaaagttgttatttagacattgattatgcacatggatgtcgtatttgtatataacatgctagctttatctatagaatagaagggcatattaaactcagcgttttagaaagtcacatacaggaaccgcaaacttttttaatcaagtaattaattagtggagaattctttaacaaaaagaaagatattacgcagcacttggacaaatggttggctcatcagtctctacaagtgacactaaccatctgagaaaacattaactaattaataacaaaatcgaaagacaagaaatcaatactgagaatataatatcaaaggacaaaggaaattgtttccacttttcatcttcttaacctgaactttggggaattggggacccaaaggtcttcttcattgaccatccatttttgctattctaaataatcatttctctcaaccattccctctttcaagtttcaatgcattacatccacatttgttatacattctaaattaaaccgttgtttaaagttttttttttcttttagtcaataatttatgtacaattgcatgtaacatttgcgttacaagcggaaacatctgagagagaaatttagcttgaacttggttagaagatatattaggagtaaggtgttggtatttcaatcacttaaacgagagattactgttttaattagtgctactagatggagaaaaatgatttacgacattaaagagattttacaagtactttcaaacattggcttagactaaaaacttcttagttaaatataaatttctttgtatcatagtgtaatttaaagaaatgaaaaggtaaaaccatgttccccggtccacctgacactgcatgtataaaaaagaataaattccaaatcaattattttttagaattaaaaaggatattttcaacgcaaaagattttattttttagttttgagtttaacaaaaaagaagaaacctttagttataaattaatatatagatagatacagacactctcttatggatgatcataagatacgaataaaatgaatgttcagtttcccttacctttataaattttttattggccattataattgttccagccaaagtgagacttattcaaaaggggttgctttcaaaagctcatctctctatctctctctctgaatctgctgatctcatcactacttaccatcttttactccatcaaaaaatcctcaacaacactccaaaacaaaatcccacttcctcaaaactgaaacaaacaaaaaatcctcaacaatagaaatgtatcctacacgtccacattattggagaagaagattatcaataaaccggccacaagcttttcttcttttgattctctgcctcttcttcattcaccactgcgacgcctcgagattctcgtcatcaagcgttttctacagaaaccctaattatgatcatagcaataacacggtgcggagaggccatttcttaggattcttgccaagacatttacctgttccagcttctgctccttcacgaaaacacaacgacattggtattcaagccttgttgtctccttgatcactctctctgtctagatatatagtactatatttatatctaatgcatgcactcatacacaaagagtacaagaccattcatcgatctccgatgtttgctttgacatgaaattagggtttcagatgtttgaccctataattgttccttgatcttttgattatttttggtttgcatgtaacctattttagattagaagtgagagatattgtgattaggtttgggttttgttattctcactcttctttttttttttttttaatatgtaaatcaagtttacgagattagatattaattagatgcaacaatctcgttacttcaatgcctatgtttacatatcccgttgtttcatctaattaattctcattgatcatgttattgatttctaataatatcaaagtttaatgggtaaaaaatggaaaatcattgtctattttaaagtccacaaagaaagaccaacaacttcattaccgtctagagaacaaagtgggtcatctttatactcgttcaaccaatgagatatgaaagaagaaaaactgtctttaaaaattgttacactatttagtttttttcttttttttcccaagagttgttatactaccacgatagttttttgctagactgctgtataccactattactacattatcaaaatagtgaaagaaatcaacagttggcaatgcacgaagctactattatattgtagtaaaagaaagatagagtgagtgatgaaataagatggccaaaaattcacgcaaggttgagttattaacgtaaaatcgtaagaataataatagccttcgtcatgtgcagggtatccaataacccatcccgccacgcccggactgatttgacactcgtttacaattttgaatatagctagtagtgatatgatctaaatttatttattttcataatttttattttctcagttaacctaaaactacattaaatttcacaaccatatattgtacactggacaaattaaaatacaaagtcctgaggaaaaccagagatctaacaaaagattttgaaggtatagatataaccaattaaaatattcttctaaacattgcttttaccacctaatttgtaaataaaaattatagatgtatgtataaattacatttttcactttaagttctttatggtttcatggagaacatgattaagattaattattatatatcacagaattttaagagatcattttacattagacaagatgccgaaagatgagccgtttttaacaaaaagttaagcttaattttcgccgaaggttcttatgcattgaaaaagtaaactaaaagtctataatttaaccaagatttacgattttttttttttttgcattttgattagtttcgtatcttcctatctttcatcaaattaaattaacatatatatcactatctaattatatctcgaacaattatgaaacatgatgactcttttaattggaggagaaaatggccaacaccgcatgatttgtagaatatgatgacttgatgaggataattaatggtattacacgataaatctaaacaaaaatcatattattatcccataattccgaaatcgattctaaaactacaaatacacacacgtatgtaccttctcaattattcatgattattatatcaagagaaatattacccactacttttttctaactttattttatttatatcaaacaacacaaatttaagatgatcactcctatatccaccaaacatttcacataactgatattaaactacaacaaaagcattcactactattatcaagtatgtgaaaaagtgatttagaatcgataattctttaatgtgcttttcaaagtttcattcctaacaattatacaatgtaatttggtagaaatcaggacctttgactttctgttatgtttatatatgccaaaacaatatcttcactccatgaatcaaactaaataatcttgatctcttgacatgaagaagatagatgcatacatagatttcttgcccacgcttgtcattacaatagtagaaaacgttaggcaaaagcaagaatccggtaagaactatacgaatgatgaatctgtttataagaacatgagcaaaagttggttcagtttgtaatgtgttcaaaagtgattcgtgatccgttttttgatctctcttgtagttttggtggaaaccttagcttaagtgatccgtttcttgatctctcttgtagttttggtggaagcaaacccggcccatttattggttttcttccaagcttttgcagaaatacacacatatatatgtataagccatatgggtatatatcacttgcttataaccatatgagtataactgaaatgtatggtcaagctggcatgacttacaaaaatcagttaaactcggtaaataggtgaagcaattgagtacatttccttttagcatgttgtttgacaaattgctgaaacaaagattggttgcgtcgatttgagctcacaattctgtacacttcttcagtgttcatagcatcaaacaaataaatcaccaatgttgtcttagacatgtacaaagactgaaagcacacataacagagatgagtttaggaaaattcttacacgtaaacgatttttcggaggattctcacttaagaacttccccaagaataatctatagcaacaacacatggatctccttgccagttcttcttcaactcatatggcctataatcttcctcatggaatccattgagggacatgaaaactacttaatcttccttgcctaagtagattgttcaattttccaacaaaagagagaaaattatttgctaccatcgaattgaccataaataataaagtccagttatcaaacatataaatcgtcaagagaaatagaattagaatcacactgaaaacacttgttgtgtctcaactcctaaagaatatgcactggattgaaagaaaattgatccaattcatagagataaaagtatcggagtccgagctacaattcaaacatataaatttaaccaccattgtttattgaatcaaaagctttaaaaggtattaaaacatgttttttcaaaaacaaaaacacttaaggatgatagtcaaaaattaaaattgtcatgaggtggctggagccaagcgctgcagtcataataatagaaagttggatgagagcttttcacaaaatcatcgatatccgatgaatatagaatgttcctctcctcctctggaagaccagctcttgttaaagaggtagcgtcacttgaaaatactgtcaagccattaggtactttcatctcttcccacacattgccttgaaggtttagtttaaaggccaacagttttctgttgtttacgcggcgtgtagtcacaacaaagatgtctccttcatgctctgtcatgaatacttgcctcacaagcataattttacgacgaaaggcccgacatggtttcactggaagaacattccaggtttctctagacgggtcgaaaaccgagaggcggccactggtactgagacaatagaacataccattggagaagatacatctattgattacctcaccgtaacgcttttgatcaaagtgatgagtggtccatacggattcaccagggcgccaagtatcaactttaacaactgcgtaaagaaaactttgaggggtgaaggatatgacgcaacaactagttgatgtgggagcggctgagaaagttaagcaatcgcgtgtggaattttgtggcacctggggtaagcagatgcgttccccggtaaacgggttaagaaagaagaccacatcggggttatcttttaccacaagcaaccaaccatccttagcacaagctaatttatttctgtagcccgttaactctggaaacttgaggtgatgtgtttgagaccgtgatgggttaaagagaacgtagtctccttcttttggtcctcctctctgactctgtggataaaaaagccaaggacgactctgaaacttcctgacagaaacagcttctttaagccatgtcttgcagacgagagaagcatgtatgttggcttttaatccgaggcgagacagtatctcttgcagcagatccgtcggaatctgtttatcccacaatcctctattaacacagttcttcttcttctttggtccaccatttcctctgatcattagaagaagaagacgtgagggtaatataaagagaaacacctcattcatctacaaactttaataagtgaaatcattcgttcgtgttgctcttacacaaaaccctaattcagagaatatcctaaatcctggaatttcaattgaaaatagaacaaaagcaaaaaggctcacgatattgtggctgacgccggaagcgcctgaacaatggacctcgccgtgagggattcagcgatcggcggatatgtttgccggcgcgtcctcattttggagtgatcagatagggttttcgtcttctagatgagaaatgagttttgtttttgtttttatttttagatctctctctcaagtctcaacattttaagaaatttttacattttttaaaaagttgcataagattaacgtcactaaatttatatgagcattaacgcttaaactgcagcaaatttacacatcacaacccaaatgtgtaaatatcaatatgtaaaaatttctgcaaacgctctaaataaaaatactcaatatttaaaaacagaggtttattattggcaaatacagtttcagacaagatcttcttcagtcctttctgcagcatgatttgactccgcaacacatctttccttcgacataaaaatggacagtctcttcttttacatgcctttgggcgatgccagttcgggagcttgatgatgaccatgacatgtataatgtttccaaggcttcaactgagaacccattgttgcttaagtccagaatcttcaactggttagccattgaaagagcggtagaaagctctttcacgatatggttcttgcgtggcaaactaagactactcgaggttgcagttccttcctctatttgttcatcttcgctgtctgcaacttcgagatcatcacactccatattggtttcacatagctcttgttctttgtccattgaggtgacagatttacatgttccatgttcttgctctaccattactgatctttccttcacaggttggccaaacacagtctcatcttctatcttagcattgtcagaaagattaagctcttcaagattcttattatctgcagagcatttagttgatagtttaaaaaggagaagatcttttgtttaatagcagctacaagaatacttcagacctgaaagtgcttgaattatgcatagaagcccagcgagcttcagatgacacttgcttagaataagaacttttatgtttgaacaaggattcctaagcagctccccaagtgcactgattccctgtttgtttagtgtttcagagagtcagttatgctttgagaagacatgaacttaaaatcacatgttgaatgattgcaaattctttagcttattctatcaccattgcagcctcaacagagttagataaaagagctttaggatgttgagtcatagaaaacatacctcttcggtgattggatttcctccaacattaaactcaagaatgctagaggttagagtaacatcttggttgagcttaataaagaaagaggaagctagtccacaacatgaaaggtcgagcttcacagtttcttccttctgataacatagagattcagtaacttttatagccccgtcctagaataatttgtatagtatcgtcagataaaaaaagatgtatttatcacaatataagaattcaattttgaatgctaaacatatcattaccgttcctattccactgctgccaaccaaaagttttgacagagatggagtcttaacaagtgcataaaggctatcaacaacttggctgctcagctttatgccattcatgctcagttctgcaaagctgcagtgttttgacatatgatcatgttagatggatttacgtataaaaaaaaaacagctttaaaatgtgtttctttcaacctgcttagagtagccaatttagccaagaggttttgaatactactccctgaaacaggattattataacctgccatatacggatccaccaacttcagcaaactgaaacgagataaaaaaaataaattgaatgtacataacaaattagaaagatcacctatacagagttgtgaaagtcctgacttcgaatccaaagcattagctaccttttggattgttcttgatgtaagtgaacaatgttccacattcaagctgtaaagtgctaagaaacaaaaggggacacattaatgtaagctagtgaatggaagaaaatgtttaagattattaaacctaatatcaggtatttcatatatctatctactgggtttataagacaccagtgaaaccaagaaacaaaacataccatcagggcatttagatactgtaaatgaattatcataatttaaaaaaaaaaaaaaaaaaatctataccccggcaatttttcactatagttgagaggtatgatccacaagcatctgtaagtcgattcctggacacattgaggacttcaagtcgagtgaacagaacagggcattcacagatctggtaaagaggagtatattaaataatacgaaaataacatgaatatgtgaaattttctagctttgggcctagtagtgtacctgaaacaaagcagttggaccaaatcgattgcagtgcaaatccaaagttaaagcaccatacatctggcttgatgaggcaaaaagttgtttcaatttctccattgttccattccctaacaaccaatgagacgatggaaattaacacttctgaatttcctagtagttccctatgcataaccaactaactcacttaggtcagctcattaaattaagtaagacgtcagaggcaactttcacctagcatattgtgggagagatccaacatagcaatattgtggacatggagggcacacaataatggagcagctgatatgtcttgcagttcacattctgacacattgatatcatcttctacctgataaacatacaacgaaataaccattcagattatacatcaaataaagtaagaatttgtaactagctagctttaagtaggttgaaaagcaaacaaagagaagaaaatatttcatacattaaccgctaaaatttggggtaatactctcacctccgaaatatataatttcttaagcaatttcatactgggtttctctgacaacgactggcaacagtccatgtatagtttcatcaggcgcttgtgaacccagcctgaaaacaaattaatttcatgctgattcagccgtggtgtataaataagagggaagaatcaatgaccataatcttaaaagccaatacagcggttcagcacaatcatgtaaaaagtgagagaacaatttgtgatgaaaacaaatttatagaatgatcagcttgacaatcatacatccaaatatcatgagtagattccaattctatcaaggaaatacttaccatcaacggaagcttcaataacaacattttcagaagagtccctgagaatcgcatatagttccaatggtttcagaactcttccaccatattccaaatgatgaatgatcggcaacagacctaacgcaaattgaatgttcaaagattcaaacttttagagcaaaacttaaaacgtgctaggaaacaaggggaatgatatcaaaaagcaaaagaaatgttattaagcgtgagatgagaattataggactgatccgaactgggatcatgcattatagagactgatccgaactgggatcatcctaaagttttgctaagaaaacaaaagcacatacctttagatttctcatcgtcaggaagctgtaaatagtataggcaagtaagttccaccttcacagactcatcatcgtgagaacaggagtctaaagctatgtgttcattttcaatttcaatttttatttttcgctgcaacaagtaaaacatatagttatcatgaagaagattggacgaagtagaaaaataaatgaaatccaatcccaagaatggtcaatgataactcaaaaaccagatcacagttgctcacatcctcagtttttgagtaagcgtggaagttcacgagagcagctccagttttgcaggacgtgccgttggagtcgccaacatcacattgagatccttttttacgacgaccagttgtttcaacagctatattattactcaaagatctacaattgctgacatttggagccaccttaataggatggagaggcgtatacgagcaagaaccttcttctacattatcttggatggcacgattatccgtataattaatagcaccatcaaaatacatactttcctcagaaacctcttcattctgccttagaactttgtgagaactgtctttagggcatcccagctcatattcggtctcactttcatcatcagagaggattactcgaatacgctttcgaccagcaactgtctgctgagagtctgctactacagagaaatctttcttcgtctgatcagtgtcagcatcttgttttcctgaaacttgtttccttttgaacagacgttttccaggctggagaaatgaaattagtggcacatcatcatttgcttcatccagatctgctaaccgttctgatctaagtgaatttggtgtttgcggtgagctacatgcatttggcctatcattcgatacattcgcatgcccttctgagtcagtttcagagcattcatcttgtgtactacattcggctttctcagcatgttctgactccttcagattttgtattgtttccttcaattcactagacagtagaaataatatatgagtaaaatgaaatacttgaaactgcaaaccttacaccagatttggtgtctatccatattccgtccagtgacaaaacagtaattgttacctggctttttgagcattcccaaatctcatcatatggatatagtgtatatcttccagtgcagaaagctggattgaaggaagattagctttcaaagcaattctgcaggatcaaatgaaaataaatccagaaagaccaatagttaatttattagcatgcagtatgtgtgtataaattcacgtaaatgtatatgcgatgtgtttgaatatagcagaagaaagtcacagaaaaaatattttaagtgattgaaaatgcaaaatgtgctataattatccactatcatgagaagtactgattcaaagtacattgtattatttattcagaagccatagtgcagtaattcgtgaacttagtcgaaagggacaaccaacaagcagttaagtactttatagcacattcacatttgctctgcttcaagtgttctttccattttaagaaaaaaatgagtttcatcgccgtcatattgttcaatggaattatcagttctctcaaggaaaattaataagtagatttactaggactgaatcacaaacataaccaaataatagctcaaatgcgcagtttgataaagattacttataattggatctacctgtacccctcttcatatgcctgaagtgctcctgtccattccccaatacagtccaaaccattaccaatattaatcttcgctagtgcttgaccctacaagagaccaccataagtgaatattagaatcaggaaagaagaatagctataatattgacaaatccaagaaaaggtataatcagttttccacagaaaatgttcagtagaggcctaatgaattatttctggttttgtgaatcaaattctgatgacagtagtgaacataggtttttataattaatcgtgcaagcaaacaaatctcacctccagattaccaattgcttcatgtccctcataacttcttatgaaccacttcagggactttctgaaatttctgagattttggtaagattctccaacaatcatgaaggcatcactcagcttttccttgtcacagagttcatctgatattttcttcttcctttttgaatattgaagatgctaagacattcaaagaagaaatagcaaccctttagttgcatgcaaacttcaaatggcagcctcctacttaactttcaaaactatatcacaagtcattgaaacagtgatgcagagacttggatcactcagtatccgtatgatacagaataatcatcgttttgccacataataactttactttgcaagttcagaacaaagatattatcccagcattcaaaagataggttttcttgagagaacaagaatcatgtaattctttgataatatagtcttcctgactgatctgaaaagacagtgtcaatagcagaagttcacaaaacttaaatcaaatctaagaaaatagcatatttttcctactccatactacctgatgaaatctcacaatgcttattcatcattaaaaacccctacgatggacaactttaacttctggaaacttttcaaataaatgcgaacatggggtggagtgataggactaaaaaggaaggagtgtttaagttataaaactcaccttcagccatgcgaataccatgctagatttatcaataagacttccaagacaagcatttacttggagcatagactttcgttcctccgaagtgcctttggcatcagtcatttctgcagacaacttcttaagcataagctcttcttctctcaattcttccataactttcatggatttcttgactatcttggtattatgctctatctgttcaaccaatgcactctcgtcttgcatagatttcgctagactagaagctttaccataacataaaagagcatcaatgtacttttgggtcttgttgtgtaattcagcgagattgatataccccttcgcttctccttggacatgattaatcttatgacagatattaatatccatctcaatgtgtttctttgcttcatcccaacttctcagcgccataaaaacgtttccaaggttatgatgaagcctactccgagcagcatcatactctctcacctcctcttcatcgcaaatctgcagccctttcttaagaatagtacgggctgcttcaggattatcaagatcaaggtcaagcataccgatgttgttatgtgcgttaatatactcctcaaggaatccgctagattctccaggaggtggtttctccttgagaatctgtgcaagttccatggctttcttaaagtactttttagcactctgaatggcttcacaatcatcctcagacttcaagaacatttcatggtaagtacgtccaagttgagtacatgctctttgcttctccacagtgtcattagcttcttcagctagctgtaaatgcttcttctgcaaccaccagaaaaaaacacaaattcaaaatgaaaaactcaaacaccaaaattattcacggaaaattcaggaagccaacaataaccaagtaggaaaaagcaattgattcaagagggcttacctgataaatcaaggcttcttcgaaattttcgaggcggagatagatctcgccaagagactgacaagtaggtaacaaatctttcccaggtaaatacttgacggagatatcgtaatcaatcctaaaccacttgagagcatcaacgtactctccatgattcttaaggatatcgccgacattgttagcccacctcgcctgttctctccggtcacccacttcttctgctttccggtacgctctcttcgccgcagctacatctaatcgacccatcggatgatgatttctccgttcttcaattgaaaggtttttgttttcttccttccgattttcagatttctcgaaatttctttctcagtgattttgattttctcattttctccagtcgccaaatttttggtcccatcccaaactatcccgccaaaattcaagggtaaattagaaattttcataccctaaatcctgaagttataggccttttagtttgggccttgggtcgagtttattttgggcttcttatatcctcctgtctcctgacaagaaaacaaaaaaaccctaagggttctaaggcactcgctatataaactatcattttgcgccgcccgaacccgaagaagaactctctcttgtaaacctgcgatctgaatcttcccggcggtgaaaaatggttgcggagaagaaggcgaagaagtcccatgaaggaatcaacagcagattagctcttgtgatgaagagtggaaagtacactcttggatacaagtctgttctcaaatcccttcgcagctccaaaggtaaaaatttaaaatccctcttcatcgattgattatagtgttcgtcttcctcgtaatttagttgaataattgttggatattgttggggggtttaggtaagctgatattgatatctagcaattgcccaccgttgagaaggtcagagattgaatactatgcgatgcttgctaaagttggagttcatcgctacaatggcaacaatgttgatttgggtactgcttgtggtaaatacttccgagtttcttgcctcagcatcgttgatcctggtgattccgacatcatcaagacacttcctggagatcagtgattctgattttgatgattttgccatgttgttctctatgcttgattatgctttgtgttcttcaaagacttaatgttagatttctttggtttcccgacttcctcttaatggttataattaattactacattttcgtctctgttgattgattccttacacgaaaaggcttgattacttttattacaatagttggctattaactaattacatgttcaatttatacaaaatcatatataatggacaatctcttagaacattttaacaggaaccattttttatgttctaacttgtaacaaccaaccaaattaaatctcaattaatcaaatagaaacccttcatctttctacacttctcctccaaccaacaaattaaacaaaagagattaaaaacacaaaagctcttcatcagtatcaacgttttctttgagcttttttggctattactttaacttcatcagagacaactttttcttcgtctccataatggcctcttctcttttcgttgctatctctttcatatcttcctgatacttagcttctatctcctccagctcttgtcttaacctttcttcttcctccaaacttactggttcggttgcttcttctacttcttgaatggagctcttgtcttctcctttggtggcatcgacgcattgcttatcttcctcatctgatcgtgggcaatctgagttacacgagtgactaaccaactcacaagtatcatgaaaaacagtctcctcttgtttctgtggctttgcttcgttatgatgacttcttgagttctgattcagttgcgaatggatgagatgatcgactgtgacatcggttttccaggtgggtatcatgttgacaagtagtatatcaatcagctcggctataaacgtgacgttctggtcagttaactcgagttgctcaaccatctcactcgacaccttagaagcagtgtccccttcttgatagaacaggaaatgaatgttcctcacacgccctgtgcaacaagacacagttatattaagtttcagaatgcaaaaatatcgaagaaagtaatgaatcttagctggagcagaataaagaactgaccattctcatctactatacgaagaattaaggacacagactgctcatcgttttcttcacccttgaggacaaagaaattccctctctttgcgcgtctaacctcaatacacctggatcctgaattgtcgctaaaagtaacaataggcaggttactgtcttcatcaagatctatcgacaaggttttactaggccgtgttgtaggaggaccttcagacataaggcaacggtctccaaatgcgccttctttgggcattacaatgtcaggaagcggcaaaggattgttcattgttaaaccatttagttgcagaaaagggtccaataaaagctcttttgctgacagcctttcggatgcaggaagtaagcatttctcaataaactgttttacttctgggtctttaaccctggagagtgaagcaggttttattcccttgaaatcaccaagaagaagaatcggttaaaatcttgtccgtaaactattgacagggattatgtggcatatatgtctttgttgctaactcaccgatgaaaccttcttgtatatctgagcagagtttttgcattcacagtagggataatcaaatgtcaccatctccaacatacacatcccaaatgaataaatatcagccaattcgttgtagttctcgtcgtaaagctcgggtgccataaactccggggttcctgttggcaacatacaatttgaccccaaaagaagagaaattcaaatgtgacagacaaagaatatagcatggctacaactgtatccggtcttcttggattaaaccagaaaaagtgaatatgtaagtaacaccaacaagcgggaaatagaaactataccaatcacacttttggcattagcttgctccatgacagtggctagaccaagatctcctattttcacttctccatggtttccattgataaaaatgttgtcgcatttgagatcccgatgtataattggtggctcttgaccgtgaagatatctcaaacccattaaaatctgcctcgcccaattcttgacggccttcatgttcaccttcctgtgtttcttgcggtagctgaaaccaaagatttcttaaactccataacagtgatctcctcaataagaagaaagggaaagaaaaaaaaaagaagagagatacatactgccggaggctccctgaagtgaatagctcagttattatgttaacagtcttgttcttatcatcgatccatgaattatagaacctaataatattattgtgcttcaatgatttcaacagacgcacttcagaatagagcctctccaggcaattcggtgactgcaaaacatcatctatccgtacttggttccatgcgacttcaattccatctacttcatcaaatgccttataactgatttccttgagttaaggtacaaaccaaaaaagatgcagaatataggagaaagatattaattcattctcgtaaaagagtttcgaaaaacaaaatcactaaaatgatatgagtacatttctaggaagcttctgatatcaagaatactctaaatctccgaaataaatatgaaaacaaaccgaaaaggatacacagtcttgaatgccccttttccaatgacctctttatactgaaaggtccacaattgattggttaagaacatcagagatctaaatcacctcacaatatttactcaaaccttaacattaagaagtaaaacaagccaaagggaggtggaacttggtttcatagtatcgaccaattgaatggtaaaacacttaacaaatagaaaaaagatagcattccaatttccaaagagcctcttcatacccgtatatatcgaaaagttggatcaacttcgagcacttcggggtcaggaggctcttgaagtgcagaagcatcatctgtaccttccattctttcttaaaccttgcaaaagttgacaacagaaaacaaatccataaaaacacagaacgatcatagaaaccctttagattcttttgggtgcaacaccttgaaataaaaagaatttcaaggacaacaagatactcacacgctaattcaactctaaatccaattttttgtgaaactttttaaccttcgattactatccagctcatatcaacaacaaagacaaaacagaacaaaaacaaaattaaagtaaagctcgtcaaaatttaggatcgtgacataatttttataaaaaacaatccaatactcttcttctcagattatattctgtcaaaatatccacattcgacacaggtataaacaattgacatgaactatttcataattttgagaggagaaaaaaaaaatgcatacatgagtatacattcatatacattcacatcaatgcatacattcatatgaacatagaaaacacacgattaaaagattttctctctcaaaaaaaaaaacggtataaggcaacagaatcgcgtaaatttgtattaataagattctgacgtttcgattatacctggagaaacgaagctttgttctgtaattgagacgaaacggagaaggagaacaacaatgggaagaaaaatcagaaccctaattgagagaaatcgatggatgaagaagaagatgcagcgacacgggaaattataacaagtgtttgttcttagctcatttacgaaccaccacctctattttaatttccttcttttttcccaatattaatttttagaaatgataatttttccaagtcctaaaaacagagaaacgctctccccatgcaaatatgacgtgtcaatacacgtggcatttaattcggggttgtcaacccaattgatgacgttgaatatccactaggaaaatagcgaaaacaataaaacacatgaaatttagttcaatttacctaaaaattattattacataaaattaatttatttcattgtctacgcaaaacgcataccaccacttcatgtaaccaaaaacattcataaccattgaaggggactcccatgaagaaattgtctgagtaaacatttcaaagaaattgatttcctcatcgtgataaccctaaaatgttgttgtcatcttcgtccgaggaggatccatcatataagctcccactagtgagtctgttaggcacagtcagactatcttccttttccgactgtccaatcttgatgtcacggtgtttaactaagagccagcgcagcagtttgtcttccttgttcaggtagtgaagctccttgttcatgtttggagttgtcatcattgttatctgcatcaattgtccctgcaaaacattcacccgatatgaaggcagaaaacacttagcaaacgcatgactctgcagattagtaagagaggaaagctaataaaagtggatgttcaattttcactctctgcagattctatcaaaaatacataggagattgatgtttaaagcttttgtactgatactctcaaaacatatgataatcctacatctatagttgatcgaaacaaatgtatcccgttacttcctaggtatgtatgaattatatattctccttctgttcctatatagccaaattgtctaataacagaaacagtttgaagaaaatgtataagcgaaagctgcgattatttgtaccaggttatcttacaagtaatcaaatttcaaactgaagatccaaagcacaatcaaattctttggacaattcagtagataagaacttatctagaatcctagctgttgtattaccctcatcaggattttctggaatcttaagttcgaaaggaaacactgtcgaggaaatgaaaatctacaaaataccatagactaaacgcaacgtttgtgactagtaagaaatcacaaaacaagtatcacttcaggatcgtagccagtatttgtgtacaagaccgcataatttcccccaagtccagctatttaaccataagaatcaatcagaaagttacaagacacaaagctttttcgaaaggccaacctaaaacataatgctaataataagattgcttatctatctacggttatagcatcaaactaataatcaaactccacactgaagatccaaagcaaaatcaagctctttgaacaattgactaagataggaaccattctagaatcctactgttctgttatcctcatcaggattttataaatcgggtagacaaaatcacgcaaaaacaacctttactagtaacaatatgatgattttgcttcaagaatccaactgaaagttaaactaagcgtaagtaatctgggcgaaagaagtatcagtccatggtcgtagcaagcatttgagtaaaatgactgtataaattcccaaaatctagctatctaaccataagaatcgatcagaaagatgaaaaagacaaagctaacacaaacctaaactaaaatgctaataccattgaatcggcctggagaaaatcctgatcaaacaaactctacggactcataaaccatcgattcagtaagaaaactaacgaaattgaatacctgatagtgtcttccgtcgagctttctaataccgtaacccaattcgaccttgccaaaggatttgatctcggtgaggacgccatttctgctgtaaacgtgtttaccaatgcgcgcaacgaggtcgatgaggccctccttcctgattataggcttgaacagaagcatacagtcgtagagcggcatttttgatccttcttccttccgacaagagattagctctggcttgttctctcaggtttaccttagggttttagtcttctcagatttcgccgattgggtcattaccaaacggcgacgtgttgttaagttttttttagtgaaaacgacatcgtgttgctatatatattatttttgtctgagagttcttaaatttgatttggaaaatgaaataagaaattgtagaaagctttcatattagttgacaacaaatgaaagctttgtaatgattataaatagtagttaacatatgtttaccattttatttacatggaattttttttctttttttcctgggtataagtttatttacatggaccaatatcatccaaagagtagagagcttaatattatttacataggcacacattatatgaaaaaaaaaaaaaaaaaaaaacaaaccgaaacccaaaatgggtcaagattctgaaacatcaaacatcaaagggtgaagtaatagtaaccgaggaagggtttgatgtggattgaccaagcaacaaatgattcttcatttctttgtaagacctcaactcttccaaagcatcagctgttgtctttgaggccagagcaatccccgaggctgtgatagacgctactgctatctcatgagcccctgcgggtttgttgttgttcgagcaaatttcaggtctggaagattcagagacatcttgtctgagaggtggcgctttcttcagcattctcacaagggcaccaactgcagcatcttgggacttcttcgggtatgacccgcttgaatcgaatggttcatgtatgtctcctctgtggtcaaacgaccctggtctgaaataaggcagtaaaccaaaaatcagtttcttctactggaaacagttacaaaacaaagtctcaagaactgaatcagaaaccttgagacgaaccatttcaagtcattatatgattaacttattatccccaaatatatcatgatattagtgatagagaagagttacgatttcttggtttctctactaaacagttctctttcttctttttaaaagatcagtacaagaataccccaagattgatcgaagctacacagatacagaagcattacagtaaccatttcggtcttatggctgtaaaatctcaaagaaagaaagaacatgaactagcttcttaagccctactgattagcataagaggccaggattagtaaatcacttatttagaaagtcaattggttttgaaatataatagctatccacttagaaggacaacctaaagcaatcaaaatattaaatgcttgggctgtagataaattggaaaggagaaaatgagatatgtaaggtttttaagaccatacctgctattccgatctgtaatatcatcatactcaacatcaaatgggcaagggaaatcaggatcatcaaaatcgtcttggaaagatctactggaactccgggaaaatgatatccgcggagaactgctggaagacggcctcaccccagaaggtcttctaaagtcatctctcccataaagaaacagctagaaggataatgaatatcagtttaactcgttaagtcacatgatcaagaaaacagataaaagataagacatgtggagtacgtttaccttatctattgctgctccagattcaccaggacccaagtttctcacaggcttcaacgaagcgtgtctcgacaacttcagatgagcagaaggtgccacaacgttttctttggactggaaagttggagctggtattctgactggagcactttcagtacgtgtgatgcctcttgggacggcgtgttttggtgctgaaggagaaggaggaggggagaaatcttgacaaggagaatactcttcggggtagctttccttcctacgaccagtgggtatatcagaagggtgaggaggaagatgacgagagcaaggatgtgaaaccaatgcatgtgaatccgagcgtgtaggcgatggtgagcaagaaacagaaggtggagatgccttgtaacgatcgaaactccagctatggcgcctttgaaatggcagcaatggaggagaaccatatgaaagaggaagggaagggaacctctttaaaggatcagccaagggacttccaacataatcggttataaatgttggagacataggtgtagagtgttcgcaactgacatctgagagagaacgatataaaaccgataagcaaagtctaccacagatcgtttcaaccggtgtgaaagaaaacttctgcatttctgcttcttctttacgagtgaatggctcaactatagaagggaccctaggaacaagcttgaacttgaagatctgccccgaggaattgagttcccgaaaaatcttataagcaggtaaaagcctaaccatgacaaacaatgatctaagcagcagagtagctttcttatacatcacttgcaacttattactgcttgacctcctgctactagtagtaacagattccctgatcttcctattatcatattgcaccacccatctctcaataatctgctcgttcttagtctcacatcccaattcatcttgatcagaattccaaccagactgataatctttcccggagaagttcctgataagctcccttttaccagactgatcaccaacaagtggcctcaccacaagaacaacatcaacaaccaaaggctcaagactgcttctccgcccgatatcgaaactctctaaagctgcaggacattccctaagagctagattgaaccatttgtctcgaggtctaacactcgaggaagaggaagaagatgaggaaggagaacaaatcatctgctcaccactaaagttccttgaagacataaaaggagtccttgattcgagaatgatgtgaaggcttttagcaaagaactcaaatatgatctgttctgctttagctccttctgaattgttgttgttactcctgttgtgtgaagatgacatctttctttttctgagaaaccaatcaattgagaatagttcaaaatcagtaaccctactaattccacatttgatcaaaccgatcataatctccagtaaaaacccagaatcataaatatagttctcgatgatctaagaaacaaaaatcagagagtagaaacaaaaaagaaaaactcaacccagaacagagcaagtagaatacaaaactcacgaactcatgaaaaagtaaacatcagtaccttaccgagtcaccaccgacttgtgtcgctgctttttaagtcttcttcttcttcttcgaacttattcttcactgttttttttttatataagattttatcggcaaaattgaaagaaccctaaacgacgattgttaaaaaaaaaggacaaaactttcgattacaaaaagttagtgttgcgagttcaaaactatgggagacgaaattgaatcaaaaccatgaggaatatctggaaatcaagcaagttagttatcgtcattatcagataagtaatactaattcgttcattctaaaattctttatttttccagagacgatttgatatcttcttcgtgactcgttcgatacacacttaaatactttcaatttttttattttagttttttttcgaaaattattatatatatattttttaattttgttagtgggtcccataaactaggtccttcgtaggtaagggaagtttggaatatatagtttcagtttatttatttatgtgaccgaatgttataaattttttactctttggcttctgcaattaaaattagctaaatgttttttttgaggaaagatttgttgcaactgaacaaaagaaattgatgcaaattatttattttgtttattggatatgcatcataagatgtgataatataaaaaaatatgatttttctgatatacaactttttttttttagttataaaaatgtagatacgcaatgaaaaaaaaaaattaataagaaaaaaatcataagtctaagatatgagataacagcaaatcatgaaaagatgactatgtaaagcaaaaacggataaagttttattaaaaaaaaaaaaaaaaaaaaaaaaaaaaaaaaaagactgattaaaatttgattaaaagttagatttatcaatttttaaaattatctattcaattgtgtatgtaaaatgttaatctttgtaaattttaaattaaatcatcctaaaatctttgataattttctctatatttgcttttgtttaactttgggaaaactgtttattttcttcttgaactaagttgttttatcccatacatacccataatttttttctgtgcttaaaccctcatgaacttcaatataatttgaatttacaacacaaatttttaaaacagatttcattagtttttaacagacatgatgacgtgagaacttcacacacattgaataagtacgacatgcaaactaaaaaacagatactttaaacaatttttgtaacattaatatctgcgtctattacattttcatatgtgcttgtgttggatcgatcatataaaaatgagccacaaataggttttagttgggccaaaaataagcccaattgaattgggcgctaatatgaatttgaatttgagcccatatacaatttcaaacgaaattttgtatgtttgctaattggtagtctttggctctataacgcacttcttcgaaaccagaacacaataatagatgttagagttggatgattaatcttaatagaaagatcactttaaaacataatcctccattgagccaaagtgatgtttcaaacataaaatatttttcaaacacatcaacactaaggatccaaataatagatgttgtacacatgtttctctttccatccattaaaaacaaaatatcaactctaaggctatactatactatcgattttatgaagcaagaaaaatctttctaaacatattatatgctgcatgtatttgtttcaccctttgggaatgtattctaaattaaggatgtttaaaactatgactattaatttcgacgtggaaactagtatcatattgaactttcttgtaaataaattctttttttttggtaatgggtaaatcactacgagatttcaatatttaaattcaataacttatcattagactacctgacatgcaaaatatttcccatgatgcaccaagtactagagagataaatgatgaatcctatatatctcataagtttctcatcaattgctcattaaattaattaaaagaggcaaaaaagaattaaaaaatgatagaaaagtagggttaaaaagcaaaatatcccacttgtgatttttcatttttggcggtggtctaatccatgtccacaaccacaaattcaaccatatctctccaagtctctatctagaattaaatcaacatataaatacacaaattataaagctatttatacactaaagcccctttctaatttaaaagttatgaatatttactcaaaatttgatgtgttactgttaagtaagaggaatatatataatggtatgtagtatatgcttaattatcaatgttaaagtttttttgtaacatcttaacaagcactgcaagtaaattagtgagccgaggacgaccctcagggctcaggctgctggagaattgggtttcggtttttataactacataaaagaaagaataaaaaaaacatgaaacgaaaacagttgattaaaagctagtaaacacgtacgggaccattaaggtttgggaagatcatgtccaccaaaaagacaaaacttaaaatccagacgataacgtttgtggagtagacgatattgagcagattacatctgtttcgttttctccttcttcttttttcctttttctctttaatctgttttgtttcctcctttttatattgttgcttttttagcaaaaaatatgaattaaaaactatataatacaaagctcacatatatgcaggcagacaagtttctggtttagatcttgagatatcattccaatatcagtaaagaagattttgcgtatattaccagtaaagagtaaagagactaatatcatcagatcaacattgacctatctatctttttactgtcactattagtaaccgttattctaaagtacatttgtatattatatagtaaattatgtgactttggttgcaatcatttccaaaaattaggtaatttactgaaaggaaaagaaataaacgttttcagatatattttgatttttctcttaaaaaacagtgagaattatgaatgaagcgacacgacacatgtgagaaaagctcaataatacatgagaattatagagcaacaaaacacaacactgctttacaactatcaaatactagtgtcgccaaaccatcataatagagatacaactcaacaaatgtcctcttgattataatcagaattatatattattatatgatacaatacctatcaagttttgtttttggttgtaatcaaattatttctaggacgaaatgattgtccctacaaagcaattggtaaggatatggtaagaggcacaatctctctttatacacaaaggaaggactcatgggattggataagctctttctgggtccctaattcctcatttcattttcagagaaagaagtttccaaaaccaacatttagtgatctctatatattatattcctattccccactaagtatcatcaaagctatatataaacaccactttgaatcacccaaggcaataaaccaaaccaaaacttcctaagaaaaaaaaacagagagattttttttctctttctaaagcttttttatagagtaaagatgttttcagagcacttaccttcttcttcatctcaagttttccaagaacacttcatcgacagtttcgtctccagaaaattgcttcagcagatcccatttgcccacaacgctcaacaagctcatgtacctgataagaacaacttgagcggcaatgttctcatgctgctctctatccttttgtgcggtatcatctgctccctcgggttgcattacataatacgttgtgcatttatacgttctcgaagtttcatgatctctgatcccatctctatcccatccacaccaagagattcatcagtaaacaaagggatcaagaagaaagctctcaagatgttaccagttgtgaattactcacctgaaattaacctgccaggggtcggtgaagagtgtgtcatctgcttgtctgattttgttgctggagaacagctacgtgtacttcccaagtgcaaccatggattccaccttcgctgcatcgacaaatggcttacgcaacatatgacttgtccgaaatgcagacactgtctggttgatacatgccaaaaagtcttaagtgactgcgatgcagctgatcaagtggcagcgacagcaacggagagcatagatatcagaatttctcctctagaacctgaagcaagagtagccacttttagagaaagcagctagagtatgccaacaaaacaatcataatttcaaattttggctctccagcaagattatagtttctttatgtcactagccataggatgtcaaaatcaaacacagcagagttttttttttgccttttgtttttctcaaagagtacagaacatataccttaagctttctgtggcatcatacgttcatcagaattatctgaatctctacttctttgcaatactcacagccaagactgacaatcgaaattgtcatctgccaagaagcttttcagaaatttcctctgcatattcaaatcacaatcacagagtagaactagtaactaaggtctggaaagaaatggtttcaatgaagctttgggcaccaagaccaaggtgcatgaagaagcagtactaagactacagaatgtgatctcagtctgacctaatcggttacatatctattcactcactcaccaacttggtagactaacaccatcaatagccccatttgacccacagtgagttatttggttaagaataaataagggattcttcgtcgcaatgataaagaaatgaactcagtgtgtttggaaagagtaatggacccaacacataacaaggtcaaactaatccacctaagtatgtgggtagaagtcaaacctaaaagctactttgaggaatgcttatagtattttaagatatcaggcaacaccaacatggtataagatcataatggaaagctccactttaacaatcaatcatttttctataacaagaaggagctgctaaagtgataacacatgtccattggcagatgtacctatgctaacacatctctattggcaataatctgcaattaccacactcaaaatccaaatagtagtcatttaaaaccaagataagagaacaaaacatttccatccaatctaaagaacatggctagattgccaagatctatataattcaatgaagtctagaatttacctcaactgagagaagttgaagcctatcgacttgatacatagcttgatatgtatccccatctttaacaatttctctgaatatcaaactccccatcctgaaactgaagcaaatccgagtcatgctaaaataaagttggaatccacaatcctgagtaaactactgataactgatttaactatgagcagaatgctgagattatttttcaatgtcactgtgagatcttggaaatctgaattttaaaatggaacaagatttcataaacaaaaagagctccagatagatcttaaagatcctagtcacttgtgattggagtgaaatagataaagtgcaagaaaaaaatatattttacactgcccgagtaagaagtgagagcttaatagcaaatgaggctttgcatagaaaagaagtgtcattggttaacaacataagaatgtgatttacaggtaacataggtccactatgcagctgagagatatgaaatgatatagaatcttactgttgtactagatcatagtccgagataattgcaacgaattggtaggtgcaattttcctgtggggagaagaaagatctattattagcataaaggaaaatccaacggtagttgtgaaggagaaggattaaaatagtatgatagagcgttaggcaaagccttcttgttggaccaaaaacttaaatcaataagaagacacatagttcaactttttcgagtataatggatagtagaggttcagtaattcagaaccatgcaactgaaaaatcgaaaaagtctgtcggcataccattgtagaggaaaatagctggacacaaaaagtctgtcggcattaccaattcatccaagccaaaattgaagttctctgcataatcatgaaaaaacattagtaggaaaagattgaaagaagttaccaaatgacaatcagtgagaaatgcaagtgaatggcaataattctgtcccaccaaggacaagtcagacactgaacatcaataatgaacctagacaaataattaaaaagtacaaaagctctgtattagaaattgcaaattctagcacaagaaaagatttaattagtgtgctcctgaaattattgtcatggctcttcaaacacattgaatgcggccaaaccaaatcaaaatcaaatgcatccggaaaaagtgttccaaatacaacttatctcgactcattcagagagatacagtattgatacaacttaattattgcttatcatattcctttactttaataatcacaaggtaggaagagcaccaaagcaagaatgtcaaccaaagaacgcacgagtatcacatggtattccaagcaacataaaagcaataaaggcaaagtttatcactttcaggcagggataaaaaaacagaccactatatgttcttaccagctatatggaacctagtggcatgaacaaaaggaaagacaaatcattttcagattggcttaaagcttttctgtaattttcagagagagactagtgaggaaggatagatcttccctgcttcgcaacatcaactttttccccaaaatacaaaaaaatctatgccaaaagaatgcttagataaactattatcatcgaaaaatcttgctttagttacgtgccacagtaagaacgtttgaatctagattcatgtagtttgcgctggcaatttgcagtagaagacaatatatcataaagtaagcaaaaggaaactatatagatcatctgctttagctatgatttaaatcatatgtacgagactggcttagataaaggagcagagctggacactaatttagagtgatctttatcgataaaagtagcctttaacaggaatcatggaaggggctttttgccttctggctgctaacaaactttggtttactacggacgagactggcttcctgttttccaaacaaaagtccatgaacgtttcgctattcaccacaaaaacaccaaaaattgaaacaacaaagaaagagagaggcaagtgacatgaaccaagacccaagtaatgtactatctgaatgctattccaaagatggaaagttcatggcggctctagctaaagctcatgggtccctgtgagcaattctaggtgatttgatttgcaaaagccactgccacatgtcactaccatagcagaaaatggtacgatgggcccattttccatatgaaaccacactaagattatacaaattcagtggagaatccatataagatgcagactattaaataaaacaaaacactaaaggaccttgctaattttgctagcatccaccaaccataattcagaaaattcaattaaaacattttctcactaaatgtaagaaagtatatggaaacctttacctttccactatatatagaacctgcaacagaaacacagaagatctatcaatctaactcttcaaactaggttatcatgtcgaccgcaacttctgctcccactaccaaaccaactgagctcttccaagatattcggggagatttttactcaagaagactgctacttcatacagcttatcaaccacctactgcggcatcaccgccgtttgcagatgctcatgaagcatcacactcctaccaaagtcatatgagctttgatgcaaatgttgtcatggtcctatcagtcctcttatgtgcactagtttgctcacttggactgcattctatcataagatgtgcactaaggtactccaatttattatcatccgaagctagtgacgagttctcagttcgcttggccaacacaggggtcaaacaaaaagccttgaagagtttccagacggtaagctacacagcagaactgaagctacctggcctagatacagagtgtgccatatgtctctcggagtttgcatcgggagagcgagtcaagcttctgccgaagtgccaccatggattccatgtccggtgtatagacaaatggctcagttcacactcatcttgtcccacctgcaggcactgcctcattcagacttgcaaaaagatagctgggtacagtgagacggaatcatcacctaatcaaccacaacagaacgtgcatatatcaccgctaggaccggaatcattgatacgcggttttagctaaacacagtcaactaggcttaggtgcagttatcttttataacctgatatacatgtactgccacacctttagaaatagtcaagatcccaaagtatctgaagttcaatattcaaaaacaacgtaatcgtttccactgtaaagttttaaacattatgaaatgttgttttcttcactcttttacgccagaaagtgtacattccacaaaacgacactccaatagaagatcttagactctcacgtcagtgaatgaaatgataaacaactaaaaatccaaagataaggaagctgagaaggcaaaacactcaaaaccaaccaacttggtcaactaagagaattccttaaattcccaggttattaaaacatggctatgccactagtgtcttgtttactagtagtgattatcatacagattaatgcaaagctatgtacaataaataaattagcactccacaatagaagaccgttcttgattttctctaccgacctatattgagtaggctgtgatgataaacacacaacataaaaaacgtgacaaactaagacacaaagaattcacaagaccccacaagagaaaaaaaaggctttgatataattcatccaccgaaaatgaagtttataggttacacctagaacaaatggcataaagtaaaatggaatctgagcatgaaaccacccctatagtcaaatcagatgattaacaaacaaacatagaaaaatgggtggtttaaaatatagtgctaatcatcatagaaagtaaaaaatggtacgataaattaagaaccagtgttggtgctgtcaaatatcaacatctattctaccaaattgaggttgcagattctgtaccattaagagaccaaaaaccaatcatttcacactgaaagagagagcagtaaatgtactagaactgcccttaaatagacaacctttggaatatttcgagagacggaactaatcagtacagtgtaagaagaaaggctaaactaaaaaatactgcatcagaccaaagtcccatggtttccaaatgaattctacatgttcaaaacccctagatgtgtcaacaaacacaaaaatcattctagaatcgagaaactaaacgagaaagacaagcaggatcaatgtggttaaattaatgttccaagtttcgacttaatcaactaagcccagtgaaaattaggtgaaattgatttgagaaatttatacgagaatcaaacgaaactgcatgaattagagttttagtagagcgcaattgggaatttgaaatataaatactacctcaaatcttgatatagaagatctaattgctcagctctgaagatcacctcttcttccttggcgccaacaattttcagtactctaaagcgactggaccagtaggtgttccgggtcacctcgctttgggcctattaaaaagcccattatggtctggactgtcttttttttttggcaaagggtctggactgtcatgtttatattttccacatcaaatcaagtcaaattttcccaaataaaaagagcataatcatttgttttgtggacttaccatttgtttcataaatcccgaaattgatttatacacaatcctaaccagttagaaccagttagctgccggtgtgcaactatgaagtccattcctgatcgatatttatatggttataggcttatagcctaagcttattcacctaaaaacaaatcaatggttagctctatagtcaagttttttattcatgtaataattgactaactttaataattcagttatgtcatccattatgtaaaagtgcatcaatcctcaaaatagaaaagttatatcggttattattttaattttcaatatataagatagttaaattttgtgttaaaaatagaatagaaaatggaaatttagtagagtgatattccatattactttattgaacggatgtcagtattgtttgtgctactgctatatatcgtctctaaagtttgtacggatcgaccagtattaatgtactatgtagtctagtatttgtgttagagttgttactgtatcaactatcaagtatcatcgctcatattcaaattcgtataatacatgttgatagaaaggaaaaaaaatatagatgattacttaatgtcacatgtatttcgaccaaatgttcttttatttataaacttaaacgttaaaagagttttcaaaacacattctacctacaatttttcttctttcacgttgttcttaactacagaagatttgatctctacattaaaaaatatatatataacgaaactctggaaacatcattgttcgattggtttctattgcaagttgcatgtagggtttaaaccgattttaatttatatggcacaaatccattattccaaaaaagaaatagaactttatgggtggattgtggtgtaccactactagtaaagttgagaggaaaaaagctagatctctgggatcaagcaaactattaattacataccaaatcaagaaaactaaccttaattgacttttctccaacaaaagatatgaacgtggcctgccatttatatgaaaactttataatataaaaaacatgaacgtggtctggcctgctttgcataaaccaacccatataataaatagtgagaaaattaaatgtaatgataatagtagcaatgtataaatcaagaagtagtttcgtaatgatggacacaacgttttcgtaggtgccagcttcatcaccttcccacattctctctctttctcacctggtacgatcgtaaccggcacgtgcgattcacgtggctcgcaaaaaagttgactttttagctttgatttaatctcaacaaacattaaaaagtttatgatgatgaatgattagtttgctttttcttttgtataacatgagaggttacatgttattgctcatatctttcacttacatagcgcatcgcacgatgatgatttgatctgatatacggtctgatggtcatatgttcagtttttaagctaactagatgagttcaaatacataaaatcataatatatgcgtatagttaaatatatttcaccatagaatagctagctaactaatacatggatcgatgccaaaagtcccaaaactatataagtgacgaggacaccaacaaactattcgtcacgtcgacaaaatttagaacgaacttaattatgatctcaaatacattgatacatatctcatctagatctaggttatcattatgtaagaaagttttgacgaatatggcacgacaaaatggctagactcgatgtaattggtatctcaactcaacattatacttataccaaacattagttagacaaaatttaaacaactattttttatgtatgcaagagtcagcatatgtataattgattcagaatcgttttgacgagttcggatgtagtagtagccattatttaatgtacatactaatcgtgaatagtgaatatgatgaaacattgtatcttattgtataaatatccataaacacatcatgaaagacactttctttcacggtctgaattaattatgatacaattctaatagaaaacgaattaaattacgttgaattgtatgaaatctaattgaacaagccaaccacgacgacgactaacgttgcctggattgactcggtttaagttaaccactaaaaaaacggagctgtcatgtaacacgcggatcgagcaggtcacagtcatgaagccatcaaagcaaaagaactaatccaagggctgagatgattaattagtttaaaaattagttaacacgagggaaaaggctgtctgacagccaggtcacgttatctttacctgtggtcgaaatgattcgtgtctgtcgattttaattatttttttgaaaggccgaaaataaagttgtaagagataaacccgcctatataaattcatatattttcctctccgctttgaattgtctcgttgtcctcctcactttcatcagccgttttgaatctccggcgacttgacagagaagaacaaggaagaagactaagagagaaagtaagagataatccaggagattcattctccgttttgaatcttcctcaatctcatcttcttccgctctttctttccaaggtaataggaactttctggatctactttatttgctggatctcgatcttgttttctcaatttccttgagatctggaattcgtttaatttggatctgtgaacctccactaaatcttttggttttactagaatcgatctaagttgaccgatcagttagctcgattatagctaccagaatttggcttgaccttgatggagagatccatgttcatgttacctgggaaatgatttgtatatgtgaattgaaatctgaactgttgaagttagattgaatctgaacactgtcaatgttagattgaatctgaacactgtttaaggttagatgaagtttgtgtatagattcttcgaaactttaggatttgtagtgtcgtacgttgaacagaaagctatttctgattcaatcagggtttatttgactgtattgaactctttttgtgtgtttgcagctcataaaaaatggctgaggctgatgatattcaaccaatcgtgtgtgacaatggtaccggtatggtgaaggctggatttgcaggagatgatgctcccagggctgtttttcccagtgttgttggtaggccaagacatcatggtgtcatggttgggatgaaccagaaggatgcatatgttggtgatgaagcacaatccaagagaggtattcttaccttgaagtatcctattgagcatggtgttgttagcaactgggatgatatggaaaagatctggcatcacactttctacaatgagcttcgtattgctcctgaagagcaccctgttcttcttaccgaggctcctcttaacccaaaggccaacagagagaagatgactcaaatcatgtttgagacctttaactctcccgctatgtatgtcgccatccaagctgttctctccttgtacgccagtggtcgtacaaccggttagtacattttaggctttttgtttatactcattgatcattatttgaactgagctctgattatcttccattgaacaggtattgtgctggattctggtgatggtgtgtctcacactgtgccaatctacgagggtttctctcttcctcatgccatcctccgtcttgaccttgctggacgtgaccttactgattacctcatgaagatccttacagagagaggttacatgttcaccacaacagcagagcgggaaattgtaagagacatcaaggagaagctctcctttgttgctgttgactacgagcaggagatggaaacctcaaagaccagctcttccatcgagaagaactatgaattacccgatgggcaagtcatcacgattggtgctgagagattcagatgcccagaagtcttgttccagccctcgtttgtgggaatggaagctgctggaatccacgagacaacctataactcaatcatgaagtgtgatgtggatatcaggaaggatctgtacggtaacattgtgctcagtggtggaaccactatgttctcaggtatcgctgaccgtatgagcaaagaaatcacagcacttgcaccaagcagcatgaagattaaggtcgttgcaccacctgaaaggaagtacagtgtctggatcggtggttccattcttgcttccctcagcacattccagcaggtaaaaattgatcagattttgtttcgaattctcttacatgcaaattgaaatcaaaggctgattatttatgtatatgttggttacagatgtggatctccaaggccgagtatgatgaggcaggtccaggaatcgttcacagaaaatgtttctaagctctcaagatcaaaggcttaaaaagctggggttttatgaatgggatcaaagtttctttttttcttttatatttgcttctccatttgtttgtttcatttccctttttgttttcgtttctatgatgcacttgtgtgtgacaaactctctgggtttttacttacgtctgcgtttcaaaaaaaaaaaccgctttcgttttgcgttttagtcccattgttttgtagctctgagtgatcgaattgatgcctctttattccttttgttccctataatttctttcaaaactcagaagaaaaaccttgaaactctttgcaatgttaatataagtattgtataagatttttattgatttggttattagtcttacttttgctacctccatcttcacttggaactgatattctgaatagttaaagcgttacatgtcttccattcacaaatgaacttaaactagcacaaagtcagatattttaagatcgcaccattttatataaccccaatcgtcaattctactgtttcaagttttacaccaaaacaattacgaggtgtatctattcgttactcttttcgcttattaatccttttacatgatgcaaaatataacaaattaatttcaaattgtcctgcacatttggtttatacatcttgattccaaaaagtcaactcgttgaagaattaatcaatactcgaaacgagtcttccttgggccctaaaatattgtcctatctagttgatgcttatatagcatatatgggctaataaattgggccttagctttggaaaaggacgtagaacttgaaacaatttttatttttctttttccggcgaaacaattatctaattaccaatttaaccccaatcctttctcagtttctctcttccgcgtctctccttctcgttatcctgcaaattagggtttaagtaagaaaaaaaagctagagaagtatctcgatctcttcttctgttagattctgctttcctttgagatttgctagtgtaatcgtaacctccgaagacccaagatggctcgtaatgaagagaaagcacagtcgatgctcaacagattcatcacccagaaagaatctgagaagaagaagccaaaagagcgtcgaccttacctcgcatcagaatgtagagatctagctgaagcagacaaatggagacagcaaattttgagagagatcggtagcaaagtagctgagattcagaacgaaggattaggagagcacagacttcgagatctaaacgatgagattaacaagcttctcagggagagatatcattgggagcggcgaatcgttgagctaggtggtcacaattactcgaaacattcggcgaagatgacggatctagaaggtaacataatcgatgtacctaaccctagtggtcgtggtcctggttatcgttacttcggagctgctaagaaacttcctggtgttagagagctttttgagaagcctcctgagctgaggaagcgtaaaactaggtatgatatatataaaaggattgatgctagctattatgggtatagagatgatgaagatggtattttggagaagttggagaggaaatctgaaggagggatgaggaaaagatcggtggaggagtggcggagattagatgaggttaggaaggaagctaggaaaggtgctagtgaggttgtgagtgttggagctgcagctgctgcggcgagggaagtgttgtttgaggaggaggaggatgttgttgaggaggagaggatggagagggagaaagaggaggagaaagagagggaatttgtggttcatgttccgttgcctgatgagaaggagattgagaagatggtgttggagaagaagaagatggatctgcttagtaagtatgctagtgaagatttggttgagcagcagactgaggctaaatccatgctcaatattcatagatagaaaggtgatcatctcttcttgtaaggctttttaatcatatcatagtataattttattgtctgtagtttcttttgcagtttttgatcagaaaattgactgaactgctgtgtgttttaagaaatttcgattagaggaattctaaaaatttgttgatgtttcttatattattacatcctagattatgatcttagagaatttgctagatcttgatttatatttccttagtagtcctggtctgtttgagagtatgataaggcttctgtcgagtaatgtcataaagcgcgatcaatctataacaacaacgtacattcttgcttcattaatcaagagtttcactgacctgagtaattgacctagtacccttgtatgtggagcttagatttgcagaaactgttatttcaatgggacatactttagttagtgccttagtggcatgcattaggatgcgaaggaattcgtattatatcttctcttgaattgaatctgagaggctgatacatcatctctatgcttctcagatgctctgttttaccaacaaactcagccgcgatggtctcttgcctaaagaagaaacgatgttgggcgtttgaaatatgatttcatggaaacaaatgtgaaagactcaaggagaagatacaatgtcacttggaactgaactagtgtattctattatgtagctcgacttttgtatctttatacttctgaatgtaatgctcattgcctgaggtttatacattgttcctttggctctaactagattggtgctatgcagagacataagttgagaccaaccacaagcatttttctggttttgattttactcccagtaaaatatttattgagtacggacaaaacatcaaaaatcagaacaagaccgttgagatggataatacttgtctagagatacgaaccacacccacatgttcctacacacaatccccaaaccatctctctaaccaataacactttttctctcttctcagtccttcaatggcggactacgacgacgaaattgaccagaataaccaacctttcatccccaaagaaactgctctacaagcactaaactcaataatccagctccacttcgagaaaaccttagagaagaaacgagccattgaccaccagaagaagaagctccacaagctatttcagctcttcttcatcttcctcgccgtaatcttcttctccctctctcaaccctcaggtcgtcttcactgccgccattgctgggcacccatctgcctcctatccttctctcacctcttcttctacgtctccgtcgctcaaactctccgttgcatcaacggcttcaagtaccagcgtcgctgccataagctcactctcggtctcgccactcacaagctccgtttcatcaagtcaagaatcgctgccggagatttcctcggtggaggcgacggtgatgaggcctctgctgctgcttgggatctggaagttccgtatcaagaaccacctgatagctactttggcaagtttaagagaaattgggctctctattttgggttcttgatccttctttacactttcatgatctctttctctgtcgttatcctctgtttctgagatctctagagtggcattttcgtaaattttgcaaaacccatctgtttcttattattcattagtcctcagctttagaatgatcaagaagattgaaataaaacaaagttagaatctttgacatttgattcaatctggttactgaagccctagtcaattacttgattgagagatgggattaagacagacaattagcattaataaatcaattaatcacaatcaaaagttttgaattttttttcacagacacaaacacaaatccaacggtgacaaaaagaataaaagagttgaaaaaaaaaattcataggggaaacaaaacacaaaaacacagcaaggaagattgttttgaaactaacaagctaaatcaatggtctcggctaggagtggttttgttgttgttagctcctcctctacgaatctcctcgctgctcgaggaagacgggtcaagcccgtattcgctcgtgttcccgtactcgctgcttgcaccgtactcatgactatccaatgccactttcctgaacttcttcatatccgcactgtaagtgcttgagtcatagtccgagcttgaacccctcccgaggaatgagctttgtcccgctttccctccttcgcttagatcgtctagcgttgcatctccctccagagcccgaacaatctgttttaacattggaccatagtgatcattctcttggtgtaaagtatatgtttaaaagagtggtcatgttcaaaagtaaaacttgcctggctcatcttaggcctgcgtctagctgagtgcctgacggctgcagcggcacaagcaaccatttgtgccatctcatgaggctcgtattggttttcgagacgtggatcaactagttcactgtaatctccatcctgagctgcgtttaagcatatgggtcttgcctgtgtaaaaaaagtaaccaagtttgcattagatcacaagattctaacagaggaaccattaatgtgatgaatatatttaaccatatgattacggacccaatcgaccaaactgtcttccatttcaccagtgagatcaacaggtctgcgtccggtaactagctcaagaagcatcactccaaaggagaaaacatctgatcggtctgtcagtttcccgcttgacgcatactctggagccaagtacctgtcgtttgattcacaatttgagattctttagagaaacagattttcggatgagattataaaacaagaatgtttttgatatagaagtaagagctaatgaaatttgcaggaacatttttcatcagctggtttcgcagtctttagtacccgaaagttcccatgatacgagtggagacatgcgtaacattgtcttgagatagcttcgctaacccgaagtctgcaacctgtagatttgagccagtccagttagagaaaaaataataccaacgaatctgaaaacattatgagtttaaaaattataagaacgtaccttagcctcaaaggattcatcaagaagaatgtttgaagctttaatgtctctatgaatgattctcggatgacctaagtcaacaaagtcaagaaaacaaattttgatcacaacctaatcaaaccactcaaaaagattgaattaataatttagatttttgttttgactcacagtcttcatgtaagtaagcaagtcctttagctgatcccaaagcaatcttgagtcttgtaggccagtcaagaaccttgccacttttaccatggagatggaactcaagtgtgtcattaggtaagaactcataaaccaacatcctctgtcctcctgcaatacaatatccaacaagagacacaagaaaccgatgatgaactcggctaatgatgtcaacctcagcctgaaactcgcgctctccttgcccgcttcccgctttcagactcttcaccgcaatctctttcccattgggaagtattcccttgtgaacatatccgaacccgccttgacctaacaatcttgattgggagaagccttgagttgcagcggctagctcgtcgtaggtgaatgtgctcttgttgaaacctagagccactgaagggtgaggtggtggtaccgacggaccatgtggtcctgagtagtttgagctaaagtcgctactgtttccattcataccgcctgagactggcggtggtggtggaggcggcgatggttgccagcttcctggtggtggtggaggcggtgaattcatccagttattattcccgttggatccaggatactgctgagacagattcattacgtgatcgctctggttattgtattgctgctgttggtattgatcacctaagataaaacagagaattgttttcaccttgtatcttggataacaagaaaatgaaagaaaatcatgataatgtttcttgggtaacaatattttggaatattatgaaactcaaaaactgtcatggtttttcaatcatatctcaaatggattgtggaatgtgattagaagtaaggttcttaagaaaatgctagtttattgattagcttggtgcacaagaaaatgttctaaagtagaaactaggttaggcaacggctaggtttgatgggttttgtatttacctttgccggtggcgtagccgtttcctgcataatagggcatttgatgcttcttttttttcttacgacagcaacagacgcagaacaatatcataacaagaaacaacaatccagcaccagccacaattcctacgatagcagccgtgtttggttcattgttgccggaggagttggaaccaccaccgcttgatctaggaggagccagcgctcttggtggggaaggagagttacggtcagagtttctggaaggaggcggaggtgaacgattgttgcttcctccgccattgttttggttgttgttgtcattgttattcccattgttgttattgccattgttgtcatttccattgttgttattaccattgttgttattgccattgttgttgttgtctttgttattcccattgttgttgtcgttgttgttattaccattgttgttgttgttgttgtcattgttgttattaccattgttgccatcattgttattgtttccttgcggagatggtggtgattgtgagtctgaagaaggcggttgaggtgaaccatttgaggaatcatcgggcggaggaggagctggtggtgaaggagaggaggaatcagaaggcggaggagaggattgttgttgattgtcggatgatgacggagatggtggtgtaggggacggcggtgaattctccggggattgcccctccgccataatctctctttcggtgttttctttttgtatatgattttatttgtaaagctctctcctttttttgttttttacgagaaagagatagagagagagatgaacagagagaaaacacaaaaacctctttgtgtgtgttcaaatcctatttttaaaagagatgctttcaaatctttgttgttgctgttgtttctgtattggtattgtcttctttttgtagggtctatatttgggtattaatacagccatgcaaattatgtaccttcaactaaatttgtaaaacaagaaaaagaaaaattacagtctagaatttgattacttggttttaccaaaataaaaataaaaataagcatgctctcgttgagagttgaactcaagacctcccgcttactaaacgggtgctctaaccaactgagctacgagagctgcttgctgatcaaaaccaatgtacatataagtttggtaaagtatagtttaattattagaggaatgattcacttttagtaagaagacaaaataatagtcacaaaagaaattagaagacagatcaggaacagctagaagactcttcagggcacagagaaaacacccaccacatcaccgtcttcttcaacaaaatttaccaccagagatcgcagatatttcttcattctatctctctcttttagatccgattcgatgccgtcccgtagacgtaccctcctcaaggtcatcatcctcggtgatagcgggttaggtttctcttaacatactattttttcttatgtgattttgagtttttgggtggtttcgttttccgggtttatgagatttatctcggattttgtttaaatcgttttcttttgaagtttaaatttgatatcatttgttaatcttttagatgacttttgttgaattttgttgtctttgttttggtttgtaaacactcaaaattgatctgcttttaattaaaggtttcatggtggtgttgtttgttgttgttgatccaagtatcagatattttcttctgtaaaaaattcaaaattgaagaattgagatgacatcatagtctcatcaaacattgacgcttgtaacttgagttcactataccacgatttatttgtctgtagattgtttagagttaatttgatgtttaatgattacttgttgtttctccaaacttgcttatgatctgatgtttggtttcttattaacattttgcatgttcttgtctgcatctgatttgtgggtactgagtttgtgcttgacattcaagatcatgttggttttgttatgcattcgttttgactctttttttttttttgtttctctctgttgttacgtcctgaagcagaaaatgtttgtgttatgtcatgactacatgaaattggtgtctttacttgagtgaaactaattttgacttctctgacttgtggttttgtagggtgggaaaaacctctttgatgaatcagtatgttaataaaaagttcagcaaccagtacaaggcaaccattggagccgacttcttgaccaaggaagtacagtttgaagatcgacttttcactttacaggttcctactagtgctttattagttagtcactcaatattttttttgaagtaagatgcttgtgctcagctcaacctttcacatttgtgtgaattacctttcttgcttgagctcactcacttgttcctgtctttactttgtcaatgtgtttattacagatctgggatacagctggacaggaaaggtttcagagccttggtgtagccttttaccgtggtgctgattgctgtgttcttgtatatgatgtcaattccatgaaatcatttgaaaatctgaacaactggagggaagaatttctgatccaggtaacatattcatgccttttctcacctctgtagacagaagaattccacaataagcaactacataaacactgagtgtaatatctcttgcaggcgagtccatcagatccagagaattttccatttgttcttatcggaaacaaggttgacgtggatgatggaaacagcagagtggtatgtgcttgcttaattttcccattgtttatcaatcttttgtgagatggatgtaacattaatgtctatatacaaacactcatttgaacacaggtttcagagaaaaaggctaaagcttggtgtgcttcaaaggggaacattccttactttgagacctctgccaaggtaggtactaatgtggaggaagctttccaatgcattgccaaggacgcattgaagagcggagaagaagaagaactgtaagtttcaaaaacaagtcttacttcatacattatttatattacgggtttgagtctcaatgttctcttacctttttctctttcaatagatacttgccagacacaatcgatgtagggacgagcaatcaacagaggtctacagggtgtgaatgctaaggagtatcaccagaaggaaacgaggcctctcctcccattatctcttttcgcaagttatgtctacattattactatgttgtaaattttttcttttgtgtggaaaagggatgagaacaaaaaaagaaggaaccctaaaaaaaaaagagatttgtttagtgttatttgtggggattttcatttatcatgctagctaaataaatactcactttcatcttaattttaagtgatgtttcttgtttgcaaagaaacactaatagctattatgataagttcaccaataagaaaagtagaaaatacaggacataccaatggtccaaagaagggaatttaatgaaaaaaaccctcaactttggctagatccatttttaaaccctaaactatgtttttagtaaaacaaatcctgaactaaaacctgttaataaacttaaccccacagtaattaaatattaatgggatattaatttccaaaaaaaaaaccaacgagacatttgtatttagcgcaaaaaccacatgatgttctttaaaactgttttgaatttattacaaaaaaacgttctaaatgattttgaattgcttaattagtttggattttagaagctgaaagaaagacacaacaacttaaaataatccaaagagtcatgcttaaataaatccaaccaacataactatcgaagctgttgcaacacaacaatatttgtcacaaaaaaaaacaatcgtttcagagggacaagatattctaaagtaaagacttgtcaagcattaactttgaagagaagattgtatttgctgagtgatagggttctcttcatccattgttttctgttttttccttggtcgtccttgaggtttcttgggtggttttggcactgctttacgcttgcatgaacgtttgttgtgtccgacttgttgacagttgctgcaagtctaaatatgcaaagattaaattaaataatttgaaaaggaagatcttgtgaaacataattcattgttctctattttaccattttaactttttcacgtgtataaggaactttttgaggtggacgatcttcagttggatcacggattctgtcattgttctttggtcgatttttggaaattaatatcccattaatatttaattactgtggggttaagtttattaacaggttttagttcagggtttgttttactaaaaacatagttcagggtttaaaaatggatctggccaaagttgagggtttttttcattaaattccctcaaaagaactacataaaaagggagcatccaaattgggcaactcaaaattcaaatatcaactttaagaaatgaattattgggaaaactgaaaatttgagttgattttatctaagatcttacataatgttcattctatttttttgtccttatatttgtttttagggtttattgaacaaattaaaaaatactgcaaaatatagaaaagaagctcgacttcaattggttttttatcaatgtaaggaaactcagaaagttgaaaataaaaatatggaaatcaaattacaaaaataccttaatacagtaaactctagtcatcgtgtttcattaaactaaacactcctctccaagttaaccaatggagatcaaagtaaaaaatattttaatttactcgtatatattttattttattattgttaaccaagtttaaattactcgtagaattggaaagggtacatacaaatttcccgcaaagttaggaaaaaatatgtccttccccttccaacgaatctccttatatatctattttctaaacttatattggtctaattcaaaatttaaacatcaatttgaacagaaacactctcctctccaagttacaattacaaatatttttgaaaaaaaaacaaagcgagataaaagtaaaatatatatgaacttattcgcataactgaaaagaggaatacaaatctcccggaaatttcgaaagaatatttgctttcccttcgagctgatcttgttttataaaccctagctaataaactctcagctaatataaaaccaatggccgtggcccgtaaaaaaacacagaaaacattgaaactaccgagaaatagtcgtcatcttcttcttttgtcttcaattttcttcgctcttcttaatgaggtttaggctaatcttcattttgtatccgatggctaaatgtaatatatgtaatctgaatcacattacgaaacagccgttgtcgatggatatatatatcaaatctgttgaataagcattgtcggcacttgagaatgtaaagtgatgatcagctatcgtatttcatgtcgtaatagtagtcacgttagggtgatataacgaggcgagagttatatcatcatagtgcgatttctattatgacataaaatacgttttggattttaaaacacttgaccttcttaagtgctgataatgcttctttcttatgttttgaaatttgattaacttaagcttcatatatctagtttttcggctggtgaaggggttttgttttttcagaattccccaatgtggagagtgatgactcatcagtttcaagcgaaaattactcaaactgtgttaattcctttgaaaaataatatttctagtagttattcgtgtgcttcgttggatctttttacatgttcgtattgtcaaaaacttgggagaatataaaagtttgtcttcttattttaatacatgttgtgaaatattgtctacaaaactagtgagtgagtttgagacgtatcaaaactattgtctccaaaacatttggtttcgtgtgctttctcttatttgtgtttcattcaccaaaagtgtgtcgtgactagtgagttgatattcttttaggctctaccaattttgttcacagtacctttcatctcagtaattatattagttaaattattgcaactctcattacgaaaacagtcacacatactaaatttgttacgctaatttgttcgttttatcattaaacccacataccatacaaattacatatctgatcaaatttcctacgaactttgtgtgtctccttccttccactgcttgtttgatccaatctcaacctcgggattcggtaccgtcttctcggggttacccttaggcttactcttggaatctctccacctgaaaccactgaaaagctcatccatatcctcaagcatcctcccttgcgtctccggcaagaaagtgtaaaagaaaacccaagccacagtcgcaatccctccaaacaagtaaaacgctccaccagtagtcatcgctttcgacattggaagaaacgatatcgagatcacaccactagtcactctgttcaccaccacacccatactcgagccctgtgatctcaacctcaacgggaatatctccgagctataaacccaagttatcggtccagctcctatcgaaaacgtagctacataagtcatcaccgtagctatagctacaaccacagcccacatcactttcttctctgactggtctataatcgttagagaagtccctaacgctgctagagatagtaccattcctcctacgctggttagaagcaatggtcttctcccgattctgtcgagtaagaaagtggcgactagtatgaatgatgtcttcactactcctactgctacagtcgctagaagctgttggtgatcggttttgagtccggcggttttgaaaattcgcggtgagaagagaaccaccgcgtcgataccggaagcttgctggaagaaatggattccgattgcggcgatcataacacgacgcacggctggtgttggtcggattaaaagctctctccaaactccttctccatgactgttcctcctcgacacctgaaattattgagaaattaggtcaaaatctggccggagaaatcgcgaattcgaattcaattggttgaaattaggtcaaaatgtggccggagaaatcacgaattcgaattcaattgatcaaaatctcgattcggatttcaattggtgaagtgtgtaacctgaacgacgtcgtcgtggcaatcggcgggaataccagcggcgtgtttgatgtcttcgagacggagagttgcttcggtgggggaatcagaggttttgtccagaacgcgcttggcatcaccgagacggccttgcataacgagccaccgtggagattccggcatagcgagaacgccgatagcgagtatcacggaaggtacggctccgattccgagcatcagtctccatcctaccttcaacggcaagttcgagaaagccagatttgatacgtacccgagcataattccggcgttgataaacacctgtacacgtcaccataatcactgccacgtcagatattactttcattcttttttttagtatgaataaaagtcaaaataaaccgccaaattgtttggtaatttttttcaatgataattaaattttatttcaaggttgataaaacaattataatctggtcaactttaacagtttagtaacactaaaaagcgtttaagtaaaaaaaaaatagtttacgattattatgttttatgtttataatgttttatcatattgtttaagtaaataattaacactatatgttttgaaatttttatgtaaactattattgttttttttacctcggggaaggaattgaggaagccgcgggaagatgccggagagacttcggcggtataaactggtgcgatcatgagagcatatccgacgccgataccggcgatgaaccttccgaacatgaggaaagcgtagttaggggacaatcccataaggatagctccggcgaagaatatggctccagccaacacgatagtgtaacgccgaccaatccagtcagaggttcttccggcggcgcaagatcctataagtgaatagatgttgaggcttccagcgagaatcccgatttgtaaatcattaatcttcaaatctctctttatataaatcattgctccactcatcactcctatatctgcaaaatatacacttaaattagaatcaataaagaatatgtgtgtgtgtatattattggtagagttttcattttttgcgttgaccggaaaagagttcaacgagaaaactataccataaccaaggaggatagaagtcatggaagctaagatagcacacgcgaatgcataattgttcctctttggtggtttagccggcagaactgactccggcacatgtttcaccggtggtggcgacggggccgttcggttttccggtgtggcacctgtcattatgatagagaatggggcgagagagagatagagagttgtgaggattaatgagtagactaacaacaacttgtggtaaggagctgtgtgtcttatatagaacagacgtgtgtgtattcagagtccaatgagacaagggcaaaatcgtccgagagtatgggaaaactgtcctaaaatatcggtatcattacatttgttttttgttcttggttaaagaacatttgcacgtttcgtttagagacaaaacaaaaacattttatcagtagaacaaacggcaactaatgatacataaatttcagtttaatatgtaattaactatgtattattgaattatactctaccaacaaaaaggacgaccacaaataataataataaattggagggcctaaaggtaattacgaaaggatacttgttgtccatgactccatgtgagcttgttgaatgttgactgttgttgtcgacttgatc

SEQ ID NO: 440 - DNA, 81875 bp, Arabidopsis thaliana
gatcaaatattttgaaaatgatgaaatcttattaaaaattgaaattgatatacgacctgtccagatacaatgaagttgttaggttacaacatcagcatgtttcaaaaagggtcaagcaggtacatccaatcaatttatataacgtaaatcctgattttcagagcaatattatttgtatcttttataacctccctagttaattagtaataaaatatttaatttagtagtatcacaagatggagctttaaaagttatctttaattcccacttttgaaaatgataacgtccataaatacatttcaaaacgtttttattctcccaataagatatcaaaaagacaatatcaacaacaaaaaagacaagaaaaaaagacaaaaaataatgatagataaaatacaaaagcaaaagaaaacgtatagtattgcttagagaaagaacaaacatattgtgaattaaaaagaaaaaaaaagagggacaaaagtagaaagacgtggcaaaaagcaaactaaatttcgaccaatccacatctaaaatctaaccttcttcatcagatggaaggaagctacttcaccacccgcagattctgccatgtggcttctctctcttctacagctcacttcttctctctctgtctctctctaactacattgaaaccaaaccagagtgcttcaatgtcattgctgtgattctctttaagtccagacataactcccatatcttcttcttctgtctttttttatttctttgaaccggagaagaagaagaagaaggagaaggatatatgggaggctgtacttccaaaccttcctcctccgtcaaacctaatccttacgcacccaaagacgcggttctccaaaatgacgattctacccctgctcatcccgggaaatcaccggttcgttcatctcccgccgtaaaggcctctccttttttccctttttacacgcctagtcccgcccggcaccgccgtaacaagagccgcgacggcggaggaggagagagtaagagcgttaccagcactcctctccgtcagctcgcgcgtgctttccaccctccgtcaccggcgagacatatacgggatgttctgcggcggaggaaggagaagaaggaggctgctctgccggcggcgaggcagcagaaggaggaggaggagagggaagaggtagggctggataaaagatttgggttttccaaggagttacagagtaggattgagctaggggaagagattgggagagggcattttgggtatacttgctctgctaagttcaagaaaggagagctcaaagatcaggaggttgctgttaaagtcatcccaaaatctaaggtcatttttacagctttactttttccaaattctcaagtttccatcttaagttttctgcttcaattggctcaagtgcttcatcattgtagtgatagctatatctgacaaattgaagattctttgtgtgtcttgtctgatttgtttagtagatgttaaactgtttcaaggtagaagaacaaaccatcatagtctccttttgcttcatgatgaacctgtaatttgatcattacggtctcttgagatgtttctgttcttctctacgagcttactgtcctcttgtttgagccatctttttgaaaaaattgatagcgtatgtagactttcacgcatagaaattaatacaaaaacaagtaatagcgaacacagatgaggttgaagtttgtcaatgacacttatgtttcatccatgtttttcaatagccaagttttcaatggttgtagattagcattgctgacttttctgtgaacatttctaaacgttttaaattggtcaataaattggaacatggacatttgtgcttttgtcaattgtcattaagcaattgaaattttgatggtccttatttgatgactaagaaagttaatcatgtaatcgagttagttggtgtaatatacagataggtttagtgttagcttaatccacaatagactgtttctcatcagctttggtttggcagatgacatctgcaatatctatagaggatgtgagaagagaagtgaaaatactgcgggcgttatctggacatcaaaatttggtacaattctatgatgcgttcgaggacaatgccaacgtttacatcgttatggagtaagacaatcatgtgcttatatattcctgtgtcatgttgaatctactaggagagctatcagattcttattttcccgacttggcttacttcaaaatgtttagctgtgaataaacatttactttctttcaactttcaggttatgtggaggtggtgaacttcttgacaggatactagcaaggtctgcttttaaagattgttatgacatttgttaacttatggtcagagatccttcttagagatgttctattggctgtctaactatttcaaatttacttctcttacaggggaggaaaatactctgaagatgatgcaaaagcagtgcttatacagatccttaacgtcgtagctttctgtcatctccaaggagttgttcatcgagatctaaaaccagaggtgaaccgcactttttgtctttgctttttcctttcaaaacccaaaagaaatattgtcttagttgaataccaatctcacatttgaaacactttcatgtttcagaacttcttgtacacttccaaggaggagaattctatgttgaaagtcatagattttggcttatcggactttgtcagaccagacgaaagactaaatgatatagtgggaagtgcatattacgtagcccctgaagttctacacagatcttataccacagaagcggatgtatggagcataggagtcatagcatacattctcctatgtggaagccgtcctttttgggcaagaactgaatcaggaattttcagagcagttctaaaagctgatcccagttttgatgaacctccttggccttcgttatcctttgaggcaaaagattttgttaagagattattgtacaaggaccctcggaaaagaatgactgcatctcaagctttgagtcagtaatctctaaaatatccacatctttctatatttatcttctgtttctagcttttcatgaatcaccagttgaagttactccacgtttttttccggtttttacagtgcatccttggatcgcgggttataagaaaatagatatcccatttgatattctgatcttcaagcagatcaaagcatacttgagatcttcgtctttgcgcaaagctgctttgatggtacattttgcttctaaccttttttactgtttccaaacaacatttaaggatgtgtttgatatttattacctttgtatctagtttgctaactcttttattctctccaggctctgtccaagacattaactaccgatgaacttctttatctgaaagcgcagtttgcacacttagcacccaacaaaaatggcctcatcactttagatagcatcagactggtatgtgccttctcttcctctctgtctctctctggtagaaagcaaacagctcaaagctagatttatttctgttggacaggcacttgcgacaaatgcaacagaagcaatgaaggaatcacggatcccggactttcttgcattggtattgtctcctttctgttcttgtccttttgcttaatctgtttaagatacaatccaaggttggttaacgaaagtttggtgttgggaaatgacagttaaatggacttcaatacaaagggatggattttgaagagttttgtgcagcttccattagcgttcatcagcatgagtctcttgattgttgggagcagagcattcgtcatgcttatgagctatttgaaatgaatggaaaccgagttatcgtcatcgaagaactcgcttctgtaagtttataagaaattcgacacttgcttctgtcatgcttaacaatttattcagctaattcctaaacgaagggaacataaatgttttgtaggaacttggtgttggatcatccatcccggttcataccattctaaatgactggataagacatactgacgggaagctgagtttcttgggttttgtcaaactgctgcacggtgtctcgactcgacaatctttagcgaaaacgcgatgaggaaagtgactcggtgttataacggattcgaaagaggaagaacatacaactgcaagaagcaaatgggtggattggggttgggaattggaatttttttcaggacccattcctatgtttatagtgttagaaaaagaatgctaagttccgacaaagaaagagagtatccagaaaaatccgacaggcctggagagttgtataataagatgataatccacagtcgtgttcttccaaatcatggaagacagatattaagaacatccctttctcttttcatttggctgtctccattttttccaggaaaaagattcagattccattcacaatgtgccacaaagcaaatcataaaaacccattcctaagtcacaaaacttacagtaacagagagctattaatatttcaaattcggaaaaacttgcttctcaagattccataatccatatcaatagaagtcatacatttcattctcaaaaggtgttacagaacaaaccataaacccattcctaagttacaaaactgacagttgggatggctaggcaacaaagtcagctttttaacatttctgaatcctcaaactttcttctcaagaggattgaatctacaatgctatctaaagttctaaacacttgaaagcatctgcttcttacatgataacaaagatagaaagctccattttttgaccaagatctgttcatgtcttttacctcgaggagagtctctggtgtaaatcttctgccaatgcttgcctcaaactctccccgtaatagtaaaactgcctctcactctccaaaactcttgcaggcgttccagcttcatctggatccttccaaatctccggttcaggttctctagcaatctgacaaagattatgcaacacacaacaagccacaatagtctgaggagcatggttcacaccaacattcaaactctgaagaatcttccatctagccttgagcaatccaatagcttccaccaccactgaccttcctttcatcaacattccatcgaatagattctccggtggcgtaccagagccatttggtgaaaatggagtcatcaggaatgagagaagaggataacaccaatctccaacaatgtatggtctcacatggtgacctctaatattgataactttctcccaaacaatgtctcctgaagtaagcctcttatatagaagactatctctgaaatgagaagagtcgtcttctccacctggagctttcacacaaacgtcccaaaagatcttcttgtgatcagcaacaacctgaagcaaaacggcgtcgtatccgtacttgcaaccgtaaatgtttctagggtttagtttcgtgcggcgtctgagcttcaccggagtactatcaatggcgccgcaaatgttggggagagaggtgagttcttcgaatccctgagtcgtttcgatcaatctccgttttccgacggggattttgatgaattctggatatagcttggtggctaagagacgtgtgaccatgtttgtgatcttggagatgaggtatggatctagtgagtagcgagaagctagggttttagctgagcagccatgagcgagacgagagaggaccatagcgacggcgtaatcggcggggagagagagatttgaagcggtgatgaatggtttgagcttgtcgacgacggtgatgaagactgggtaggaaagaccgtacaatgagcgccaacgagcgtcgcggagaggcgcatcgagtgaccagatgtggtctgtggttagggcacggaaggcagcgacggagtaatcgccgtcggcaagaggcggaggaggggaaggggaaggtgattctgaggaagatgaggattcggttgaagatctgttgacggcgaggaaggagaggagagatgcgagagtgaagaagagtaaaggcgcggcggaggaagtggagaggagggaggaaggtgtggttgaagactgtgaagatgtggatgcggaagagaagagagtgcttgtaggatctaatgagttttggagatggagaagatgtgagagcatcgccatgaaagcttcttccatcttcactctccgatttttttctctccggagaggttgagagtagaagaaaaactgaagaagtgagagagaaagggctaatagctaaaaatttaaaattaatgtgagttaataaatataattttaaagttttggggttgtttgtttaatttcagaaagttttgggcttataagcaattcgtagaaggtaagcggaattttgatccaacaagttgcaaccatttatattagtctgagacaaaccagtaaccaaaatttttgaatctcctccaaacaacaagtctatcaaaatcaaatccatctaacaaaattcttctttcgactacaggttttagctttgatatgtgaaaccatgatgaagatgatcacttgatgagtctcttcaattctccccatgatagttgttggagtcgtggtggttagcatatcctcctccattgttgtaaccatgtcctcgtgagtatcctccattccactgctgccctgagtctcctctccactgccacaagttgaacacattatgagaactaaaaagaaatctattgccagcagaaccaatttggttaagtcctagaccaaaacatgtcgacataagaccatgttcagggttggtgacacaagttggacatggagacatgtattagatattctcccacttgcataagtcaaaatagaaaacgaagggaaggtgctagattccaccagctattattgtcaaccactgactttacttttaataacaaaacaaacaactattcacaaagtttgaccctagcaaaatactcaatttactcttctactgatagaatgcatcaactccaaagtgaaattttacctgcttgtttgggcttcgtccccaggagagtctgacagtgttcttgccgatgactgtcccgttcaaactctcgatagcatcttcagcactcttcctgtcaaaaccaaaggcaagtcgctttgaattactcgctatgagataagcacctacaggttgctcaatcatatgattgccaagccaacactactaactagatgaagacagcacctgtcagcaaattggacaaatccacatcctttccctactgggatcttcactgaaacaacctctccaaactgggaaaaaggttgtctgaggtcttcatcaataacatcagggtcaatgccgccaacaaatatctgcagtagaataacctaagatgagcagcaagaacatatagagcttgaatgatgctgacatataactaaatatgacaactcactgttgcgttagttgattcgccatcagactgcgagccataacccatggaaccatttgatccatgtccaccagccagaatcacagctattccaatgaaaacataaaatctttatagttcaaaaactttgttgaatgcaacaagttgttagctctagagtcctatggattaaaactggctcacctctcgcttaaaactagtacacttaaatagaaagaatcagagggtaaaactagttgcagagagaagtatgaaaagaaaccttgtgaagaatgttgttgctgattagcaatcgctcttttgggagttgcaatacctacacgcatttgcctgttcgaacagtaagctccattcatttctgtcaaagcccttgacctctcattttcatcaccgaacctcacaaaaccataacctttggaccggccggtgttggaatcaatcacaactttggcgcttttgacagaaggatatctatcagaaaaggtctcatgcaataaaacgtcagtgacatctggagacaagtctcccacaaaaacagataggtctggaccattttccactgctcttttttcaccagtactaaaagatgcccagtttatacggaagggttggtccgagtttggcatcactgaaccactatagttctgaagaacttcttcagctgcagcacgtgaaagaaactcaacaaacccatacccttctgattgagaagtgagcttgttacgtataactttcacagaagaaacctgctcatcacaaaaaaaaacaagaaacttcagagaaagaacaaaacagaacacatgtataactggatataagtttattcatgaaaagtgaaaatcttatgcaatcattctctttcataccagaaaagttttaactaaacgtggcaaggtacaagagtactttttgcctaacgaaatatgaacttgtcctgtccttttcaggtcaaagttgttctccattaccctatttgtttctatatccattggatctaatctaatccaactaactagttttttaaaatagctacttggtttaacaatgaatcaaaacacaagaacatgtcaatgatttgcaaaaaggatgaatttttaaccatatttacaagtaacaatctaaatccaaaacagagtaccaatgaacaagataatacctcgccggtgtgagaaaagcaagaatggagataagtctcatccatccaatgaagaagatcaccaacccaaagagtcttgacatcatctccagatccacggtcaatagccttgtgttgctggtgctggtgctgttgataagacccgtattggtgaagctgaggatgatgctgctgataaggaccttgattatacggaacatattgatgaggatacatcagcatctgttgctgctgcatcatcatcatcgccgccgctggtggatattgcatggcagccatccactgttgctgttgctgttgctgctgctgccactgctgaggtggaggaggggtttgttgattcggcggtgtggctccggaagttgccaacgtcgaatctgagccgttggttgtctgcatcttgatccgatctgatctccggaaagggaaaacagagtctccgagttgttttagattcaagagtttcgagattcttcttctctatgaatatatttcgttccaacaagtgtgcgtaaagaaagtgagagctcgttgagctctggtaatggcggagagagagatagaggtagagagagatttggtcttaaaaggaggcggagagagagagagagaagtgagttaatgggtttaaggctgaaacaatgggtcttggggaagtggccgaaacgtggggcccatttacgtgcttaagccgtgttgttttttgagatcgacggctctgattccaccgcatttagccacttacatttaattatttcaccttctagggtttttaaaatataactgactttttaatcattgggtaaaaacaaaaacatatttacgtgataatatgattaaccgttttgtactgtcatgaaagagtcagctgttctacagtaaactctaggcctatgcaaattaaccgagccgttttactgttctacagtaaattttaaaagtatgtaaattaaccgaatcggatgtatcgaaccggaactaaagtaaaaaaaaaaaaaaattacattaaaccaaagattcgaaaaaaaacagaatagatattttagaatcggtaccaaaccgatataaaatacaattatatatccaaaacaaaagttatttataaactaaataataaaaatatttgagaatatataaaatcataaaaatattcaaaaataaaagaaaaatatccataaaataattgaaatatctaaagtaaaatatttgaatggatactaaatgataaaacttaaagaactgaaccaaaaccaaaccaaaattttaaattagttgaatgaatactaaattatataaccgaaacgaatggaaccgatagtcgtttggataaccgaacgtcaggactagtgaatccaaaaaaaaaaaagaattagatatgggccttatactcaacacctgtttaaaacagaggttttgaaaaaaccatatttttatatctcgttccactgcatctctatgcaaccatcctcaaatcttcttgtatgcctaaccggaattagggtttggactaagagaaagttcgtgattttggatttcttcaacgttctttctgcagttagggcaagtatagtctgaatgaagccatgtgtcagtaaaatcaaagtgaaagcaatgattacaactaggtaaaaccctggctttgtcttcgtcgatgaactttgatagacaaacgacgcattcgatattgtctttgaaggcattagcgttgaaagatacgacaggaattgataaaagaacggaagggttgatcccagtggcttttatgacatgtaaactatgactaggatgaatcagatgatcatcgtcacctttgttgcaataagcaagacaacaacgaaatatagaataaaacacagtcagaatcgcgaagaatgtgcgagatcgtacagcttcgagagcatcttcgttcatcttaaaaacttttgcaatatcaatctctcaaattaataacctttttataggtatgtattaagggattaatattgaaaccagatcctaattcagttctaattaataatccaaaaattcgatagattaaagaaagtattgggtctgaaacaaagcccccagggcccaaaactagagcaaccacaagttcgttcttttaaagatacacttcccggttttgtttatcattagtattttgggttgtagtttctctcgttttcaatgttttccaacatttctatttaattgttactcgagcttgtaaattactaattaaacaaaaaaatagaagatgatataataatttaaaaataaatgtggaaacagaagcacgtggctgtgtctgctatgtaagacatggtaaaaaaaaagcctcaaaggagaaatataatcccaacggaaccatgcaatgatgagattaaccttttttaatgcgttaccaaaaagctaatccacgtaaatatatcctatgtaatcgtttttatatagtatcactcattgatgatattttgttacagtaacacacttcattaggataaattactactccgcataggccgctttttggttttatctaatgaaggccaaaatggttttaactaagtggaccctgtgtttagtgccaaaatagaggaatattccaaaataaaataaaagaatattagtgaaaaaaatagaaaaaatataatatttgtattttgtatgatcgcagtttttagagaagtacaaaccaactgtattactgtgccgtcatgtcatgtacctttcctcttttctccaattttttttttaaaacatcaatttttggtttcagatatttttgtaaattgggtactatatgacatgaaacatttaaatataacataaactgcaagtgtaagaataagaatgacatgagacaaacaaaaaataatagttttgagtaagataaaataattgtaataattaagcatccaatgttttaaaagaatccaaacaagaagcacctttctatattcatgcacttaaaactctgccaaaaccatttttgattttaaaacagaaacataacaaaccaacgaaatcaccgtaattagtagccaagatccgaaatttcattataaaggtcgtgttttttgttttgttttgtacgaactagtaacataggtttttaaagagaaatagactagagctgtacaagtggaaatgttaaccacgaaaaacaaaacctatttttcttttgtcttcttcatggatggtatttgctttttgatggcttaaagtcgatcccacttgtagcgaccttcaagcggttcgtcattgacaatatcgaagttgtacctgtgccaaagtgtgtgtgttcgttaggattctgattctctctctttttaggatatttgctaaactacgcgtcggttaatctttttatcatgcgcacgcagacatttttactcacattcctctctctctctctctaggtacggactcactccaatttttcccaaaccccaaaaagcaaagcgcacacaacaacaacaagaacacacgtgagagagatgatgaaattgtaaaaatggactcacttttctatgaattgcttcttcttatcgtcttgactctctagctccgagaacaaatcctcaatctccgccgccgttggagtcttcctcacccccggttgttttctcttcgttgccgatgatgattccatttctgttgtcgtttctcccaaaccctcactcactggactcgtctcttttctgccataaaaaacagagaaaaaatcgccaaggagaataaaatcgattgaacgtctaatttggggggggggggaaacaaaaagattatgaacctgaaattgctggtgatgaatgttgaggtttcggtttcggtttcgatttgatgatcctgaaacacagaaacggaaataaaaaatcaaaacgaaaactgagaaaatcgtctgattaaatcgattcaagtagagaggagttatttgattttgaaaattcacctccagatctacaccaaacgacgaactgttcttcgcgatttctttcgattcactggtgaaacaaccggagctgatactcgaggactgatcactttcttctccaccgatggtaacggaacattcatcagacgctaaagccgccgacgaagcaacggaagaagatgaaaccgcgaagacgatgacgtcatgagagtccggtgatgaatcagaagaatcattaagcttcgttttcttcagtggtgagaagcttgtgcttgaagcttcttctgcaagctctcgctttctctcgctcatttttttctctcttggatttttgtgtgctctctctctctgcttttttttctttctatttctggttcgcttcttaacaaagcagaggagattttggtggggaaggagagagaatgaatcatgagccgttgattatttcaacggttgagattttattttccttggtgagcggacggaggttatggtatataacggcgccgttacggagtttcgcttttattttcttacacaaacgccgttgagattcccaaacgcgttttctctccctttttgccgtttttgcctttttggcttcctttcaaagcaattgaaaacgcaatcattttcggtagttatgacgtagtagcaacgtaacagtagtcattattttttcttaaaacgatttaaagtatgagtaaaccacaactctatttaattcgatttgtttaggaacaagtcttatttggtcagggtctatgagaaccatcgaacaagtcttttctcgtaattgggttttatattttatgagaatcaattaaaagctaaaaccaatgatgtgacatatatcgagggtatatatatgaatggttgaggtgtgaatagagatttgtcaaattagcttgatcccttccattgtacgcgttttatcatggttttgagatggatatgttaacatccagaacatagtgttgaaatcttttaatgttaaaactatcacgtaattaaggttaatcaaccttttttgaaaaacaattagttcataaacttacttagatggtcaaatatcataagcaattagacaaactattccttacaatatttcaaatgaagatactagctataattacacaacagaagatacatggttaaccaatttataaaatacttagaaaagaattgtggtggtcggaacaataaattagagatacctatagcagaagatacatcgattaactacattctataaaatcatctgtactattatatatgtttgtcggaacatgtctagaagcgcctcgttaatttacgtttaaaacaatactataattttgttacatagtcaattttgtaagaacctacatcttataaaccaattatacaactttttggttcgtatcatcaccaagaccatgaaatcaatgacgaatcaaataatgcttgaatctggaaagggaataacagtttggggtttgcttagtagaaacatcaattatgtcatatagagactaactcagcttaagtctaattaatctcttgtttatgcttagttgtctttttgaaagtttccatgcatgtgtaagtttcttccactgatcagatacacatcaacaacagattttgtcctctatgtcattttaatgacatatgtattatgaaataatgtacatgtgttaaaaccataatatagcaccatagagaatgagccattaaagctcaactaaactgtccgtacagttaaaaccaattgtaaacaactaaactcaattctcgtcttaaagagcccatatatgtatatatatatacaaaatggccagaacggtttacaaatttaagcatatactataattaaattttagtgtaactacttctttattcttccaataaatgggaccattttcaataaattttagtaataaaaggaatcatcgagtaataattaagtgactgatgcaacaacgaattcgctgacctaggcatttatttaggaattattaagacaaatcaagagggaatgatataattcaaaataatttattcagtgaccattgtaatccatatgatcatatatagtcctgaatagggtcgtcctaaacttttaaaaaaattgatagaacttttcaataaaaatttcgcctatcatttcaaatcttttctcatttgtatgaatatataataacactatcaatcaataatcaaatatttttttgttacattgttgattagctagttagaaaaatgtaaagataagttgattttgtatgttaagatagtttctatgtcacttcctactattaatttgtatgttaagataattttttactatgtagaaaactctatgtcaagattaaaataattttgactgccaagaaaattttgattgcaatacttagatataaaaagaaaaaaagtgattataactagtactcgtaaccaagtatgttttattaaatatcgtttcacgatccgaattcaaatccgataaaatacaggttattagaaagaaaaaaaatgatattctaacgagataatacactaatatttatttaatagatcttccatgaaacaaaagaccggattaaaccctaagaatccctacaatatatcttacacatacatgaccataacgaaattacatgaatcttgattcttgagaattctgtactgggtcacctgattgccataaaaaaaagtcaatagaggagctggagttttctaacagatgaaaaagaaaaagtcaaacaatgtaaaaatacactttttaaggactcatttttttttttttttttttgtcatccacactttttaaaggacttttttttttacagtagactgttagttggtgagctttattttcagttgaggtcgggatctgtgaaactgtctcatcttacattttatctttacttatatatgtttcttcctctttcatgcctttggcaattcttttaaaacaatccatcttttttttttctttctaatatctgttgttcttgtttttgttacagtttcttagacaaaaggaccagtactgactaaagaagatacacagcaactcatcttatgtctgtgatcataaattcacatttcttgttcatctgaatctaaaattaaatgaacctggttctctctgttgtcacttatcatatataaccaagtttgaacatgacttttaatattataagcaataaaaagaaagaagaagaagccaaacaggtcgatcactctagctacagttcgtatttatgaccaaagtatattaaaaggtgactgagcctatccatgtgtttttcacaacggccaaagtttatataacaatcggaactaatctccttcttcgagcaattagtaagaaactgcgaaactaccaactacttggaaatttggaatatcacatgaaattgtataaaagagaaaacaaggtttagactgggacatgattttcctaaactgtataaatcatatcctaagtctaagtgaccatgatatatagcttaaattagtagttaatttatgttgatgttaccagttaccactatgttatttcaagtccggatattgcatgttcaagagagtatataatttttcaaaacatgaacactccagctacatgttaactataattataattagaagaaacagttaatagacatttttgtagctttgaccttgataaatctacaaattaaaattattgacaaagatactcaacaaggtcaacatgtagctgctggagtgttagtatatatattttgttaatcaaaaataaaatctctctagtcttgtatccttaactggaaaatataaatggcgggaaaattgaaactaaaggcttagagatgtaattggtttatagatcgtaggatttgaaaatcctcattgatcaaatccgaggaaaaaccttattatttaaatttatatactttttgatgacgttaaaacctatatgtatatgatttaaaatcaaagaggatatctagcaagtatagattttaaaaataaagttttacttcggatttgagttttgtttttctacgtaaaacaattccaaatttattaagttccatgcaaaataacaaaagattattaaatgaataatactaaatttcaacttgtataagaataatattatgtaattagactctttttgaaatttaatgcggattattacacaagggaaagtgcatgaatcctgaaaaatgcctaaaacgtagaaaaattcccaaaaagtgtctaatagtgcaacatattctagaaattattataacacgtgattttgattttaaaaaaacttttaaatccataatccaatatagtccctccgtttttcctttttatttgatgttttaggaaaaaatatattcttttgaattagatgatgtttgcacaactatggacaactaattagttttccaattgattttgacgattgatattatgcatagtattttattatggaccgaatcatgtttaaatagataatatatgatattttagtttagaaataaacaaaaattgaatgattttcacaaatcgaggtgcaaaaatcttaaacatcaaataaaaaacaatagaattaaatgatttcataacacataattttgtttatgttttccaaaatcaaaaatccactaacaaataactcacactttgtctttcaccaagaagcgtttcacaaccttgatgctttcatccaaaacagtattgtcccaaatctctcttgacgatcttccaaatgacggcgtagcgtccaacctctgaatgtcccatccgctgcttttcagcttcatgatcctctcaatctgcttcttcgcaagcctccatgtgttctctttgatctcttggacagcttcgtcatacgccccctttcttgcttggtcccattcggacatcttctgctttctctcaggcgggtataagctgaagtaccggtcgaactcgggtattcctatggtcttgtgaatcccgtgggctcggattgcggacccggaatatctcgggtcgtagaaaccggctagctcctcgaacatccctgactccatcatctggtcgacacgtttcgagaggtactcgaacaggaccgacactgagacatccacccaaaggaagcaacactcgtacctttcataatacataaatttcaaaaggattttacacaaaatgaataagctatagacattttagaaaacgcataatattttagacataaaagtataaaacagttttgtgtttggttttaaatatttttgacgtttagaatgtgaaagtgtacactaagatgcctttaaaatgtttttaaactttgaattcattttgggaacgtatataaacgtcaacacaaacaaacaatctatatacaatatatatcatacctcaagccggaagagatggatgtctcagaagagaatggataggttttggggtcaaaacggtcgacaaggagagcatgaatgaaggagtttgatccaccagctataatcgggaggtttccacgagcagtaatctcggagatggaccgcgacgccaaagagcggaattcggaggtagttagttcgctatcatccggagggagctcaccaaggagatggtgagggactccacatctctcaaggatgctcatttgattcgtagtgaccttcaatccatcgtagaattgaatcttgtcggaattgacgatctcgccagagaaacgagttgctagatcgattgagaggcatgacttgcctgatccggtggctcccatgatcacaaccactttttgcttgtatgattgttccatgcaaacggtagtcatgggaactactgatcgtggtggtggcagtcgcagccgcggagaagtgatcgggatcatggaaggagagacgaatgtggacgtaagattttgcataattaaccaaagagacaaatgtgctgtctataatctctgttagatcagctcataaacttgatagtataaacccttaacaaaacaaaacaaaaggatgtttgatatgtcaaaggacatttcatacggtatttatataagtgtctgtgtatatgattgattagatatgtaatactggtggaatttgttgctttattggtgttgatgacaactgggtgagcattgattttgtaatctaacatgaatacatattgatttgttaccattcatgctcttaacaatgtccttattataattacttacatttttatcaaaaaaaaacctaaaaaaaacattatattgtacttaccgtacgttttcttattctcctctgccttataaaatttttataatcaaaagtaaattaaatagcacatgcatgcatttttgtaaactaacacaattggagaagtatatagtaaaatctctagaaattaatagtgtgagactataatattttgttactttatagtatgttggtttactataaattaatatttattaatatataaagagttttttttttaatttttaatttgtttttaataaatatgagttacaccaatttaatctaaataaaattaatgtttgggatgttataaatttgtagttttgaacttcaaaattgaatatgtagaagaaaaatcaaattatgttacaataaataacctagactatagtgaattcacttatatacaaagtgtataaataaatttgaatgtatgaataacgacctcaattgttgtatttgatcagtttatgatactatcaaaatgaaaaatgatgcatattcagaaaaattaaaaaacttacagaaaattttggctatttttaatgaagatttatagacgatactacaataagatagtttaagacataacataatattttttatagaataaagttagtgatgtaatttaacaaaatattattttaaaaagtaaaactgaaagctgacattgatatatattatatttatatgtaacctacataaattaaatgattattaatttatgttatgaatgaaattatatgtatatatatatatatatttgtaaaataattagtatcttatagatttttgttattttgacactaatacgatttgagaccaaaaattttcttattttatattgtttatttattaatttagaattttttacattatctcttatctattctatatcgcttgggatcttagagcacttccaacggagactgtaaatatttcttttataacttaaataataaaaataatttaaaaactagtaagagagcgaatagaaccgaaaagatacgattctaaaacgagaactctagcacctgtgatgagaaacccatatgagatgtgatactgtgtaattagtcagtttttttatttctaattaagaaataataataattacatttaaataattaaaataatataaataagaacctgagagtggatttcagcgttggaggtgctcataggaagtaagacttgatcttcaaagcttgatgatgcttcctccaaggagtaaggactttgtggttattagggttacaaatctgaaaacaatattttccctatatacatactttcattctttagtggtaacatatattgcatatgaacgtttctagacaagtgtatatatattttttcttttccttttcttcatttccattttcctagttttaaattttccataaattttcgtagttactacataatattttgggcaggccctaatatttttgtattgtgcgatgaaaatgtaaactggatgatagaatgatgtatacgaatctatgaaagtattttagactaagtggaaaacttactaaataaatttgaggaaaaatgggaaaaaatgaatttacgaaagaatctaatagaaagtaacacatgctaatatattttcgtaacatttgtcttgtcgcaatgcaataagtcattacgaaactacttggatttttttttctagggttgttgtcttcggaaatttcagcatttttcgccaacttaatttttcaggggtttttgttttcccgttggcgatttagcatatgtacttttatcaatttttaataaaattaaaactgaccaaaaagagcaatgtggaaagggaagaaaatgagtaaattattttaaggttggacattggttgtgaaaatgcttcatttactgtgaaaattcgtaacgtttggacattcaataatatagctttgacaagacattgactccggtagaaaagaaaccaagagaaatctaatgagattctcaatcgtaaatagtattactgaaagttgtccaatctgtttagagagctttcttcacctcgaaaaagttggagcgttcattgttcgctgcatcaatgtcttccgcggatgccacagccaccgcaacacctttatctctaaccacatctattgcttgtgcgaaatccttgaagtccttcaaactgtggaacaacaaaagttaattaacacttttagttaggatgcagaagaaaatttattgagagaatgtccttaatttaaccaaccttgttgttagtatctcttcacgctttctttgtcgttcttcgtcagttactccgagtaaatgcctcaacaaactgggtgaaagagattcaacaattttgattcaggatccgttatgtttgttcaaataggcaaacagaaacaaaataaaataacatcatttacctgctataacctttggcatcaggtaattggtatgaatcaacatcaccgatggtgccaataatagctttagtgagtgtttcttgatccacatcaaggccacgtaagaaatctccagttccatcatatatatcaagtgtcttcaacaagtttggatcccggtacgataagtaagaaaatactcctgaacaaagatatggccaatagaagaatatattaattgacgtaactcttttcatattcaagagagtagaaagcagttattgtacctgaatgcgaatcgaaatcacagaaacctccatatgcaccaccacttacacgaacacgatcccataaccatgtattgctaatatgctttgatataacatacgcactgccatcaagctcatacccggtgctgtatatgttacccgcttttccaacatagtttacctgcaaagggagtatgagagcgagttactgtatcaaaaataataaacccaaccacattctatattactatataaacgtcttttttttacctgggttggtattacaatggcttcatttctcagaggaagtcgaccatcccaagtgacaagcccaccagacgggttctcagggagtaaatctagaaattttgcaacagatttttcgacatttgtgagagacttcccatcagcagtcatattaactatgcaaccgtttctagcaaggagagatcttctgatctcctcaagcgaggatgaaattccttcccagtcttcatccactttcttttcaagagtatgtaaaaattcaagatagctacaaaagagagatgctcaactttgttaggttctacaagtatcaaaagaatagtagagataaactctaaaatgtgaataaagttcattctcaacagagatcaagaccagagagagaagacgatataaataagggccaaattaaaagttaaataaacaattatcaaattccaacctgagaccacccatctgttcagacatccatccagcaatgttcaacattgcatccatcctcgccgcagcaattccatgaccacttcccctcaatcggttctgcatagaatgtgaagtgatgtttatactactactttcaagttccacttatcatgcaaagacagaaaagaaaacccctactacatacctccatccgtgctctgctttgagagacaaactgtttaaacctctgctgatctgtaaattgaacctcttgcaacaagcagttcatctgcaggaagacaaaaagcaatgaagataagagccaacctagaagtttgacagaaaaaaaatcgaatatgggattgaataaatgtctagttggatcatggtactgattcatgaaagacactgaacattttgaaaagttcttcaatcaccatacgctacaactgtttctatatcaaggttacattatatcttaacagaaaaaaacaggtttgcagtcagagtgactgttaccataatccagtagtcataggctcatagcgaagacatcgagaaaacatcaagtacttcttagagaagaaagagacaagggcaaagagatgagagaggcagcgcttttgtattttggaaaaacaggaaaaaaataaagatctacacagtgtcacagactcacagtaacagctgcactgtatctcatggagacccaagcaaaagaaaaatctatcaggtagacagctctacacatcccataacctaacatacacaaatctaaacacaagcaaattggtaaactacatttagcaaactaactacagggccatggagaccgaagaaaacatgatcgtgatcacgtaggcagcactatatatcccataagccaacatacataaaattagagaaaaatgcgataagctaaagcaagggatttttaaatgacaaagtaccaggttaaaaaggtcgtcagcacgcccagccatggattttccgcgtacgataattttgctgcatggttcatccttacccctcactgatgatgtaaggggataaactgatatccctcccgttttccttccaatcaactgattaagttgaacaaaagtcaaatcttttgtgcccatctccagtaatgattgactgtcaaaatacatttattatcagagttagtatatcaatacagtatgaacagaagtaaaacattcgttattacagctgtcaacgtacaccctaaaatataaaaaaattcccatgcttttgaaaatgcatggcagagaatctaacaacattcttcatttagcattcccaccatacacatttctggaaaaagttggtaagaaactcataaagaaatcataagaaatctttaatcataccagaaaagtggtactagtggaagaagctcatgtttcagcgaaccaatatcaaagactacttcagtatagataatatcattggtgaaaaggtcatgccgcaaaaccttcacaccattaatatctccaacctattgtttaaaacatatcagtaaacttcgcaagctcgggaaataaggaaatacaacaaaaacaaaagcaacctcggtgggaacataagtaggttcttttggaatgtcacccaagttcaaacttgggacacatctcaatgcttcaggagggtcaggagtttcttgtttcaatttcagctcctctgtagcacgtgctagctctgcaagatcttcttctgtcatagctgctttaactttttccaggatatttttctcttccacttcctcttgagtagctttttcaggatcaggctggcaaaactagtgttagcacaaaagcaaagaaacattatatagcaacgagaaacttgtaaaagatcacctgcatctctatggtaacacgatgcgagttgttcaagataagcttctctatcagtggggaaaagacagccttggatccctcctcagctattctggttttcagggccttcaatggttccgtatactttaatggctcaaaaggatccatatcgtatatccattttgactaaaaaaaacaataatcaaataaggagtgatacctgaatagacatacacgtaagcataaaatgcatattaacttacaatagattggagcataagtgataaaccacgagggaaagatcctgtgttgttttccctcaaagaaaactcaattgtattcatggatgcctccacagcatcattgtcaaacccttcttctgccaactttttcagagtatccatgatcaactcttcaaccttttgaacattctcttcggacacacctttcaaaccaataccgaactggggctgcaagagttcgtctgacaacccactactgacaagagcttctcctaaaccgctttccaataagatctttcttagtggtgaagcaggagtccccagcataagatgatccaagaagccaagtgcaagttgagtttgcaagtccaagggcttctcagacaatagccagttaacgcacaacatatgcttctttttaaggtcaccatctcgaccagcaggatatttctcaaccagtctgacaggctcagagaatagcttttgaaatttaatctttgaactattgggagatggacttgcttcaaacatatccaagtattctgcacatataagaaacgcagggataagatgtatttcaaatcgacatagacgacaaacacaaaaaatatgaggattctttctagtaagacaaaggagatatcaatctttaccactcaagacacggaggcggtgaacgggatcatcatctccatagaaccagatcctggcgttgcttgggtgataatattgacggtggaactcctaaaattgtcccaaaacaagaaatatacttagtatgcatcagaagttacacattacaagaaatatactagcatattaatttgacttctaacaaaccttgaattcctcaaatgtcagattaggaatatcttttggatcacctccactgtcaacaccatatgtattttctggggataaggcctaataaaagtgaaaacagtagtagctgatttcatcagaaccactatatcaaggaaattcaaatatgtctcagattatctaacaaggtttttgttccaagtgtccaaacgactctttcatgatggctatatcatttagttgattaataaggtcaaaacccaagatcaggttaaaccaacaacgagaaacttctagttatagtaagcaaaacacaatacttgcctgttgagcaattcgccctaaaatattatcaggctgtgaatagacccctttcatctcattaaaaacaacacctgaaatcaaacatcaacaatgagataggatgagtgggtatctgaagtagctgataaactaaaagatatcatcgatactaagaaaagtagaggaaaagagctctaaaatggaatcctaggtaaataaaacctttgtaagatatgtcttccgagggatcattaagttcatagtgccagccctcttgctgaaaggtgtgagcgtcatccacacacttggggaagaagacagcatccaaatatacatcgacaagattgtaaaaatcctaccatagatagtgatagtgatgagttgtgatcagaaatagactcactttagataacaataacagaaagaaagaggttagcccactgaggacaacaaaagaaggacttaatgtttggctcattgtacctttgtattggtggaagcaactgggtagcaggtcctatcaggatatgtgaatgcatttagaaaagtatgcaaacttcccttgagtagttcaacaaatggctcttttaccgggtactttcttgacccacatagaacgctatgttccagtatgtgcggaatgccagtggaatccttcctgcattaacaacgaaactatgatctaaaattgcttccattattagtttttgcaagtctttcacaaggaggtgcctgtgggaccaatatctactgaaagtgcagttgctcatatcgacttttaacaaagcgttaagtaatttgacaagttgtaacctccaaaacttagaccactttacaagtaccaatatattagaagaagaaacgaaatgactaggtctaatcagaaaaaaaaagctttgatgagtagagataaacttgaccatttcaattagttaaattcaaggagtgaagctttaggtaccaatttcaattgcctaatacatactcaggtcaaatttacagagagtaaaaattattatgaagtaaacttacggaggagttctgaaaacaacaccgaagaccttgttctcatcctcatttgacacagacatcacctcgcaaccagttttcttgtgtttgaagagtatcgcctttgatttacactctgagatgaattcttccgacactttttcaaatccaagcttctcagcctcatcttgacctacatctgaatccaaacaaccaaaaataaggaaaatcacgcatcagcagaggttacacatggctccatttgattacaaagtagacacaaagcatgagatgaaaaatgcaccacacggaccacacctatctacaattcacaacctatcctaaagtaagaaccacaatttcacaagtgccacaaatcaacatgtccgaattaagagaacaaatcaattagcaattaaacttcaaacagattgaaaaaaagaagtatatgtgaaaaattccaaccaggataaagtggagcgggttgtgtggcgacggcgcgaacagagaggcgagagaactgcccattgacactgcgaactgcggcggagggaatcctcaaacctcgtcggagcaaaagacgtctaccggcgactgagggagaggaaattcggcgaagattgcgactggggacacggagagctgccgtcgacgatgtgagagacatgtaagagcgagggaactgacgaaagaagcgaaagaatagagaggacgagctgcgcgaagctaaacaagagacggttcggagcatagctaccggaaaaaaaatattcccggcggagactgctactgacggagacgaaattaaggatattgcaaagaagctaaataaacccaacggcaagaggttttatccttgtgtagttgtgtgtttttgcttgtagaggaaaaaagtaaaataaaataaaatgaaatacctcatttcttgtacaacacacaaaattattgtgaaaaatattctctattttactaaattggcattttatttttctgaatttttaagtcgggacaaaaaagaggtgctgatttgcaagaaaggaaacgtggttctcatatagccaaatgtgtttgagtgttgcaatttgctatcctccaaaaatataatgactacaaaatatcttaaatcttttttcatgatattaaacttaagtgaaagtattacaaaatctgatcaagttaaaagtttacaccagacatatactttccaggtatttgattcagaaaaaatcatattgatcagatttaaacaaattttaaattatatataagttttttcttacacacaaattaaacctttgatcagtactagactactggtagcatgcgatgagcttgcagtagtttctctcgcacattagttatgggccgagagctaggcccatgtccagggacggataaaataatcttccagatgtttctttattatccacgtggcgtgatcacgtgaccacgtctcgtctcgtctagtcctagattagcagagcctctctttcggccagcgggttaccttattatcgtcacaagacgaaactttcagaaaaaggcaaaaatcactgtcaaaactcaaaagccttgagaccaaatttccgattttttctcctctgaagaaatccaacaaattgtaccatgattccagcttcactctacttcttctagggttcgttcgttttctggagctgttgcgcaatgccagtagcttacacatttccagttctcccttcttcttgtctgctttgcggaatctccaatcgcagcaccagcttcgtcgtagatcgcccggagcttcagatctcaggtctcctcgtcgttcgttctgaatccggtgaattcttcggttctggtttatctttgcggcggtttcagcgagaaggacggaggaggttgaatgctgctggtggtggtatccatgtcgtcgacaatgcgccgtctcgtacttcttctctcgctgcatctacctctacaatcgaactcccggttacgtgttaccaggtattttgctccgactgacttacttttcggaatctctgtagatactactatctctcgcgatttgctacttagctcctcgttgaagtgcaagtggaacttgtttttatccttctaaattttgttgaaatagaaacattttcctccaatttgtagtctctagcgcgtagaacgagatggatgtattgatttggcaatttaatattgtatcatagttcatttctgcaatagagtgtaaagaatgtagcgtttcgtttgttagacattattccaggatactgttaattgtattgattttgcagcttatcggagtttctgagcaagctgagaaagacgaggtcgttaagtcggttataaatttgaaaaaaactgatgctgaagagggttatacaatggaagctgctgcagctcgccaggttaagacctatagtatcactagagttggacagggaatgtggcttcagtttcttgatactttgttcttaatgtgtaggatcttctcatggatgttagggataaacttctttttgaatcagaatatgctggtaacctaaaagaaaagattgctcctaaatctcctctcagaattccgtgggcatggttgcctggtgctctatgccttcttcaagaggtactacttctgaccttttattgcgttttatccctgcaaatgttttgtactgatctttctgctactatgcttcaggttggacaagaaaaacttgtgctggatattggccgggctgctctcaggaaccttgattcaaagccatatattcatgatatattcttatctatggcacttgctgaggtaaaatcaaatgaactaagaatgggaactagttatctactttcactatcctctgcttcttctatctctaatatgtttgttttccatttagtgtgcaattgccaaggctgctttcgaggttaacaaggtctctcaaggatttgaagctcttgctcgtgctcaaagttttctgaagagtaaagttactcttgggaaacttgcattgttaactcaggtaacaggttctactgtcttgcattagtatatataaagcttctctgagtttacttttagccctgttactggcttgaattattaaaagtgcatgatcatgccttactgtaaatcgcatcatgtttaggagcttcacatataagtacgtattgtccaaaagcataatttaccagcatattgggttttaaggggttaaaattgatatttatagattgaggagtcactagaggagcttgcaccaccttgcacattggatctactgggcctgccacgcacgccagaaaatgcagagaggaggcgaggtgcaattgccgcgctacgcgaactgctcagacagggccttagtgttgaagcttcatgtcaaattcaagactggccatgctttttgagccaggcaattagcaggttattggccacagagattgtcgatcttcttccatgggatgatttagccattacacggaaaaataaaaaatcactggaatcccacaatcaaagagttgttattgattttaattgtttctacatggtgttacttggtcacatcgctgttggattttcaggcaagcaaaatgaaacggtatatctcgttttctttccttttgttaaatttagactgattggtccatttcttctctactctatctgcttataaagcataacattcagtatgcttgtgtagattaataaagcaaaaacgatatgcgaatgtctcatagcatcagaaggtgttgatctgaaatttgaggaagctttttgctcatttcttctaaaacaggtatttttcctcttgctttctttattctttttccctatcaactatgcttgtgcatcttatttacttcaagttcacttgcttcgaaagatccttgcgttgttcatttagttaagtgctactggacctacatgttggatagcacagggttccgaggcagaggccctggaaaaacttaagcagctggaatcaaattcagactctgccgttcgtaattcgatcttggggaaagagtcgagaagtacttctgctactccctcactggtaaaccttatgatttttaccaagaatatgtgttcatttgttgctacgactagagcgagggctatgcctgatgtaaatggcatgatcaactctagtggagtatgaataagtttgagctatgtttcaggctgtaattgaaacaatggaaatagatacatttagtggatggtagttaaattcatagaatatgctttaacagcattgtgtatgcctgccgttaacattttctttttcgattggttgtacatacacataaatcttaatatttgtttgagtaagcccttgggttcatgcactaaatttaatttggaaattttgcaagtatgtacatctcttcgctagctctgattttttttcatagaaagattgatagcgaccttcatacatgctacctataaaattgaccaggaagcgtggctaatggagtccgtgcttgctaactttccagacacaaggggttgttctccatctttggtaagaatcagatcactactggaagattctgtatagcagttctatttttatgcagaaagataatcatatatacaactttctgcaggccaattttttccgggctgaaaagaaatatccagaaaacaagaaaatggggtcaccttcgatcatgaatcataagacgaaccaaagaccactttccacaacacagttcgtgaactcgtcacaacatctttatacagctgtcgagcagttgacaccaacagatttgcagagcccagtggtatcagccaagaataatgatgaaaccagtgccagtatgccatctgttcaactgaagaggaaccttggtgtacacaaaaataaaatatgggatgagtggctctctcaaagcagtttgatcggaagggtatctgttgttgctttactgggttgcaccgtgttcttctctctgaagctatcaggcattaggtctggtagactacagagtatgcctatatcggtttctgctaggccgcattcagaatcagattcttttctgtggaaaacagagtctgggaatttcagaaaaaaccttgattctgtgaatagaaatggtatcgtgggaaacatcaaagtgctcattgacatgttaaagatgcattgtggcgaacatccggatgccctgtatctgaaaagctctggtcaatcagctacatcattgtctcattctgcgtcagaactgcataagagaccaatggatacagaagaagcggaagagcttgtgagacagtgggaaaatgttaaggctgaagctcttggaccaacacatcaagtttatagcctttccgaagtccttgatgaatccatgcttgtccaggttactgtttctatacatctcctattattcctttacttaattatgttagtttactacagttgaacatcaatgtttaggtagagtcaatatttctttgtttaatgcagtggcaaacattggcacaaacagcagaggcgaaatcctgttattggaggttcgttctgcttcatcttgaggttttgcaagcacatatattcgaagatggtattgctggtgaggctgcagaaatcgaagctcttctggaggaagcagcagaattagttgatgaatctcagcccaaaaacgcaaaatattataggtaaaaaaaaacatttcgctttcgggttacttttggactgagctggtatcttcttcactgatgcagcctttgtaaatttcttgtagcacttacaagatccgatatattctgaagaagcaagaagatggattgtggaaattctgccaaagcgatattcaaatacagaagtgaaaatcccccagaaaaaaaagctcatcatctaactaaaggttgtagcatcaacagtagaacatgggatcatttagctaacggttgttcttgtttacctaacggtgtaggaaagtctcaggtttgtttctttattccttagtaacccacaggatttgtctttgtagattcttttgatttcaatgtgtttatggataaacaaacttcttgagtattttttttattattattgtaaagcgttactgatcaaatcaaatgttttcttaaaatagttaaaaatattaagggatctcaaaataattgttaattatggagggaaaaaaaagaaacgtcttttaagaagcccatacctgcttcacgtatcacgatggaggcttactcagaccttccactgttgagaatttgaaatttcaatttgtttgattagacacaatgattaagatttttattacataaaaagaaaaaaaaaattggagaagtataaacacatacatagcggtgaaagaagaaacccaacggtcactcaaaagcgcattgaagagtcaagcaagacttggatctgtctctttcgtttctctatctctgtttcggattcctaagagaaatggtggaatcggagctaagctatgaacagattcgtttgaatagggtggaagagaacaagaagagaatgggggagcttaatctcaacaagcttgctcaatctcttcgtgtctcttcttcttcttcttcttcttccaagccctcaccagtaacgtttcctttctcttctcttctcatttcttcttttctttttctgaaattaaccaattttttttatggaaatgtaggcaaagccaagaacgatgcgtattccagtggatttctcggaggtcaggagatcaagccgtgccaaaggtccacctccaagttataaagaggtcttttactaccatttatctttacttgagtttccttaaggatttcttaaggattttgtatgagatatgaaatttgtgggtttgatctttttgtgcaatttttcttagttataatttgcgtgagttgtttctcttttttttgaataaaaacgtgagttgtttctcattactcattatcagagttatctgatccttactcgcagtttgggctagaaccactggagaggaggccaagaaggttgaccaatccacactctctatgaatacattacttctcttacactatttgatgtttgttttcacttttcagtataagttatgtgttttgctttgcaggagctctcgaagaagagatttgctgaatcgggtatatgcttcggacgacgcaagaatgtacgcattcgacagggcagagaagctccagtcaagcttagattcagaatatgcaagctttaccaaaccaatgctccaatcacacgtgaccggaggattttggttggtaagtgaacaacttgaacattcaaagatgtctgaaactcagccatagtagtatgtaaaagtccactgatgtcatatgttttcgtaaccagggtttgccgcttcctttttgcaaggcacatatgccaaaacgtgatgtaataatgactttggttgacgaagaagaggaggaatctcaggcgaaataccttgctcagaagaacggtcttagtggaggctggcgaggtttcgccattgatcaccagttagtcgatggagatgctgtagtgtttcaccttatcgctcgaacaacgttcaaggtaaaggagttttacttagagatcttgaaatacaccctggtagagagactttggcattgatgttgaaacatattgcttgttccaggtgtatatcattagggtaaatgatgatgcaaacaatgattcagatgggaatgaggtaaatgatgatgattcagatgggaatgaagaagatcgagataatgataatgaatcaaacgagaaacagaaggaaactgtttcagaaggtagacagttgagaagcagtggtaagaggaaaagacgaggtaataatgtttcaaatctatttacctcttgactcttgtaataatatctgttcgataagataaaactaaatttgttgattgatgtgtgcaggaagaaagtagagtttgaaggtttaaatgggacttctagttctatggaaggagtgggaagatgaactaaaacttaacataacagctttttgcgagttttttggctgaacagtgaagttgtgcaatgaggggattgtttttgtgtcttgttatggagacaaacatggaacgttacggctaaatattttgattttggtaactacgattatttcatgatattttatgatttggataagggaaagagaaacaaactttaagaaaaaggttgaaagagaagtcccaccaaaccaaaaaataaatcgtaatcacacaaaaaccaaaaaactttataaccgaactaaaccaaactaaaccagataactaaatggccacctacagatttgtgtagtggaatttaagccattaaaaataaacagttttaaaattatgttgataaaccctggcttgatataataagataagggattgaagacataattcgttgagaattgacgcatttaccccttaatttatgatgtgatcaactaactaattagagcccaattaggattgagaaccggtttttgagtaaccggtacaataatagatccggttaaggaagaaagaatagaaagagacggcacttattcctccacacggtaaagcaaaagcccgtaggacgaagacgacgacgacgaaagtctactcaacttttttgcttccttctgattctctctctctccgcaatccaatcacgagaaaccttcacgtcaccatcccttagaaaaaccctaaaatctcatcaaatcccaaaatcagggtcttcgactagagattctctaatcccgcaggggaagggaacaacaaacaaacaagatggtgtttccgtggaacattgctaaatcagcggaggaagctttttctagatgggcggtgaagagggttgtcaaattcctgttgaagaagaaattgggtaaactcatacttggtgatatcgaccttgatcagctcgatattcagcttcgtgatggcactattcagctctccgatcttgctatcaacgttgactatttgaatgacaaggttcttccttcccttcctgattcttcttcttcttcttctttttatttcaaatgatgctatggaatcctggaattttgggcaagtatgttagtgtttggctctggactagaagtttaggcatgttgaggttttatgttagggatggtgaaactgtgtttaaaattctctatcagctttatccacggagctctagttcattggtagtggtctagctctagttcatccaagagtactattatgagcagttttgaacgaatatatagagttgaaatctgtataggtttgtgattgatgatttttgaattctcgccaaggtcgttgaatttagaggttcatctatgaagtgaaagctttgaaattatggtttcaaaatcaagtttttcatagttcatagtttgctaaatgctttggtttcgatgtttttaatgtgcccagtttgattttcttatcaatttgttaagaagaagtagaataagcgaattctgacagtcccatctcctatattatttttctactttgaatccagtttgatgctccactcgtcataaaagaaggctcaattggatctttgttagttaaaatgccttggaagaccaatggttgtcaagttgaggttgacgagctggagcttgttcttgcaccacgtttggagagtaataaatcatcttcaaatgaagccagcacctccgcctctacacgagaagatttacataatatacgtcttgaaataggaaagcatgagaatgagatgttgatgaatgctgcaaaatctgcgtctatcgatgtccatgaaggtgttaagacggttgccaagatagtgaaatggtttcttactagttttcacgtcaaaattaagaatctgattatagcatttgatcccgattttggcaaaaaacagtctgaagctggtcctcgaccaacattggtacttagaatgacagaaatagagtgtggaatttcagaggagcaagtttcggctaatgaagtttctcctgataatttccttggtattaatcgacttgcaaactgtgtgaagtttcaaggagccgttgtagagcttttaaatatggatgatgatgatgatggcgacaaaacttgtgataaaaagacatcaaatgatgtgactttgatcatgacaggcgtaggaggtggcttttcagggagtttaaattttagtataccctggaagaatggttctttagacattcgcaaggtggatgctgatatttctattgatcctgttgaagtacgatttcaaccgtctacaattagatggttcttacaattgtggaagacgttcacaagttttggatcagactgtttcccctcagtttctcattctgattttttgacggattcacctacaatacctactaatgtaatggtaacgcctccagctacactatccttgtcaggtggccaagaattggagcatgatactacacctaacttacagtttataccggattggtttccgtcttcgttcagcaagaaagaagaggatggagaagtagatattggggcaaggtataaaggatgtctctagcatagatattgtttttttgcttgacttgttttttcatctttcatcacaatctggatatgaatttacctatagtttttaacttaattctcttatctgtgttctcttcttgtttcctacagtgtggaccagttttttgaatgttttgatgcaatgaggagttaccaatcagcttctggaagccaaggaatgtggaattggacatcttctgttttcacagcaataaatgctgcatctagccttgcttcggggtctttgcttcttccttctggtaagaatactttcttgaattgtgtttaaatgtgtgcaatgagcatattggtatgtgttataaccaaatatatgtacggtttcttataccggtgttaatcctgatatgtaatcttaggttatgtcttgttctctctattcttttattgctaccctatacaccatcaagctttgtacttaaatcaatccattagctagtaatgccaagtagtttaagttgttatagtaacaaattatctgaacaattctcatcaatatgcagaacaacaacatgttgaaacaagttgtaaagtatcctttgctggagtttcggtggtattatttttccaagatgaagtcaattggaagggtgtttcaacgcggattcactacttgggtgccgaactcagagatatttcggtctcttttcaggtaattaccttgatgaattgtgtttccttcccctcactagtatctgtgctcgagtttcttacaatattcaataaggtcaacaggtatgccttcatgatctgaggttagaaggagaagtgaacagcatggagatcgccgattattgtcaaggtggaaatgttgttgacactgctaatgctgaatctcagacttgtttgattaaggatttacaagccaaagttcagactagtcttcctccctttgcctcttctgatatgcattctgactctgaaagattaagcgagatagtttctgatggattcctctttcgtaacaagggtttcgcagtcaagacattgttggttatagctgcagggggcagtggatttcagtttactgtcaatttccaatcatccaaagccagccatagaggatcaaactcattctcattgagtttaccccctaccacattctggctgaaccttcattcggtagaaatgttggtaaatcttttcaacgatgtatcagaatctatccccataaccagtcatgaaaggaatcaggtggcatcctcttctaaatcagaaagtttgcgaggtagtgtgtcaatctgcaatgctcgagtgattctgtggtttccttttgagagcatttcagaaaggttctgcaactcgcttggtcagcaatttatcgtcgtcgatctatcttcctctccgccatctgataaggaaagggctaaggaaagaagtccaggagaaatgcactttccatcagctactcgctctatatgcttcagtgttggtgatgctagcatctatttggtcacttctgaccttaaagattctgaaacaaattcatatcataggcaggttgaattctctgcgtataatattttacataccaacaataaaactaggcaccaactttcaacaattggcatgttttggcaagatagacctaccgttagcccttggttagtggagagagctaagatgttggctacgcaggaagaatctattcagacagataaatctggcgggaggggccttgagtttgctgctgttgctacgcccaaagatcaagacgacatctactctcgaagcaggaaagaaataattttggcttcttcgttctgcctttatgttcatttgcttccacttgctatccatttagatagttggcaatacagcaaattatgtaatctaatagaagaggcaaaaaattggctatcgcgtatggcagccaatacagctgagcaaacagaggaatctgttgtgtgtcaaacgtctctcgttgttgactgtgattctattgacatattggttaggccagaacctcgaatgggcataaaaaaacagcttcagactgagctccctggatcatggattcagttcaacctgagggttcagaaattaaatcttatgtctgtcccaaatcttggcagtgtctctggtgctgatttcttttggttagcccatggggaaggtacattattgggttctgttacaggtctacctgatcaggaactgttattactctcatgtaacaactctgccatcaagcgtggtaatggaggaggttcaaatgcgttgtcgtcaaggttcgctggcttagattttctgcacttacaggaaccaggaatttgtaacgattatttagcagtatctgccaggggctgtacgatctcggccgtaggaggacgcctggattggatagaagtggctacttcttttttctcttttgaagatgaaaaaaaaactcaagagatcaactccagctcatctagcggctcctcgtttattctgaattttgttgatgttggtctaagctatgagccccaccatgagaatacagatcatttacgtcaagcaagtgatccatgggttgcctgtctggtagctgcatcttcttttagcctttcaaagaaaagtctggttgattccataagaaatgattatagaatcaggattcaagatcttgggcttcttctgtccgtggattttgaccttagcaagcttggtggaacgtacagttcagagcatcttcatgagtctggctatgttaaagttgctaatgattcgcttattgaagcaattctaaggactaactctgaaaatggccttctttgggagttagagtgttcaaaatctcacttagtaattgaaacttgcagtgacacgacttctggtttgattcgcttggccacccagctccaacagttacttgctcctgatttggaggaatcagctgtgcacttgcagactcgatgggacagcattcaacaggcaaatgctaggaatgatttagatatcagcgatagactcagtagctccgattcaagtggagaaatgaaatatttaagattagagtcagaaaatgaaactggggtcattggtttgatggacgaaataaatgaagatgcattccaatttgatgtcaatccgacatatcagtctgactctgtggaatgtcagaataactatatgtcacctcatggaatctctcatgggcaggcatataattgggtaccagctactgagaaactaccttctaatcaaagtatttgtgggtcgtcatccagaataaactcagaaagcagtcaagtattcctagaaagagagagcctgcctgaaatatttgaaaactattgtttgtctgagttccgtccatcgtcagaggtacctcaagaaggggattcgtcggggagagaattgtttcctgagactgatctgaggagaggaaattctgggtggtatgatgacgcgtccttaagaattgtagaagaccatgtgtcagaagcaactgaggaagatcatgaggaacacattctggatggagaatgttcatcttttggccagacgtcttattctgctgtagcagctaatggacgtatccttctgaaaaacattgacctcaaatggagaatttactctggctctgactggcatgattctagaaagaaaggtgaaaattttaaacatacaaagggccgggatacaacttcgtgccttgagctggaattatctggggtgcagttcctgtatgaaacctttccaattggcgaaatatgtacctctaaattatctctcatggtccaagatttttatctttatgatagaagcgacaatgcaccttggacattggtaattgaggtttttcactcttatcatcataagatagattatactagaagtaacctgggtaaataaattaacttgttcccttgaatgataggtccttggatattacaactcaaaagatcacccaagagactcctcttcgtatgcattcaagttggaattaaaagctgtcagacctgaccctgagacgccactcgaggaaaaccggtatgctatctataatatttacagtgctatacttaccttttttcgtatatctaagaatgaataccacaattattattccaataaacagtggcctagttgtatgcacaatagaattatcaacaaatttttgtttactttagtatattcatttgatcccaacaactctatcaaacattttccgtgttattttcgttatatttatacattagtaacactcttaaatttaatgcctatcaaagaaaaagacaattgcgttaatactaaataattgaggtcatttttccatggaggtggtaatattcatgtagaatagtttccacaagagtccccttatttggcaaactgtaaggctaaattaaattacggatgtattcttagtctttctgtcatttataatttcttttcctttgatagattttggtgtttcattataacttaaatggaccttctgctaattgcgtaaatatatatgtataaccgttctttcttttcctcatgaactgcttcctcccaggttacgggtcgctttactccctatactgttacatcttcatcaaagtcagctggattttctcatcagcttctttggagctaacagcctagaaaagcctgttgtttctatgggagactcaggtggttcaacgatgtcggtttccgtacaaggacataatatcatagaagaagcgcttcttccatattttcaggtgaataaagcttctttctatctataagctagtatgatggcagatgagaagcattcacgtgttacccaccgaggacgtgtataattatgtataatgatagggcgagtctctatcctcagattaatgtgatactaatatgttgattggcataagaaaatgttctgatatatatatgatgtcactcagctgaaattatgaacctcggtgtttgtaattcgaagtttgaggaaggtctgactaattaaattcattttgcagaaattcgacatatggcctgttaatgttcgagttgattacagtccccatcatgttgatatagcagcactaacaggagggaaatatgcagagcttgtgaaccttgtaccctggaaggtaagaaacaaaactttccaacctgcgtcttcaagattatttcagcataatttgctcatcacagaagaacaaatgcaggggattgaattacaactcaaacatgtgcatgctgctggaatctatggctggggaaatgtatgtgagactatactgggagaatggttggaagatgtatctcagaatcaggtttgtttcacatagcctgctgtcttgtgcacattaataatcatccgtttgatgggtttactgacaagctttttaatgttctgtaactgcagattcatcaacttttaaaggggatcccaacagtaagatcactttctgctctttatgctgctgctctaaagctggtctcgtcacctgttgaaagttacaggaaagatcgaaggctagtgaagggagtccaaagaggtaagacttgaaaacccgaagtactgaatgctcaattttcactattattttcctttttatttatctctgctatcagaaactaagctacttatagtgcactgagaaggcattgttcgttatcatatattatattagaactgttgaagccacttgcaaaactgaagctgtatataaaaatttcttctggtgttaatatatattttctagaccatcattcctctagaacaagggttaatgatgatagctggtggccctctgaccatgattaggaaactcttataaataagatttctaatatatttgatactggaattgcctctcttaagtaagatgcataaaatttgctactgtggccaaattattacatatccaccatgtcagatcacgatcatgttcctgatactatccattcataaagaaatatgtttagcagcatgtacttggtccatctaggagtttatagtttgtattattctatagtacgcattacggagctgtaactgttttcagggactgtagcgtttctcagaagtatctcactggaagctgttggactcggtgttcacttggcagccggggctcatgatattttattgagagcagaatatatatttgcaagttcaccatcattgccacaaccccaaggcagaacgaagacgaatgtcagacataatcagcctagaaatgctaagcaaggcatgcttaaggtgagtgtaaaggcaatacatgtcctgcatttctgctcctggatcagatattttacattgctgaggttttataggcatgtgagagcatcggtgatggaataggaaagacagcttctgcattagtccgcacacctttgaagaagtatcaacgtggagacggagctggatcagcatttgcaactgttgttcagggagttccaacagctgctatagcacctgcttcagcttgtgctagagctgtacatagtgctcttgttggcatcagaaataggtcggttcatattaaatattttggaaatacggctggaaatatctgttatttgcaaagtattaaagactcatgtagattatttctcctttcagtcttgatcctgaacataaaaaggaatccatggaaaaatacttaggccccgacaaacaaaggaagcaggaccaacaccgataaactcaggtaaattcatggtcagtctaaaactcttacatcttcacagattgaatattgcaattgccgatattcatctagcagtttgagaaactaaacctgactttaaccatttactgtgctgtgttgtaatctgtttgctacagattatccatgttggtgtgacttcccttttacatatagcatgtaagtctactaaacttattgaaatctaaggtttaccggttaggcggtttctcaattcctataaacagcttgctcttgatatggattttggtgcccaatctgtttctagagcttattgtttcaacatgtttcatgttcttgcaggtgtataggtttgaatagagtaaaagtgcagaaccattcttttaaccatcgaaaagccaaagagatgggaaaatttttggtatagaatataaatcttttaaacattatagaatcattcagtttgtttgtttctgtacataaacattttcgatcttgctccattgtaaatttaccccaccaagtttgccaaatgagtgaaagtgtacagtttttttcttctgtttatagttgttcaaaataaactttattttctatttcgtatatctctgttttcattatgttaaaaatcattaaaataatttaaaatcgactgtgacttgactactcaggcgtctgaaggattatgtaagaaacgtggtcaaacatagttccctaaaaaatcatgttagtaaaatattgttatatttctattttatttttattttctggcgtcaaatagtagttagcttttataatttgctgtggcgtaaattttgtcggaaatatgatctttcatcttgtattaagttcattaataatcaaagaagttggatagaattcttctttataaggactatctgagactatccatccgattaatcagtccgcgaccatgttaattgccacagaactaggacataatgcttctgataattaatcagttacgtgttaaccagagaatatagaatactgaaccagttgcattcaagtggtttttctacaatagagggagatatggctaacgatgattataggtcataaaaaaactacataaaaattagagagaactcaaagaaagacaggaaaaataagaacaataaaaaatcgaaaataatttttattagcattacatatcttgttcgccgtagttagctgactttttccggagtcgatctttcagtcatcagattccagtatacttgcaagacaattctgcaaaaagcaaaaatatacatataagattatatagaactacacaattaagttagacacaatatgtgtttaatcaaataataaataattatgttacctgagatttgtgtggaagatggaagttgttggaatggattttcttggacttgttgagacctaatttccaccagttacgagatccctttgatgagatggtacggtcagaatcttgagcacttaattcatctctaagtgtcgtcactttcctctgagtagtcttctcaagtggcaacaaaactccaccaaagaagatctcatcagccgcagaagtgaaaccgaagttttcgacattgaatttgaaatccgaagaaacaggagcttccttgtacttcatctgaccatctgctcttgatgccgtatgtttactatcactgtctgcaaaatcattggagaacgagattcttgcgtctacgaaggatggatacaatgaggattgttctacagcattagccatctctctctctctacactgaacactttagttcagtaagtttgcttcttcttttgtgctagtcttaaaattgtgattttcatgcatcaacatcctttgcattttatagatatgagactggtaaggcatccatgtggacttcatcttttttaattctttcttctattcatcttatttttgtttatttttaagtccgatttattttatatttctatatacaatactgagtaaaaccgattcaatgaactcaactttatttaattttatagttttgacttaatcttcgtggataaaataagcataagtattgattgaagcattaatgcgccgtaaatatggcttaagtaaaggtgataactccaaatttggattatagttctcaaaatatttatttatattaccaacaaaaaaataacatcaattaaagtttcatttgatatttttcatcgaccgaattaatcaatatttacacttattttaaaatttagtatatacttgtccgcagtataactatctataacgcaatacaaacttaaaaccaatatcaactatctttaatccaatatttgtatatgtttggataaaacttcagtttcttggaacagttgagtaagaagtagatgttttgaagaattttgaagaggtaagcgccactaaaccaaactttcacttggtaatttagttatattttgtactcattttgggtaatgggtatgttatacagtttttttcttttttgtaggacatttattttcagtgcattacatttgatgatttagtttgcactgatatcaagagtcaagacaatggattcataagggtgaacaaaaaaaatggcatcattatatattataatctttaaatggtttcgaattcaatgtgtattgaaagcataacatagatagatctgtttgttcataaatgaatagatcagatgcattgcattgcattttcatgaacttttctgttgtctcgcttagatttacgtgtggcactttatttaccgacataagtccaccttgtccgcatcgtttccctattcttataaataagcactaacttttatataccgctaattgttaaggcacttgtttatttagtaaaagaaacatttgcatttggtctttcataactcataacataaaatttcgcctaactatccgctacttcacgatctcggcaatattgtgcactcgcaagtgtgaacatatttttctaattcctctctctctctctctctctctctaaaataattctatcaaatttataattctaaatgtaagagccagtgaagaactaaaagaacacaaaaacgtgaaacaagaaaatattgtaatcatattcatctaagataatcagactaagcagtaagcacatagggttaagaaattttttaatcatgcatacattgttatagacaaacagaagaagcaaacgagcagacaaaagactgtagcaccaaaagagccatgtgaagctgagctgtaaatgttcagctgatcaaaagccccaaaacagaaaacaattataaaaaataaaaacataaaattataaaatctatctttctggattcagattttagggtttgactaaaactctgctaacgtttgtcttcttgtggtactctaactcacgtgcttcacttctagtcctaatggaattttcccacgtttctccaactagggttttgacgcgtggtacttttatacttctacgtaagtggacataaaagttgtgtacaaaacaatattttcggaatgtgcaaaaaacatatgtttcttgagtgcaattgcattttttttttcttaggttcagatcctgaaagtttttcagatcgagtttctctagtgaatacgtgtttagttcccatttttttacgagaagaggtaatgttaccaatcaaatacattataacaccttacagtttttttatatattaaagaagcaaggagctaaaactagagtaggatttacatttttaaaaaagttgtaaagcataagggaatctagacatatagataatatcagaggacttttgtggtggataagtaagttgtatctaagttttattttggctgtcttcttgtccccaattttctctacatcttctgtcttcttcctcttacttaactctctctttcatttttgttatttatttaacaataaattaccttttcacctcactaatctgatttcttaacacttaagtcctccaccagcaaaaaagacaaactaacacgtccaattattgttgcatttttacttttatctttaaataattctacactaatttcaggatcctgcaaaaacgatagaagaatgaccactaaactaacatcatgttagttatttctacatttgaggaagaaagacaaatatttatgatggatttttaacgatctggttcggtcagactatgccaaagatgggtattttaaggaccatataaaataggccatatgacttttcaaagttttggcttcactggtcttatcatatgatcatgcatacatacatattgacagttgccaaaatattagacaaaaatgaacatatatgatcgtccgatcttacgaacgcatctcctttatggtccagatttatagattcacttttcttttgtggtcttaagatcaaactcgtccaaaccaataataaacatgcatgcttttgatcttctaaacatccctaagtcgagttcataatacaccatatcatgtgatcatgtgaagcaaaatactaccaaatgtgcataaaattagcataaaatgtctcaaggttcaaaaactttaatctcatacaaaatcatcatcgtgatttacagaaactagatttggtctttgcaaagacattttaatctgagcatcatcaatgttactattaccatgtaaacgcttataagtagacaacttcactctttttgtggtctcgttgagagataacggctgcagcggttcccgaggtctttgttgtggtttgttaaaggcacgcttatttacaggttggttccgattgtgctcttcggactccaccgtttttggactgacatttgattcgatgggaacgagcttcccatctacctggtttgtgaaaacaaacgtcacctgcaatgtttttaataaaccatgaaaatagttatcataaagttattggcttttcgaaaaatctgacataagatgtagagtttatgattataagattgaaaaaacttggagacaactcacctcgtcacctgctgaagcttgcagtatagcatctggaacggattttgaggtaaagtgatgaccccagcttcctagatcttcttccaatggagtgcccacctaagaatattcatgggaaaaaaactttgtagatgaatcggatgtaaaaagacatgagcagagtttgtaactaacaatggaattgatgaagaaatagctcaaaacagacttatatttaatgcaggactcagtaacaagcacaagaagggacctgtctctcagagttttttaacaagttaaagcatcctgcatcttttgcaaatccgcctatgtcttcttggtcaatctggcaagcattgtcatctacattgttctcattcccttcttcgatattctcagtaccagaggcatcattttggcacctgctgcagctcatcttttcatggatttcagacctagccacattaccagaaaagaggctttgagataaaccatttgaatgtgtatcatcttgaggtacaaaatctgtccccaaaagtggatagagaaacgatgttctgagtgggcataaaacattccctgatttcagaagaaacacatacctaacatccccatggaaggaaaataaatctcgtagatcctctgtagaaagtaagttcccctggaaaatcaaagatgttgtggttgatattcaataattagacacaaaatgactaatagatgaagcatataacattccagcaagaacctgtctcgtgctgttatccgtctgttcatgctgaataactttttgaagcccttcttttgacatctggcgctggtaaacctaccaatgtaccacaagaaaacaaatatgaatctgaggtaagcaaactcccccaaggaaacttgagtaacaagttcggctagttatgcagtaccttttcttcaatagttccagtactaagaaacctgtagacatatactcttttcttttgcccatccctccaaactctagcagcagcctgttttgacagcgaaataatgcatgtacagcacaatcgatcatcttttatcaatataaagttgaaacatatctaaggggaaattaggatggtaattacttgtttatcattggcaggattccaatcaggatcgaacaaaacaagtcgattagcaccaattaaatttaatccacagccacccgccttgctgcttaagagaaatgcaaactcatcctaccaaaaccaaaagtcaaaccaggtgtctactcaggttcgaaacaacggcataaatagataagtcatgtacctttgttgggtcgttcaaccggttaacaagcttctgcctcttgctgattgttgttgatccatccagcctcagaaaaggatatcttctttcacgacagagttgagcaaaaagatccaatgtctagtgcaaaaggtgcaggctatgattattgtatactcaggctggttttaaattgctatatatatgcaacacaccatcatgtcattttatgcaatcaaacaacatgcagagttcacttcttgatatttgttagaaagcgttgccttttgaatacatatagacaaatcagggtaacgattttcttagcttctccgatatcacatgcaaaagttccaaaaatatgatggctcataaaactcaggacagcataacacatagcttatgactaattcaaaattcaaaagagattgcaacatccataattgaaatttaggacagtagtaacatcactaatgacgaccagcagctgaatctattcaaaatccatgtggaggcatttcatacttcattctctatgaccaatattatgcactgtccctttcaaataaatataaaagtaactttatatccaactcgaattgacattttccagcatacctgtgtgtagtttgatacaaggactatgcggtcatcagtttttcgacgtaggttggccaaaagtctggagagaacatgcattttcccagagagctcgacccaggcaccatcaccccctgtccatgctccagatctgaaaggatagttccatttagatcccaactagtgacaacatgcaaacatgcaatagaagcctacctcccagagaacatttctgcagggaagaactctaagcaattctcaaacccaacagttccaggattgccgctttttattgtgtcgtagattagctacacagaaaagaatagggctatcattaagcatacatggggaatgatgaaaaaggttttgacgatcaaatagatcaaagaccactaaaatttatgaaactagcgtcttaatatcagaacttgataatagcgccgtaagatgttacaaagatgactcagaagaaaatattggaaaaacttaaacgcaaatggatgaggctatgagttttacctttggatgattgcagagcttcttaagagctgttatataagccaaaactttggtttgttttgcattatcagcaagcgcccttttaagctgcatgcagaggcacccattatatgtagttctaacttcaatattttacgaaacataacaagaatgactgtgatcaatgcttacatttttcgagctaataaaatggttgtacaaagtggactggagagtagtcatcttgcaacaaactacttcaattatctgtgaaacatccaacaacaagattttgatgtatttctggcttcaaaataaagaaagcggcaacgggaaaaacttgtagctaaaaaaagagatgacactttcacaaagatgttcattctatccgcactttcagcatatgattatatcactgctaaaactccaggtattactcaatatgacgaaacagttcaacatataaagaagtagtaaaggctctactgaaacagaattttaatgcattgtaagcctgcggcagatacagaaggaaaagcaccttaggtggtaggtgatttgagagcaatgcattggttctcctcaaaataaactgtaaaaaaatgaaagcttaataaggtatagcagttaaattaagcaacaattctaaaaggtcagtagcgatgctctttattgatcatcataccaaaatcatctaagcaaattgcatatcttttaagagatatatccagatgatgatgaaagcttaataatagtcaaatatttagatataaaatgctaagaagaatcacctggttgacttttgaactcagttctgcggagcggtcagcagctaagtttttctcttcctcagtggctgtaggttctcttccacatataataggtgccttaggtttcatacatcaaaacaaggatgcatcaaaagaaggtaatgcaagaaacataaacaacctatagtcaattgaactgaaattgtatgacacagataacagcgtaaacaaattctctcagcacagactatttttaaagaagcttacaatgtaatggaatccaaaggcatgaagcagcaatactggaaacgaacagaatatatatagtagcaaagtatacactacaaaataacttgggctaatcctaacttttagccaagaatagcctagaagaaatgatctttaacatatttagagatgacagaatagcctacaagaatttatctttaacatatttatagatgacagaatacagaatgatcaaattggcatcaaaattcaaagtttgtcacctcataataatggcgaaagtgtgcagcatcacctaaactccctggatttgtgaagttgaccatggcaaaaaactcttccaagtcattctggaacattcagatgcaaaaaaacatagagtgaaagcttagtgttaaatgtcaggagaaatttaatagagataatcactggaattttccattacctgcatgggagttccagacaacaaaactcgacgtttgcatgtcaatgaagccaaagcctgtagtcaaatatgatgataaccaatattagaaagaaaaaaaatgtatcaacctggaaggatacgaaataagtatgtatttgcatcctaccctgtttgtaagtgtctggtcatttttcaacctatgagcctcatcgcatattagaagatcacaggattcactctggcagaacttggatgagtgcattcggaatgtctcgtaagaaatgataagtacctgttaacgttagttaggtgataagtgcaattctcagagagtcagcaaaaaaatatgcacagctatacctgcaaagcgcttcttggtcgagtgaaactatctattccagacaaaacatcatctctggtgctctcacagagggctataagctgaatcctgtctccaacccatttcttaatttcagcttcccagttactgacaagactcgttggtgtaacaataatggcctttttaaccataggcgtcccatcaaatccttgacaaagaagtgtgtatagtaaagtaatggactgtaatgtcttccctaaactgccaaatcaatttagaaggaaataagaaaattacataggaaacaaaaaaagtccagatccaattttacataacggacaagatagattttaccccatgtcatcagccagaatgcaaccatttatatttgccgaaccatgtaatcctgaaacacaatcgaacatgaactggacaccctctctgcagtctcagaaaaaccacctcaccatgtaagtaaagttgtataaacatcttcgatgccaactagagataattttatactcattggcctgttgtattcaccagcagttcactgagggttatatgattttaaacgaagagcacattttgacgtggttcaacaagtaaactatgaatgccttaagaatttttaagatcacagcacagattggaatcaagttttgagatccttaaaaaaaactctgtacacgatgtcaattcttagatagaaatgaatacctttgatgagggcgaagaaatttgacaagcactgaatgcaccatgatagttgttacattgctcattccatcttcttcagattgccacaataccaaaggttcaatatcaggtggtagacaaacaacttcctcttcttcatctctctcaatattggttgatgcttccagcttagtaggtaaagcaaccacaaccggagttgaggaaccccaaggaacaaaccgttttcgagctgaaaggcgacgagaaagttgtcctgtggaatcataaccatgagaacacggaggtttgaaaggcttcctacaaactgccgctccatctgacaccgaaagcacccgaggaaggagtggctgccgttgcacaactagattgcccctgtcaaccgtgcataagtatcaattccatttccataaaacaatggaatacgcgtttgatacagcttcagagactattcacaatcatcaatttgaacaagagaacactaaatctcctttaaaatccctaaattcgaaccactaaaactccaaatgatatgtagcagcaagcgaacgaagcatctatcaggtttagggttcagcttcaatttcaaattgaaatctaggaaattcaattacgcacctcagaagatcctttacgttcttagatttccgatctgcgtcggatgaaagagaaaccaccgcaaggtcttcgcactcagggttatcgttttctccttcagaatcttgagaatcatccttgtaactatcgctggaatcgtcgcaatcggaagacgataagatctcttcatcttcttcctccattttcgttacacctacgagcccagagctccgcttttgaccaatcctaaaactcttttggcggcaagaaataaaaccaaaaacaaaaacaaagaaaaaccaaattatttgaaataaaataaccttatcagaaaaggactaaaatatccttcagagtatatgggacgctacaatttttcctaacagttagtttcatgaagattgtaaatttgtaattttccccaagtttttaagtatttacacacaaaaacaaaaatatccgaatttttttaattcgtcgaggttgattacttcacccaatttcatggccgcacctgcaaacttctcgtctcaatgttccgattataccctaattgctctctgccttctcacagacctctcgttttccttcctcgtcttccttctcgctccctccgttgccgcgccgccgctgatattccccttggtgacggaatccgattacctcgagaagcggattcaacctctgacacggcgaggtctcgggatgtttccgtcgccgccggtgggaatggtgaaggtgctaagtggaggaagaggaggttgctctggtcgaaaagtggagagagttacttggtagatgatggcgacgcgcttcctcttcctatgacttatcctgatacatcccctgtgtcgccggatgtgattgaccggaggttgcaatgtgatcctgtagtcgaggttttttgctttgcttcaactttcatttactaattttgatgattgaataagactcaacatacttgcacttaatttagatgaacattttaattgctttagctgacgattggctgtttgatttgctctatagtttaatcttcgaaccaatcaatatgcacaaatatatgagttgatcttgtagcttgacgaatgacattaagtttaattggtctttcttatggagcgataagcttagattctggaaggtgaatgatgtttctgaaatgtgaaactcaacaatggacttattttataaaagcatgtgtgtcaaaaacatgaaaaatatagatgcaagctcttgtcgatataagataggaattaaattttgacatgaattatcctttttcggaaagatttgctccgagttactcttcaccccagttttgggtgtgtttaggcaatattttctttttgatgcagtatttgctttagaatgcctttttgggattgttttttctgatcacaatataacccgaccaatttttaggattgccgggaagtggtttatgaatggactggaaagtgtagaagttgccaaggatctggaactgtcagctattacaagaaaaggggtaaagaggttatatgcaaatgcataccctgccaagggataggtaagtttctgagtgtggctctttttccatgtttttcctatgatagttttaagattctagagtatctatgagttggtttcttgattggtatttgtgaaaaagtaaacaaagccacactttctgagttttgcagtttggtttagatttagtgttttacatgcaattgacttaagaagtttaaactaattgcaggatatgtgcagaagataacatctcggacggacattgaagtgatggaagatttggataatgaaccatcttgaccttgaatatggcccatttttgcatgtaagcttgggttcgttattgaagtgtatccgttgcacgtacaaaactataaccagaagagagataagtgcttctttgggatgtttggcccaaacaagctgatcggaggtatagacaaaaactactgattcttgctcagataatggcttcttctttcaccaatagtccccatataggcaatttctgttttatatgtatcagacctcgagacaccacgaactgcaggaattgtttgtgtttttaggctgtttcagtctgacttatgtacatcaagagaaaagatagctgtaacacgatccatttaattatctttgtgtgctttacctcttggttcaagttactctacgggttcaaaggtggttcgataacataaacagataaatacttaaattccatgatttggaaggatataatacggtcatctagaagaaactcacaaaagtagaagtgtcgttcccagatgcttccttgatcgaaccctttctccatgacatctgtgcacttcaattttcgaggccatgaaagatgaccgcgtagtttatagaatcggatttatcattaacgagcacttgaatcagctgttagcaacccgaaattggccggtattatttgtgcttggcatgttctcaggagacgccctacaacaagtaaggatattttttgacatcaaaatgcttatgaaaaatggtgtttctttttaaggtaccaacatggttatgattcttactggatagttaggccctttctctggaggagtacactaggaattgtacctttaagcttgttgttcttgatggacctgcagattaacaattaacatcaacaatgatgatgctagttatgatgatgttgcaatcgtgttacaggtcaaaactttagtttctcttataactatagtgaacacttttggtcaggctatcagattcgcatgtctaggcttgctgttaaatgcagagaggaggggaaagacaagtttacagtgtgcggagactagggagctttgcaagtgactcaggaattgctccagtgaactgattgtcctctaaatgtctgcctcatcccacaaaacaaaacggtaagtccaataatctaaatctcttgcacaacacttagaagtttggttgcaaaaaggcatacagagtttccaatctcgtcattggactcaaatctgggatcggtcctgtgagcttgttcttccccaaccatctgcaaatccggaagttgcagctgagtcttatttaacaaaaagaaaaaatctcagacaaaattttaggatgtgaagtccttacagatctttaagggcagtcatcttgtttatgcttggtggtagagacccagatagtccaagatttgtcaaatttctagcaagagaaccaggttcttggagatttagacttagtaattgacgacagctgcataaaaagcttcactagagtattgagttttgacttacagagaaatcactctggcgattttgtctttggagcaagttaggccagtccacgagttagcacgagggaggcatgggtcgccggaccaatccactggaggcttcatgatgctctctaacagatcttccatagcaattgctgcagaagagaatgtttttgttccagtggcttcagttattacaaaatagacaaaaacatgaagaagaaggaaacatttacagtaccatctttaatattagtggttccaccaagaggaagaatttgaaacacttctccggcgttaatgaaaggtccaaccggcgcatccttggccggagtcaatgtgatctgagtctgacccgataatggccactggccagagtaaaccataaccccattagtgctcacattgagcttccttaaaaaggaaagtccattgactgagacatcaaaagccctccagctcatggggcctggactccgattgtcctgaaaatacaaagctacatagtactttgtggccggaagaggaaaaggtggccattgaagctctagaggcttccctttacttgctgtgaaaccttccacaaaggcttcagcaggtggaatgttccagaagtttgacgggttaattctgcttcgagaagtcaccgtcagatgcttctggtccgaaaacggttgccataaacggttgtatttgtcatctggatagctaggtttccaacatgtaacataccatcaaaagtcaggcaagaaaaagtgcttttcagatcaccaaactatggaatcaaaaagggcacctgatgatctccccatctcctccaaagctgttcctggctatgaggctgagcttgtaggacccgaggtctgtggaattgtacattgtatcttcaagagattggacatctaaagacgatataaaaggagaggaagaaagggtatgtgcattcttggctagacaaacacttagtctgttcccaggaacaccaacaatgatctcgtaataagaactctgacccttggcgtaatcctctgacgtattcacgacgctccattttgtgcctccaatgatctgatcaaacacaggtgggttgtttttaccgtcaaagttaccgtagtagtaagtggttcgaataaggtacttggaggtctttgcgacagggaaattataacagtgttttcgcgatgacttgtcgggaaagtaacgtagtgtggagaggatcggaacgaggtctttttgcttaatggtcgtcgtatttcccacggaaatgaatccttcgtccggtgtgtattctatctcgttgaggtttgttgaagaagatgatccacaatttaagaagaaacctttcacatggaatgaaactcgacgttttagggtagtctataacaattgtaagcatggattcaagagtgtttttggaaattctgtaaatggattatcaagattcgatcgaaaatgtaaaaaaaaaaatcagaaaaataataaataagaatcgcaaaaacgaaatttacctcgaggaggagggagagcgtgagagatggagaagcataataagagaaagaagaacagagacattattgtgacgtattttgttgaagaaacagacaaagaagaagaagaagaagatcagattctttccattgtcgttaatggagatcatacaaagattgaaagtagagaaaatgtctgaaaaatgttaatttcttttttttgcaataaagttaagagttaatttaataagacatacaatatagaataagaaagcgcctgtagctcagtggatagagcgtctgtttcctaagcagaaggtcgtaggttcgacccctacctggcgcgtttttattttggccttatctattatttttcatgtaaccttttctctgtgtttcatactactttcaattatctcgattatcatctttttatacgtgaataatgcaaaaatatttgtattttcataggagagtttacaaccttttctctttgtattttcaaatgtatgaatttaaaaatattttaaatgtacaacctttgtaacaattaaatatataaagtgaaagattattgtgagttctaataagttttaacaatagtaaatggttttttttagaacgactctgtctgcaacagagtgactcggagtgaccaacgcgtcctaaaagcgttgcgtcatgttgaagcaaacccaactttattccgacgctaaccaacagattcacgaaaccctataaatacttagaaatccctaatcctcctctaaatccctaacttcttcccctacactctctcacacaattttctcgagaaattttccaatttcctttcgatttcgcccagaaatttcggtaactttcagattctgttcagaacgaagaaacttgttatttttggctacttctctccgattctgttcttcttgtagtagctgatcgcattccatgggtacttctcagagtcgtgaagatcgaatcagcgaatcggatacagaatccgattcagattactatgaagaagaagacgaggatcaatacgatgacgcgaagaagcaaggatcatcatctgtttctggtacaagaccgtctgattcttcttcttcttcaggaccaactgattcatcgtctctcgatattgagcagaagctaaaagccttgaagttgaaatacccatcttcttcttccgtaacacccaagatgaagaacgctgtgaagctttaccgccatatcgggggaaacacacccaaagcgaaatggatcgtttcggataagatgacatcatacaagtttgtgaaaacttcgtcagtggatggagaagatattgatgattatgatgattgtgaagaatcaggtgaaggaggtgagtctttttggtttctgggtgttggtactaaggttaaagctagggtttctacggatatgcagttgaaaatgtttggggatcaacgtagggttgactttgttagtaatggtgtttgggctttgaagttcttgacggatgaggattataggaagtttgttactaggtttcaggactatctgtttgagaatgtgtataagatcagggcaagtgaggagaatagagttaaagtgtatggtaaagatttcattgggtgggctaatcctgaggctgctgatgattctatgtgggaggatgctgaagctccacctgaggaagaggaaactcaggggaagaggaatacggatttgacggaagagtttgaagaggtggctaatggtggagtgcagagtttgactttgggagcgttggataattcgttcttggtgaatgattatggggttcaggtttataggaatatggagcgtggtattcatgggaaaggtgtgtgcgtgagatttgattctggaaactcaaagttcggatcagggtcaagccagacaacaccgaacaaggctcttttgatgagggcagagactaatatgatgctgatgagtccagctaaacaagggaaacctaactccactggtgttaagcagctcgatatagagtcagggaagattgttactgaatggaaatttgagaaagacgggactgaaatcacgatgagagacataacaaatgataccaaagggtcgcagctagatccatcagagtcaacgtttttgggattggatgacaataggctgtgtcaatgggacatgagggataggagaggtatagtgcagaacattgactctcccatcttggaatggactcaaggccatcagttctctagaggaacaaatttccagtgctttgcaactactggagatgggtcaatcgttgtgggatcacttgacggaaagataagactttactcaaagacctcaatgagaatggcaaaaacggcttttccagggctcggttcaccaattacacatgtggacgtttcttatgatgggaaatggatactgggcaccacagatacgtacttggttcttatttgcacccttttcacagacaaaaatggtctgacaaaaacaggctttagcggaagaatgggaaacaaaataccagcccctaggctgctgaagctaacaccactagattcacacttggcaggaaaagataataagtttcatggcggtcacttctcatgggtaagtttcacttcacacattattactgtcttcctaagattcttgattgtttataaaaccaaatctcattgtctttgttgtgtattgtttgcaggtaactgagagtggaaagcaagagagacacatagtagcaacagtggggaaattcagtgtgatatgggacttggagcgggtgaagaacagtgcacacgaatgctataggaaccaacaaggactcaagagctgttactgctacaagatcttgttgaaggatgagtcaattgttgagagccgattcatgcacgataacttctccttctccggtaacaaatcgccagaagcaccgcttgtggttgccacgcctttgaaagtcagctccatcagcctctctggaaaacgactttaaataaccagtttgtatcgtaaagctttcttttgtttttgtaatgaaatttgattgtagtgtttggctttttgtcatcgtgtgaaggtttgtgaatgagtgacattttgctttttactcaaatatgactactcaaattctcttcatgacttgattttattcttcaaatagacacattttgtgaacagctaatgttaaatctttaacctgaagtgaaaaaaacaaaataattgtctgatttgatgatatgaaccaatacaacatccaatatctgcttaatgcagacaagtctatgatctatcaaatatgatgataaaaagtctctattcctagctacagatacaacgtctgtatattgcctcggtcctgttgtcctctcgcataagctcaaaaaaccactgatacaaataggttgaggagcttacgtttggggacgaaggatctctttaaggagcaacgatctggatttgttaacattagtgaaccaacgacatatatgatccacaagaacctcgagttgatgggtgtggttaacatggctctttcgaagctgtttcacaaactccggaattgtatacacgtccctccccctctctaatccaaggcgaataagaagcttgtcgtttttaacccccgtgtgcaaacgggagacaagacggtcaatggtgtcaagatctttgttgagcgcaaaagtacccttggcagcaacatttagctgaaaaatgttagacaactccttcttcttgaaactgtgagggaggtagggagtgcacaagggacctgcaacaacaagaatggtgggaagtgcatgatatgcgataaatgccgcagaagcagcaaccacaacaacagcagttacaagacataaggcagaaccagctgtggcatgatggaggaggcggacccgtgacttagacttacgaatacgggtgtccagcttgtcagccagctgataaaagcataattgggtgtcttgaaagctgtgagattcaggagatgcgaaagggttttcaaacgtgtcaagcttaagaaaaacgtcgaatgctaagttacagaaggactcgtcaattgcggaatgggaatcacggggaaagatattgaagaggtctaagaggggtgtgtagaggtggcagcgagcactgtggacgttttggtaaagattcaagcaaaatcgggtggcgtcttcgctgtgttggaagtaagtagagacaagattggtaagtgtagtttgcttggcgtgtctaagactaagagcttcttgaacggattcgttgtttggtctgagctcttgagaaagaaacagctcgagattttcttgtgttgggtcaataacaagaagccgtgaacgtatgtcgtggtacgacggggtttgaaaagcatgagctaactcgtggctgaggttaaaagtggaggcaacacttccctctgtacaataaagtcaaagaagaactcagtcaggcattttgacaaacatgtggtgggcagtttttggagtaacgaaacgcgtacctggggaaggatggggaagatggtcgtcgccgagagagccctctggagaagctggcttgaaggtaaaacagtgcggcatcgaaaagctgaacttgattcatcaatggaaagctactgactcataacgttgactttaaatggtaatcaattgaaagacttaattattgtctttttcgtctagtcatattagtaaaaccaaaacaaggactcaaagtctcaaagagctgttactgctacaagatcttgttgaaggatgagtgtcatgagtcaattgttgagagccgattcatgcacaattactgttacaagatcttgtagtgtttggctttttgttaccgtgtgaatgtgttgaattaggccggggcacaagtactcgctactcggctcgtactcaccttgaaaattcaagttactcgtcataggcaagtcaagtaacaagtcggtttattttattacttgcaagtgcaagccaagtatcaagtatcataatttttttttgatacttgcctcgttacttgcctcgttttgatacttgtcccgttacttgcctcgttacttgcctcattttgatgtttgtccttttacttgctctgttactcgttatttgtacatgtgacttgtgggatcactaataattaggtctggatataaataaatttctattacttaccttgttaattgttgaacattgtatacttgttactaacatactaatgcttaaattattataatagatttaaaattttggtttggcctataaaagctaaaaatttaaaatttattgtaacaaaactcattgaccttaaatattatgtatgaaatagggttttttattccaaatattttaggttctaagtaaaagtatttaattttggcaagtaacaaggcgggtcaagtaacttgcaagtaatcaaaatttagacaagtacttgctagaccaagtagtcgttttaacaaggcaagtaacaagccaaaaatccaattacttggacaaggcaagtcgagtcacaagtacctccaaattggcaagtatttgacttgtgcccagccctatgttgaatgacatttggcttttactcaaaacatatacattttgtgaacagctatcaaaaaactgatttaattggaaaacaaaaaataaaactaatgaatataagcaaccactgaacagataaaattttcaagagtgagctccataacaaaaggctatggtgttgaaaaccatacaatgaggaattgcatttacagagagacttccaatattgttttatacatcaccgaacaacacaagaaacccagagtttctgttttttttttcttatatgtcaaagagaatatgcagtctaatgtcgaaatggactcagaccaatacaaaactgaaaaaaaatctataaccttttcttcttttttttgtttacctccaacgctagtcagtaaggtaatgaagctgaaaacaaattcttcagcagctaaatggtttggttggagaagtggaaacatgttccgtatcttacaagactaatcatcatcatcctctgaatctgccattcacaaaagaaccaaactatggttacacaaaaacttcaatagatcacattacatacccaacacaacatacaacaatgaagaagactataatagcttgtggctttgcaagtaagtaagaaagtcatttccccttaaagctagccagtttagcaatagagaaagatgacccggactcatatgaaagatataaacaagtcttaccggatcttatgtcttctccaacttttcctctgtttttaagtagtcttacaatcatggcacaaatgagataccaccaatatatgtggaaaacaagcagcattagtaacatagtgttgaaagaatagtacatcaatgtgccttcagctgatgtcatatccaaataatccaggagttcaatgcttcaacaaacaaaaatgtgaatctcagatcaaacattgacatcaagtaaaagacattaaaactaaatagagttcaaatatagtatgtctacctcgtggccctgatgatccaaaatgggaagtatatcaaccgtagcaatagccaggagacagcaaataatgcaaaacatacacttgctccaaattctttttcagagtacttgaaaattttagcagtttccataaagacatcacttgcatcatgaagggctaggatgattgctccaatccggaaaaaactgcagaagaaaacaaaacaattcccagtagtcttttaatctttctaggttgctctatagctcactaaacaacaaaacatcagtcaacagaatctttttaacaagaaaacaaatgcaaagaacttttttacagtaaaagctcttttagattgaattgatttgttaaacttagcaaatcctttcaaaatctaggtgctacttaagatatgaactgattaaatctaggtgctaattgattaactcttttcaacaaaggatgttctgatgcaaaatgatgaatcaaggtgtaattacctggttaagtaggagtagctaagcaggatgattgtaattacatggtgagacatcatgacagcaaaatcctttcttcttgtctcccatgcaagcaacgcagccacaccatacacataaaaaccgcactggcacatatagtaaagctttattgaaagcctacaaaaaaaaagaaaacaacattctaatgtatcacatgtcctgggtactatgccatgaaaatgaactctacgggcataattctaaaccaagaaactcaaggcagctagcaaaagtgaatactcacttcaactcttgattaggccaaccgtggaagtagagtttgatatctctagcccacggctcgtgataaatgacttgtagaacgaaaaagtcacaagcagcataatacaacaatttccacaaggactctttgcatttgacgatttttgcccgagtagcagcatcattcaatttaatcggagcagaaccagtactcaaaagccaaagagctatcctctgacaaagattaaaaacaaaatgagacaccaataaatcgacaagtaaccaacaaaactgttcctttgttaatgaaaggattaaatggtgattgaagaaattcaactgtcaacgcattatacatcatcaacaaggcgaatttaatactagagaggcaataaaagcttccgtcatgaattcgaagaaataatgacttacttgaaagacgtatctatcgaggacaagcctcaagaagaagaatccgaaagcgaaatagacagcaatctggaaatgccagacctccatcgacggttttacgacggggtctccgccgcgtgatgataccgattccatgattttcactgagaaatcatccgacagaagaatcaaaaatcttcctggagaagaagaaaccacctgttctccggaaaaaaaaattcaaacgccgagaatttggttgcgtaatcgatcggaatctatttggggaagagaagagattcggagcacgttctaattcctccggtgagcgacagatggaaattgcaaaaagccttgcgaaattgtaattgggatctcacagaccttctttctttttttctctttttgattgtttattatgtattttagtttcgtatcgacaacaaagaacaactcctcataattactagtattaattatttattattttttaaaaatacagtgtatatgaagaagtctctctctttcttcttttttttttttttttgctttttaattactctcattcacactagtattaattatttttattgtttaaaatacagtttattaaaaaaaaagcgaagataataggataacagtggaggtaaatgagagtaattataacactttggctgtaagataaggattccttaactttaaaccaaagcaggaggaggagcatgatgcccaagtataagcaatgatgatcatgttccccttaattaacttccagccttttgttaacattctaagtttatatttattttgtatgttaatctttatgttaacaacgcaagtggtatggctttttccgttgtttcaatatgtcttcctcattcaaagtcattgacaatgagggtttgtcccattcgaggatacttttctacgtcaatctatgtgttcttgatatttttccgaaaagtgttcttgatacatgtattcaaatatcatgttttgaaattaaatggcatctttaaatctaaaattatgtatctacgtgagtcgtgacagatgaatcatatcatatgcatgataataatctgtctactaaaatattaagcggtgtaatatgtaatctttctagttttctttatcaagattgatcccatccacggcattttataactcatgcttccaaacacttgactttcgatttgtcacgcttggactcatttatttctaaccatttatgatttctaacctttccaaccatgcatagacttttctttctaccacttcatacacattaatttgtctagtatctcgtcatctctagttacgtcgacaaataaattgtcatctgtagcttttcttcttactacaaaaatttcagaaccaagaaaacaaaatgggcttcttgaattatgtttaagcccaatgtatatttttaatccacccatttattgagcgatacttctagtactaggatatgtgaatatgtaatacaatagtcttgggccgtcgggcgtaagcccaagagcccaatctgagagaacctaaccaatgataattgataagggataattagtagtcatcatcaaatatctgaatcatcaaagtggctgactaatttttgagtgagcaggatattatgtgtttagtcttatctatgtctcttcaaaatactcagctaccaaactaattacttgtcaattccttacttgtatataaaatcttatatgtggattaaaaattcacataccatagccacacacactcaacgggacaacaactactaaatttccgacacaaaaaaaaaatggattgaaacagataaactacatcacgtaaatatataaagattaaattcttttttcattttttgttttgtttttaataattaaacaaaaatgaataatggcgatgtttggttgcacgagtaggagcaccaaacaaaaatggatataaaacagactaaaacccgaaaaggaaatcagttcgtaaattagcccccccccccctagctaactttatattttcattggtacaacactcaacactcccatgtaaatttacaccccaaaaaattattatcaataataaaggaatcctccttttatatgatcaatgttgatgcttcttcttttctttttcattttttgtggttctaattttagtgtgatgattattactcacttgtgatgctcgattccttggatgatatccttgtaaggctttattttgaaactacgatcatctcatatgactaagtcataacatcatatgaataaggttatttttacaacaaaaaagaaatcatatgaataaggcatatgttttagggtggaccattcctcaaagatatgatgaaacggaattcaaaaactctttctaggtggcctgttcatttatcgacacgtggcattgtctcatgaaagtgaaaagattctctcttttttaccgtagccacgtcattttcgaagtccattcacacaccacctctaattttatttttttattttttctttttcaaattcatgctttgttgtggtcgcgctgctcctttcacgtgggtctcgattttggtttacaaggtattttatccccaaaacaaattgaccattttcgactgtaatttataataccggaatcgacattttacttcatcatagttgttacatgttaaaccccctcaagactacaacaatgattttaaaaaaaaatagaaaggggattttttatatcgaatttggattagatttggctaactacaacaaagattactacaaaggtttaaggaactaaagagaatgtcgacgaaatgtagcgggaagaccgttttgaggtattggaaatggactgtactgtattcctttctctcctcccttcacttcccatctgcatacacacaatattaaataccattaaataacagcaacaactatcatttattaattacatcattagtacatcatatattcatatgtgaaagcatttgtttgagttatatatatagagataaatgtactttattagttagggatagtgatgtgattaatcatgtttagacaagttactatccaaagtctttattgtgttttgtgtacgatcataaattttcaaaaccatgtttttgacacgttgttaagatggtaacaacttatgttgtaaatgatcgattatactaatattaagatttgacaattaatttaattacgtgtatgtttatatatatatatatatatatatatatatatatatatatataaaaacacttaaaaattgtgtagatcatagattataccaatttgaatatcttatcgtgcatggaaaacataccggaaattggaaactaaatggtggagaaatataagaatttgtaacttggcgagttcgttcccgggacaagcatgaactccacttccaaaaggcatgaatgtattcggcttcggatttaccttcagtttatttttgaccaattaacacgttttagattatctatcttttatcaaaagtaataaatataagttactaaagttctaaatttgtatgtagtttcttaattatttacctcgaatctagatgggtcgaaaacctcagggtttgaaaaatatttcggattgtgatgaatattccgaaacagtggcatcactttccatcccttaggtatcaaatatcctgcatacatgcattttacaaaaaaaattaatgagttatattcatttggaccaccacattttgataataacaaaaaagcttaaatatatcgaatgttctagtagtgtgaaatgatttaattagtacccttatattcaacatcaaccactgcttctctgaatgtgaaggatatgatgcttgccatcctcaagctttcaactataacctatatttcaaataacattaaaacatgtgatgtatatatatattaatggtggttcatatatacgaacctaaattttattatgatttatcaattaccttatgtgtcagtggcatattcctcgtttgtctccatgttaaaggtttcttctctctactgttttcttcatatatagccttttgctcagcctacaatcattatgtatacataaatttaagtgtatatatacacaaaagagagtggaaaatagtctgtgcatgtgatcataccttaacagcttctagaagtttctgatcatcatgtaagtacttaagaatccaagttaagcaactagctgtcgtgtcctgtgcggcgaaaaggactccgatgatgttgtctgcaatctgttcttgggttagcacacgacctttttcgttcttgaagttgagtagatgaccaagaaagtccgtttgcaaggcccttttctctcttctttcgcatataatctcgcttactatcgtctttagctgctttctcgcctataacaagtttttgtcagtacttgttaaaatttgcttttaaggtacatttattcattcattccagagatgagattaccatgagagctttgtgataagatgttccggggagactcatggggaaagagttgtagcctttgtccacaatattgtagttatgtttcaagatctctttgtaagaactctccaaatgtccaaatatggctagaatacccacatcaaaggcgaactgcaagagacaagattatcttgtgtattaggagatctcagagaacctgaatgtgtgagttcgtttgctgtatacatctcaacatatatataccttcttcatctcctggtaggtggagacaatcggcatattggcccaagattgtaaggaagaaagggcaatgtgctcgatatcagggatgagtttacggatggtttcagggtagaaagaggattgaacaagtttccttatatgggaatgataatctccttggtggaaaaagagtgcagagggtcctatcagcttctctttgcttctcggataagttggtttgaacatatgggcatgagtcacaagtacaaacctcgcagcctcagggctagccaacatcacgcatggatagccgaggattcgggttttgaatatctctccatatctacacatcagaagatcaaacacttctaaatctaagagcataactaaaaaagtaacttgagggacaaggtttcgaaattacctcttttgcttggaggtgaagaaaacattggggttttgtgaatagagttgtagagtctctcctaagtaaggccatcccatggaaccaggaggaagcttacctctactgttctttttcttctttgaaacaatcactcttaccaaaagcaagcataagatgaggattggtacaaccaagaaccaaatttcagccatcgattattatttaatttaatatgaaatgtttcgttgatgatagaatgttttggaggatgaatttttaaggaagaagaggaagaaagaagctagaagatataatagggaacaaaaacatacacaaatacacaagagagaggtgggtatatatatacacatagaaaattgtggagtaataaagacaaattagggatttatatatttgatttattattttattattgttatgttttatttcgtccaaacgtgggaagatgacgactgctttcttctattcacaattttggcttctcaggcgaaaaagctgaatagatctaaatttagatcttgtcgatttctttcttatttattatgtagaatgatatagagaagtttattatttcgagaagcaaagagaatgtataatagtaaaattaattaatgggggtgctagaaatcgcgatttagtttattaatgttggtatatactgccttggttttcatggtaatgagcagtgtaaactacaatgttccgtattatactagtgcgaaatttttgaaacataatagcattttctacatcatttttttttttttacagaaaggtctaatatatagaaaattttccgccaaaacattaatgttataaactgaatagcattttctatatcatcttgatgcattctccttattcaattgccttgccaaggcaccccatagatttagtggaagtagtgttttaatgttcttttatggtcatctctgcattgtacattgattacttttgagttttaattagaaatagcacatacgtttatatcatgattattttgcagagtgatacaaattagtaactagtagtgggaacaaactatttttggaccatttaattacaagaaccaatggatggcatttgctcatacccaatgaacgatttgcatacaaactttatcaacggcatgtcggtattatatatcaaaatggtaatggtttggagaattcgaaagaaatacgcgtcttgtagcctctcctaggaagaatatttgaaaggcggcgttaaaaattaccttcaatttaatttcttgatttgatgcgtttaacgtttctagtttcttctacatgacaacatttacgggtgtcttaattacgtatagtacaaattgaataatggatctcaaattagccatcaatagcttttgaagcttacatatcgagatctagaaaagaacatggcattttgctcgtgacaaagtatttccttacaaggcataatccctttctagatgggatttgccacttttagtaacataacctaagattgacgttgcccaatttgtgtagcattctttagagattgatctagtagtttcttctttgttcgagtttaatacattttatacggaaatatcttgactgaaataatcttagttactacgaaatatattagtcgtgtattttacattgctttatttcttttcttttaaaaatatgcataaatcataatttcaaactcgaatacgactagtgacacatcaataatattacaaaccactaaattacatatcaatgtcagaaatcaaaactttgcatcgtgtaatttacactagtgaataatatagtaatatatgtacatctttatgcccaagaaataaaatgaatgtaactcttaagtatatatacatcaaaaaggtttggaacatctttcattatatataagaaaaaaaaactatgatatttttaagactagtaaatattttagatgaatacatgtatgatatcaatgatcaaatgaaaactgacgcatatttgtcacaatcttagaatgaaatattacgagggtaaatgaaatggacctatgaggacaaagtcggtggcggtgccttacacttaccaattgtctccgtctgatttaaacctataggctaacgtttatcacaactatatcacaagttaacaaaaataaaatttctaatatgttttttctggtacattttctaaactggccaaaatggttgtcatttgcaataatatgccttacgtaatagacccttgtcatgcataatgtttttaaaagttgtgttatattatacgttggaatgataagatttttatttgtactttgaaatggatctttttacttttaaatacgaaacaaaagtcgatggctgccagaaaaaaattgtggttaagaaggtagttgccgtcaattgggtgatctaaaaaaagaaatagaaaatcaacgaaaatggaaataatttgcggagaggggaagaaataatctggtggagtcggcgcattgtgttcacgtgatgacgtgacactttgtgggactcatttttatgcaatacagctcattttccgattaccataagatggcgggaacctctctccacccgtcgtttccggtggaacaaatgggtccgaaaccgtacggaggaaaactgacacgtggaaaccttgccaaagagcgtgggacgcacgctcggttgtgacatcaggtgattcgtctcgtgttactgttttggtttgggggatctaattcttaagggtttgagatcgtatggacacaacaaaggacaaaattagtggaaaacaacacatttcagtttttttcctctagttggtcggatctggagacttccataacgcaacggcaaccatttttcttaaatatacgcgattatgataatacgacgaccgtaattctacataaggttttttcctttgttatcacctacatcgaatagctttaattgaaaatgtataatagattcaaatatcttttatcgtttacaagtttatatgcgattcacgagattatgattgacaatgcaatatttttgagttgtttatggttaatacaactgatccgagcggaatgaaaacaaatgttttagaccaacatttctataatcttatgaatcacactcatttagattgtgtacgaaattattcaaagaaaaaaaaacaaaataatacaagctaattatgattggagaccaaaaaaccgtcgttaaactaaaacaattttaacttaatgatcatagcaagccatagaattatgtttttttcttacttggctgacttggctccacatgtatgaattagtgctctctttctctttctccaagttcttttagaattttgtaattattaaatcaacgactatccttaatgattaaaattcttagaaatcgtagtacttgacatgcaaggcagtgacacgagtaaaccctttttctataccttttattttatttttctctgttaaggttttttaataataaatcttacccatttctgaagtacgaaacattcactgctctgaatttcactatacataaaatataccttctttttctgttttactttcgttatttcttgtgtcatatgttcgtgtgggacaaatgtagatatttaacccaacccatttaacaattaaagaagacgacgtagatatttgttgagatcacacatggagaaaaacaaaactttacattgcttcttatacaccatacctttaatgatcaataatgcccccttttctttttcttacgatacacatccttatatacagtgtttaggatgtttatatatgtataaatagggagtatttctattctatgtagagataaagtgagtgtgggtaatgattgggaagtttacattagagcacaaagagggatgactcatagacactccaaaatcgtttagaaactttgccgcatgatattgaatcttctccttttaattattctctctttttcacttatctttcttccatttctgtacggctcttcctctattatcttaattttagtttccatatatattcacacattatataaaaagtgtgtatatatttacatattcaaagcgtacaaattcgatagatagacatccatcgctgtaaaagatatgtaggtgttatcaaagttataagcacatgcttgatagataacgtgattaggttaacactaatattcccactgattcaattcacaccaaaactatagttggaagacatgtgtttggttcatatataaagctcgaacaattaaaagtgaatccaatgtactataagtgaatatataaccatatcacttatgataaagatgctacaagcttgggttgaaacatgacaggagcatgttgctagtatgtcattggtcttatattttttgttggattcatattaattatcagaaaattggggacagtaacaagatggagatttaacggtttttagccacttttggtataagcaagaattggaatgtcttaaagtgttttggaataaataaataaaactaagaaaaagttatgaaaaagaaaattacaagattagatttgaaacaaaaaggagagaagaaaaagaaaagagaaaacccaaactcattgtcaaatttgtaactctcttcgttctactccactcatgtctagttcattatctctttcaaacttgtgtttccttttttttcacatagattcattcactacaagtaaaatcgaataaggataaaaatatagagataggtatatacacataagttaatgtaggcgagacaataatatgatcagacaaataaaaagatgatggagcagaatcctaaaagactttagtcaaagatcatgctcgaggcaaatcagacagtggattctctgtcaacgtaagagaaaatctggtttatatattttcccacttccattccatatcatcatgacttgtatccgattatcaaagatttctttgttctaaaaaaaaagatgttgtacaatcagaacagaacatgtcaatcacatacaagatccatattgcagtatctgtaaatctgttaaagctaatctgagaatgcttgtgtcattttgtgttttatcaaactacacttgaacatatgtgcattgtagtacccaataagacaagcaaaaactcttttatttttatatgtacacattccttaattcctgcctaagacaaactacactcaaagcatgtatcacaaaataaactttggttttcttctagaatttagacaaagacaacttcgaatttgggacaagggtttctctgtatgtgagtactgagacttgaatttccttcgaatttgaagttgtaaagagcttgtctttgagtcagaccaataggatatatcccatgtactctaagcttgccgtctcctcttaagctcgcgggtctttccttcttccatattggttcatatctcagagacatgaacttcgcaagaaccgcagattccagagcttccagagtcagatttccatccctgttgttacatcatagcaaagaacataagtatacataaagcaattttcctggtttagcgaaataatgctggcttacttcaagaagatggattccatgtcaaaccgtcctctttctctaacatacaaatgataaactgtctctgagcctctggtgcatttgcagggtcgtctcttaaactcagggctcttctcttcttgctcacgaatccttgtagccacaaagatgcagagacgacaagaagagtgtacagcagccatatcaataagtgccttaaaagaatctgaagggccttcatgtttccatctgattataaaagcaaagttttcaatacatgttcttattttgttttccatccggcaaatattttacatattaccgcaccttagcgtctgattataggcgtcagggttatccgcaagatacttcattttctttgcaactgccttgacatcatccatctgcttaatgtgaaggaatgagtcaggagaaggtgcaaattcttctatatttggagctccaacaaccacagggacagatcctaaaagaagatttgatcatttagtgctaatcagaagtagaaaacaaggtaggttcaatgctcacatatatgataatctatgtatctaaatccgcatatcacccttcatcaattgacatgataataagctcagatcatgcaagatgactaacagtagctaagaggtggcagagaatataacaaatgctaattcttctaatgaagcaaatactaaaatttgcaagatcatcagagagagaggatgagatatatctataccagcgactagagattggaagaacttctctgtgacataatcctcctcgttggtgttctcaaaagctagactgaatttgtagtgcttaagagcttcaaccttctccactgtaacgaattttcgtaaattattggttcaatgacttgatatggttaggacatagaacatttcgctagcaatgcataatattaatacataccactcccatcccgattccggtgacaaccaccataagaatcaatcttaacattcgtcttcattaaggcttcaagagcttgcaggcggaaattccgagcggcgcaattggaaataaaagcagcagcaagagctttctctgtttttggttgcactggagccataatatcatattccgcccatgaaaaatacccaacaggaacatctgatgacagactagttgtcatcacaatatcataacctttcctgatgaaacaacagaagataaaaagtcagatactaatcacataattttacatgtcctgcaaaagtataacgtcttgttaagactgtgcttacccaccgtcgtgcttgagcaagattattctcttggtaatactgtgctgattccatggaacggattatactgagtgttccaggttgatgacttaatccaaaagccgcatcaggtttcttatctgaagtgaatcccattacacaatcaacagagcacgatttgaagtcctacaatttgagagatatgaagccaataaccactcgtaagaacttgttctccgccactaccatcattgaaaaataaaaacccttaaagaatcattatatccacatcaatgcttataactaagaaaccacagtatccaatcaacattaccacccacaacaactagctaacaagcaagcctaaattttgatccccttgacttgctaccaaagtctagctcagaaaatatcacacagagaaattagatatacataatttgatgatagacaaatgattctgctacacaccttgttactaccagagataaaaatcggatctttagtgaaatctctagaataagtaactgaatccactctctctaaccactcctggcatttctctattcctgacccaactttcaaatcggacgacgacttggtgaaaaaatgggttaacgtatcgaccaaagaagcgttatcgagccgacagaggaacccgatctcgataatgacgacaagagccacgcagattggcaaaaaggtcgagactttacgcttgaaagaggaaggagacgaagaagaagaagtagagccattggctactacaggcaattcttcatgggtcaatccaattttaggacctcgaagattggagaaaacacccattatcaaagcgacgattttttatcaataatgaatggattttaagaattgtgatttgggtttttatcgtttgatactttgattgatgagaaagaggaaaaattggcagattttctacctttagttcttattttatttcatttcattaggaaactcactgaaacatgaactaaaaaaatacattaacatatatgtctctttcatcattaggctcggattaaaacatttaaacacttcaaatctctaagacaaaatcctaaatgagagaattttacttatcacaaggagaaggtgttggaataagcttgaagatgacttaagctataagtcattaagagattaggattaataattctaggagttatctagaattatattaggagttatctaaagattatttggtagttatctaaataatagtcctaataggttttggatttggtttatgagattcttatataaggagatgctaagttgtggcataactcattgtgtttaagcattgagagtttgagagcttaggttttaaggtattttcctaagttaataaaagagagttattcttttatattttgagttcttattcacaatcttatatccttaaattctatagaaggaactaaggaagagaaatgtatagatcgtcatggatgagcatatacatgtaatttttgcctcctcttagaattttctaatgacaactccaaaatagaatgatttcatatattttaaaaaaaaaagaatgatgatgactattattactctagttatagcaataagccaacactattcatcacaacatttatttttaaaaatttatcgacaaattgatatcacactattatgagacaaaactaatacatcaaaatgcaaagctaacgatagatataaatagtagttaattaaaacttgaaaatacaaaaatgacattgtattaattgaataatataaaatatagtgatgtaactaacgttcaaatttcaaagtacataatcaatatggaaactaaagataaacaaagtcgtcctttcaaacaaaatcctttcagactttggatctgaatgatatgtagctcaaagaatcagaggaaaaaggcaaataaagccaacgcaaaaggtccaagctagaacaatggattcatgtccgggaaaccgtggtagtagaagacgtggtggtggaggaccacacatgacataactagggtttttcttgtgaactttttcttctctagcttcaccgtaatatcttgttttcgatgttctctaaaactagcaaatcgtgtgtttacactactctttcaaactacttttctccatctctgacccttgaagtcatagccatgtaatctctttgcattttagtagaataccctgtaacaagaaaaaataattatagataaaaacaacaacaaataatcttaacaaaacaaatgttgatgcttcaacgattcgtccttttttaacacattttcttgattatattttgtggctagaggccctagtcacaaatgccctcaccaacccttcaatcattgaatatatacaagcacaaccacatgcgatcatttgggatctgaaatattaatacaaactaagatctcaatcataaaaaaatagaatgactacaaatctattagttaattaggacaattattaaacattttttctattctctattttatgtttgaatcttactttttgctaaaaaaatattgctccattgatatttatagtttactatagtcttggtgatttgtatggatttgtaaaaagaggtcaagcgttgatggagatgaactctacttctcacatcactcgagtctttttagattagtttttttttgataaaaaggaaacaaagcctaattatgaattagcaaatacaactacatctccatagtcgtcccttgaatcttggtcgaactctgtagcatcaaggttgaaattaaacctaaatgacaatcgtgtgtacgtgtataaatatacatataagtgatgattacataaactcatagtcatatatgggatctattatggttttatgctcactctatacgtcggcctaacgtggcaaaagtggatatttctttgaatataaaatagaaaaacaaaaagcaaataagcaaacattgcaataataccaaaagaggaatgaaaacatatttctgtatttggaagtaatgatcttagactccacgcgactgtgttctttattgttttgtttcgaagagcggtgtgatattcttattggcttgcaaccaaaatgggctcccaaaaagaaagcaagcaccaccacttcttctatctgatgagggaacacttttaacataaaagtcacacaaccataacatatattcaaatttcgggtgataacataatgataaaaatagcacaacccaattaactacatgttttggtcatattttattcatagtttatagttttttctttttttttggtaggagtaaagaacactgtcgcgtggagtctaagatcattacttccaaatacagaaatttggtttcattcctcatttggtattattacaatgtttgcttatttgctttttttcctactttttttttataacatctagtttatagtttttgttatatattcaatctatttagtgtctaaacaatactgatgatatcaaatgattaaaaggcttttgaactgtaaaaatgacaaacaaatatctatgatctatgtcataattgaaaaaaaaaagttaccaataaagatttttttttatataggtagtatttcttggctaatatggacatgtatataattatatttagtcttatctatgtatgaaattggtttggatgttgaaaaatgaatcatccttatcgtcaaccattttggaaagagacaaatctagattttgatttctttttttttacaaattaaagattttataatatatcacaatattgttgaagattacaattgtggcatatgtcaatttgaa

SEQ ID NO: 441 - DNA, 83097 bp, Arabidopsis thaliana
gatcaatttgaatttttgatatacatctaaaataagaaaactaaaagaacataagaagtaatatatttttaaaaaattgacctaaaaacaaagaataatcattattatgatttaactccaatgagaaaacaattccaagcacgatctccaaccactcgaatcttcactgtcggaaacaaacggccaatgttttaccacgtcgcattcttaattggatgtaagtctttacaagcacttaaaacattaaactcttttttctcattcgtccacgtttctttttaaattaatactgttaacagataattattcacaaaaaaataatatctgaagaacaaaaaaaaaggtttcagggccttaaaatggctgctcgtgtcgaggcggcagcaacacacttgtcgtctctccctgtagcttctctggagttttcgcagtcacgaatcttgttttgaagaaattaatttggtaaaacatattttcgagctcctttctcttttattatccgttttctgacttctggatctgtctttgtcggatcatccaatttttttgttgtctttcctctgtttcgtttatgaatcatgatgatgtacatgttgtaactgaagtaacttttggttatcaaattagagttaaagagagaatttttacgagatatttgttataaatttatcgatttgattcttgttgctattagggttttgtctatttgattcgatcgggttttttttaagagaaatgggttgtggaatctggaatagatccttctcatgcttgttgggttttgctgattttctcgtttttggttttatgagtaaactctgtatctggtgtgaattcgttttccatcaaaaaaagtcatcaaattacgtttttttataaacattatccaaagatctgacctttattgattgactttactgtgcttttacatttgttcgcacgcatttatgtggtttgtccagtttcactttagtattctttctcttatatggatgtgaacatgcattagtgacacatagttcactcctttttattttcctcggaagttctctttttcatggattcttagcattatgtaatatacactctaactgctttactttgattttagaacaagggttttagggcttggatgctttgttttcattgaaaaagaagtagaaggagtgtatacaaggattatgggaactcacatcaatttcaacaacttaggaggtggtggtcatcctggaggggaagggagtagtaaccagatgaagccaacgggtagtgtcatgcccttggctaggcagtcctcggtctactcccttacctttgatgagttacagaacacactaggtggaccgggaaaagatttcgggtcgatgaacatggatgaactcctgaagagcatatggactgctgaggaagctcaggccatggccatgacttctgcgccagctgctacagcggtagcgcaacctggtgctggtatcccacccccaggtgggaatctccagaggcaaggttcgttgacgttgcctagaacaattagtcagaagactgttgatgaggtgtggaaatgtttgatcaccaaggatggtaatatggaaggtagcagcggaggcggtggtgagtcgaatgtgcctcctggaaggcaacagactttaggggaaatgacacttgaagaatttctgttccgtgctggggttgtaagagaagataactgtgttcaacagatgggtcaggtcaacggaaacaataacaatgggttttatggtaacagcactgctgctggcggcttaggttttggatttggtcagccaaatcaaaacagcataacattcaatggtactaatgattctatgatcttgaatcagccacctggtttagggctcaaaatgggtggaacaatgcagcagcaacaacaacaacagcagttgcttcagcagcaacaacagcagatgcagcagctgaatcagcctcatccacagcagcggctgcctcaaaccatttttcctaaacaagcaaacgtagcattttctgcgcctgtgaatataaccaacaagggttttgctggggctgcaaataattctatcaacaataataatggattagctagttacggaggaaccggggtcactgttgcagcaacttctccaggaacaagcagcgcagaaaataattctttatcaccagttccgtatgtgcttaatcgaggacgaagaagcaatacaggtctagagaaggttatcgagaggaggcaaaggagaatgatcaagaatcgggaatcagctgctagatcaagagctcgaaagcaggtgaatataaatctaactaaacttatctagtcccttttgtttggtttgactattatggtcttatattttgcaagactgcattaaacagaaacataaaaccagcaaagatatcttctatcccgaaccacttcttgtattatgaaagatgctttatcttccatgttttttaactatccactaattacaggcttatacattggaactggaagccgaaattgaaaagctcaagaaaacgaatcaagaactgcagaaaaaacaggtttctttctgtttacaacctctctgtgtgttttctgttttcccctatcagacttttagaacttggctctgatcctagcttcccctgtattgcaggctgaaatggtggaaatgcagaagaatgaggtaattgtttaagaacttttcttttcattgagttcattctgaaacccttgaccatacttgattaggaccaacatcagcagcaaaagactaaacttaagttgtagctctgatagtgtatgttggtccttatcaagtatgtccccaactgaagctcaaacctgagatagctttcgaacatttcgtggtcttgcttcgttttgaatagcctttttgattgtgttgttcactagtattcttttcaaaattagcagctgaaagaaacgtcgaagcgaccgtggggcagcaaaaggcaatgcttgagaaggacattaaccggaccatggtgaaggatgaagcaacaagaacggatgaaccagactcctagcttgggattaatgtaataggatagtgctacctgtacaggagattaagagaaattgagtgaaagatctaggttacagagtaggagagagttttcattatgaataaatgacattttgtgccctgacctttgttagtttaggtttagattatcctctgttattgacttattgtgctttctggttgttagggtttctaaaagacatagttgtttatatatatgtctgactttgtattccggatttggttctcttgtgtcattaacttgggtttagccattattacttaagagtggcaacgaaatcattcttgactctggttggaaaacatatgtcatctttcaaaactgcaattagaaaacagttaggatgatcctaagtgacaaatttctagaaaaaatgtgactaatttgtctctgctcactcaaaaagagagaccatttggtggagagtgaggggagccagtctcaagcagaaaactccggctacaatgcgaccttgaagtagtactagaggaagaagccaagccacggatgtctccactttggaaccctgagtcacctctcagtgaccgtcctttgttctcttcaactgccattgcaagcccgagatgcaacggatcacagctttcgtacaacagcctcagaacttgcttgattgatggcctagccacgccttctttctctgtgcaccatcttacaactgccactactgtttcaagctgttctccatctatgcagtctttgattctcggatccaccagatctatgcgtcttgattctgataccagcaaaggctgagacagttctaccaggttcctaccttcatcaaccgctcttttcccagttatgatctctagcaacaccactccgtagctgtacacgtcgcttttctctgttagttcatgtgttacaacgtactctggatctacatagcctgaaattcagatttcatggttttagattttgctcaatatttcaagagtagttaattccttagtatcctgacctggagttccgcggatatcagtattaacaggttcaaaacaaatggagccatctctagaagcatgtgcaaggccaaaatctgcaagctgcaccacataaccccacacccacaggtcaattctttaagaggtaaaacgaattgataagtcagtgaccagttgatgtgaaaggatgcagacgcaccttagcaacaaagtgctcgtcgagtaatatattgcttgacttaatgtctctgtgacagaggggagggtcacagtagaagtgaaggtattcctgcaggaaaggaagcatatccagttaagaactaagaacagtaataataatataaaccatagactagagtatcagttttatggaaatttaccagagcattagccacatcaattgcgattttcatccttgattcccaacttagtggagatttttccgtggctgcagagaggaataacaacgttcaagattcttagtcaagtctaaaacagaggaatgcaatctgaaaatcatgagcatacagtgtagatgatccttcaggctcccattttccatatactcgtagacaaggaacctgtaattctcaggttagatgagcaaagggcaatccacacaaatggggagaaacgaaatgaaggtcaaccgtaatcattcacctctcgttcttcttattacaaaaccctttcaaagcaactaggtggcggtgatgcagcctggcgagaagctctatctctctgcaaaattcatcttcagcttgttcagagctcttgttcatcttttttacagctgcaaccaacccattactgaactcagctttgtaaacagtcccaaagcccccacggccaatcaccgcgttgaaatcttcagttgctttccttatctccttgtagctgaatttccgaaaaccaaacgaattacctgaaaaatcaaaaccacacatttgttttacatggtctaacatcccttgttagtgtaccatcagaagaactcttcaccttcatgaatcatcgaccttgggcggggagaaggagatgtccttgttagattacaagcgatgctcttggagtcatcaagttctcgtttttttctttggataagaactattaggactacaaccatcacaagagcaaaaactgtgacagcaatcccaatagtcggaaccattgtcaagtgatatggatggtgactttttaatggagacaaaacaagattatcgctgcttggactatcagctaacactggaggagaagcttctggactcagcgatgatggagacgaacctgagtagatgtgtcaagaaagtcagaaaagaaaagaaagtccaatcttgatctgatactaagaagattatacaggacacactagtaatatatacaggatctgtcaagcatctttcccaatatagaaacaatgataagattctacactccatgaatggtatgttgacagagaaaacagtatatacctggagtggggctaagctcaggcacattaaagaagcagctagctagttcaagagccgatgaattgtcaacccggcttgctaacacagcataagttgcatcacgacaagtactcagtttgatgctattatcagcaccaacgaggctcctaaggtagctgatactggaattcaaacaattcctgcattgatcacccggaggaagcgggagtttgcagtttctggaaacatctccaaaacttgtggaatgaagcattggcggtacagtagtcagaccctcacaatcatagttaacaagaatcttggtccctaatccacagaagatggtagcatttcttgggattccataaagctccatggttctagagatagtagtgatacagatttcagtcaaatctgatgtaactccaagatcagctgtgtagtttgcatagcgggcgacagatattgcaacgaaagcattcatgtagcggcagcatttagctctctcggtgttgttcgagcatacggaagccactagagtgaagttagatgaagtaaagtccaatggacaacctgtaaacacaatatatcacataactttgcttcaattttgcaatagtttctttctctcaatgaaaatctcatcaaagactacgactttaagcaacgaattcaccacaaattagaacaaaggaacacacaaaacactttaatgcacatcgaaattcgcacaaagcttaaacctttcagaaaaagcaagattaacaacagttcgttttctcttctttatctagttacgaatcaaacccatggaagaagattgtcaaggaagattctcaaaagactgatgtggtgagagacaaaacctgcttcggtgagtaaaggaaagtactggaatccaagcaatgcgaagaatgcgagcaagagagcttgattataaaccaacaccatggccaaagaacagagagagtcgttaggagaggtcaatgagaagtcgcctgaagagaatatgacagtggaagaaggtcagtgacaatgagatggagagagaaagagagagcccccaactttctctatttcttgatgaaacccattaaacccctgaataatccttaaatttgtcattctcttatgtttttacccgaaagttcgttgtaatagttttaagcacccccatacaaataaaattactaattttcgttcaataaaacttttcatgtataaacataatcattgcagtggtcggtttttaagtttctttttttttctctatcttatctcttcacatgatttggttccacaaagaatattaacaactcttagaaacaataagccgctatatgttttcatcataaaacacctgtaaaatgttaacatacggcggacacctaaatgtcaaactagatgatagtatggaaggaatattaaaacttctccaaatactttatcatatggtttttctctcatgtgtgaggttagttttatgattgatttggaccggcacaaaacgtatttaattttcataagactaaagtactttataattttagctggcatgctaattaacttgatagcatttgattacttgataatgatgacagtctcatgcaagttcttcattttttggttaagtttattctttaaaatggaatcaaagaaccatttcatgtaggatggcatgttaacttgttaagtataataataagaacaaaccataaaggaaaacgagaagccaataaagaactctcttctatagctattaatatcatcattgtatcctagatactcgcgattcctcatgttattttttgtttgaaaagataaatttagatttaagtttttatttaccgttttttgttggttggtcaaaacaacttgtaaatcacccgttccaagtcttttggagttttaccaagtagttgcttcttcccaaagtcaaaatctttgggtttttattcttttaaacttctttatgggattttggtgcaagaaagaagaaaatgtttcagagattcaccttctttctaacagctcttctcattccatgtattctaattatccttagcccttcatatgccctcaaggtaacttaatctgaacaaatctttctcaacatcatcaagaattgatcataaatgagtctaacctaaaaaaacctaatggatcgtcggtttcaagaaaatttacaaaacaaaagtgttgatctttgtgttgattggtaggaaggagaaacatgcatcgtgagcaagaattgtgatcggggattacactgtgaatcgtgtctcgccagcgatagtttccgacctagatgctcccgaatgcaacccattaacccgaccaccaaggtttcttgtttatgttcttttcatttagtcattaatattcttaatatttgttgaatctactgatcattatcttttcatgttttgtgtcaaaaggtaaaagggttgccttacaacaagtactcatggttaacaacccacaattcatttgctcgaatgggtgcaaaatcaggcactggctctatgattcttgcaccttccaaccaacaagattcaatcacaagccaactccttgtaaatattcttcttcatcataataaacccatttcaaaagttttattcttttgataaacccattccaaatgttccattctttgatttgattcttatgtttacattttttgggttattacagaatggtgttagagggtttatgcttgacttgtacgacttccaaaacgatatatggctttgccattcttacggtggaaattgtttcaattacaccgcattcgtaagttctatatagattcttataacttgatcggtccagtgtcgaaaatagttctaattaatttgttttttggtttgtatgtagcaacccgcggttaacattttaaaggagtttcaagtgtttctagacaagaacaaggatgttgttgtaacgcttatcctcgaggactatgtgaaatctcctaatggtttaaccagagtgtttgatgcatccggattacgaaacttcatgtttccggtatcaagaatgcctaaaaacggagaagattggcctactcttgatgatatgatatgtcagaaccaacgattgcttgttttcacgtctaatcctcaaaaagaagcgtcggagggaattgcgtttatgtggagatacatgatagagaatcaatgtgagttcgtctccaaatatactaatacatcatattatgataagttattataaatatgaaatattgatataatgttatgattttgtagatggagatggagggatgaaggctggagtgtgtaccaatagaccggaatcagttgcaatgggagatagatcaagatcacttattctagtcaattattttccggatactgcagatgtgatcggatcttgtaagcagaactctgctcctcttcttgacaccgtcaaaaactgtcaagaagcctcgggaaaacgttggcctaacttcattgcagtcgatttctacaaggtacgttttggtgagatttggatccggttaatgttaacatttgtgtaatgttcatgtatgtgtgtggtggtttagagaagcgatggtggaggagctccaaaagcagtggatgttgcaaacggtcatgcagtttgcggctgcgaagatatagccgcttgtaaagttagtattatatgattatgtagtactcactatgtgagttatgctattatatgtaatgaaaaattgttatttaacgtttttgactttgtgcaggagaacatgccatatgggacgtgtgagaagcaagaagagaagaaaccggaatcaaacctaatgatgatagcaaaacttaccgcggaagcgactaaaggctatggccacccatctaccaaaccgaccctacttgggctttctgtgtttgttgtaacctttgtctcacttctctcaactttttgactcaaatgatttactttatacaaatgacaaaactctaatctaaccatgttccggttcgcaaagaaccaacgaaaacaaaatctattttacttgtatagtagtcacctaaaatacacatacaaaaagaaaatgcatttattcaataaggggtacttacaaatatcaaccatgtatatcattttaaaaacaactttgttttagctagagattccgaatccggtctgggttaagagcattgtaagataccggtggcgaagcctgaccgtctgatccttcttgatccggtttaatccggtggggatctttgccacaagggagataaaagaaagacttaaagttaggacaactctgtttccgcaagaaaaacttggcgcattcccatggtgttctttgattcgtaagatctagaatacaattcatacccacatcaagaatcttcctcttgatgagtgttcgacattttggaccgacctgtgtgaagtaattgtacgagagagaaaggttcttgagggctgagagctcgcagacaatctccggtatagtaccgtagaaattgtttctagccaaattcagctgctccatcttctttaggcatccgaaagagtacggaatcggaccggttaactggtttaactcaacatcgaaaaccgtagctcggttaaggttcccaatttggtacggtaagcaaccagttaacttgttattcaagaaaaggacttcttgtagggacttgatgtcaccaatgcttcccggaataggacctgtgaatctgcatcacatcacatgtaattccccccaaaaaaataactttagaaccttaaaaatacaagatacaattcacaaatatctcgtgacatcataataccaaacttgaaataaaaacagagtaaataactctgtaatttgaaacagagtaaataattccctgataacaaaacgagaatgaaagtgtggagcttttgagacctgttattagcgaatgtgaggtaaagagcggtgatcgatccaagattttcagggagtctctgaacaagattgttgttgttgatgaacaatacgtcgaggtctagattgaaaacctgaggagggacagaaccggagaaagaattgaatctgagatcgagaaacgtgaggttcgttgcttttaacacagagcttgggaactctccagagagcttattgttgctgagatcaagctcgaaaaggtacttcaatttgctgaagtttggaacagagcccacaaaattgttactgtttgcgtgaaagatggtgacttcttctaacttgttgaggaagttatctagccggagtttcttgccacccaagttaaaattgttgaactgaatgctggcaagtgcgaggtcgtttgttcccggtaacttggcgcactcgagtcctatgtatttgtcctgagcgcaaatgtcggtgcctacccatgttttaagtatgctctttggatcatcttcgattagcgtctggaaattcttgatgactggataaactttctttattaatgggcttgagaaatgtagcggcggtggcggtggaggaggaagtggccgtggtggcggtggtgatggtgttatataatgatgataaggagggggaggatagtgttcaggctccggagatggggatggaggagggagtgactgtggtggcggcgggggtggtggcgtttgaggaggaggaggcagcggaagatagtcttctggctccggagatggcgcaggagaattgtaattggtgctatcactgccaccgccgatgatgatttcgagagattttctgtaggtgttgtggttgtttccggtggctagaattgaaagaaagtgaacagacagaatcaagaaaatggaaggataataatttggggccattgctgatagattgatgagagccttgaggattggcttaggcagagctacatatagagaaagtgactgaaaatgatgagaagtcaatgcacatgtcttcttgtgggctggttttaggttacaacttacaatgcaattagctaaatttacatttgaattattggtaagaaaaaatattaattaagatcttcatattataatgccaaagggtggttggatacatgtgtagctatagcttcgttggtgtatgatttttttccgtcaacggcttccacgaaaaatcttggtaatagaaaaagagtaacataaattctttagtgtgtgattagcaaaaaataataaccaattagtatttgcaacaaactattttctaatagaatctgatcaaggactctaccatagattttggtgctttggatccattcttagagtcaaaggagcgaatgcctctggtgagtcaaagggcattggctttgtacagtacaacactgaagaatcagctcacaaagccatagaacatatgaaacgaatgtttcttaacgataggaaagtatatacgttggaccttttcttcagagagatttccaagcgaaaaggagatttaatttcacggatatttatgtcaagaatctctccaagtccttgactgataaagatctgaacacaatttttcaagagtttggaccaacgaaaagttggtgtgatcattagggatggttttggatttgtcaattttaagaatccagaggatgcagagaaagctgttgatgctttaaacggaaagaagtttgaggacaaggagtggattcttacaaaatcgaaaaagaagtatcagagtgaatctgaagtgaagcgaggtttgaaacaggctatcaaaaacagatcacagggttcgagtaacttgtgtgttaagaaattggatacacgagtaacagatgagagcctcaaagacattttttcttcctatggaactataacatcatgcaaggtttgaaactctatacacagaaaaatttgaggtcgttgttggattcaagatttttacatttttgaatgtaaacaggtcactcatgagcgacaatagtggagtaagtcaaagatcaggctttgtttcatttttgaagccagagggcggacgcttttaaagttgtcagtgataccctatgggtttctcaaaaaaaaaaaaaagtattttaataagagagtataaaagactaaactaaaaagtaaaaagaaaaagaattaagacattgaattgagtagcaagttagaactaaattaagccccaaaactgatcagctgttatgtatgattcagtagctttccattgatgaatcaagttcatcttctagatgcggaactgtctttccttcaacccagcctctccggaggcctctctcggcgacgaccctcttccccatccgtccttaggtatgcattttttgacactccgatactgcccaccacgtgtttgttaaaatgccttagtgaggtgtccaccacgtgtttgttgaaatgtctaactgagttcatctttggctctgttgtacagagagtggtgtggcctccacttccagaaacgacgcttctatttcgtctcccacgtttaacctcagccgcgagttggctcacgcttttcaaaccccttcataccacgacgtacgttcacgggttcacgtggttgttgaccttacacaaattcatcatcggctcatccaaccagacattgagctgcttctttctcaagtgctccaaccaaataaagaatgtgttcaagaagctattagacacgtcaagcaaactacacttactaatctcgtttctacttacttccaacacagcgaagacgctacccgcctttgcttaaatctttaccaaaacgtacacagtgctcgccaccacctctacacgccccttttagacctcttcaacatctttcccggtgattcactccccgccattgacgagtccctatgtgacctggcattcgacgtttttcttaagctcgacacgtttgaaaaccctttctcatctcctgaatcttacagctttcgagacacccaattatgcttctcccagctgaagcataatctggacagacgtcttcgcaagtctaggtcacgggtccgcctcatccaccatgccacagctggttcttccttatgtcttgttgctgctgttgttgcggttgctgcttctgcagttgttattgcctctcatgcacttcccatccttcttgttgttgcaggtcccttgtgcagtccttacctccctcacagtttcaagagaaaggagttaactaacatttgtcagctcaatgctgcttccaagggtacttttgtgctcaacaaagatcttgataccattgaccgtcttgtctcccgtttgcacactggaattgaatacgacaagtttttaattcgacttggattagagagggggagggacgtgcattcaattcaagagattctgaaactgcttcgcaagagccacctccccctcacccatcaactcaaggatcttgaggatcatatttgcctttggttcactaacgttaacaaagctagatcgttgctcctaacagagattcatcttcctcgaccgtaagctcctcaaacctttttgtatcagtttttcccaaggcttgctagttggttcattacctaacttttatgccgggcagcagccatgttattctgtagatagaacaaattactgccatctcgagtaaaaaaccaatcaagattacaaggttagtggttattgcaaaatcattaaatcatatgaatctgtataattggacacatcggtgtttcttgtttgcttgttgacctgatgttgctagagtccaactacataagcctttgtttcaatctgatgaagttaatgcttattgtcttaattggacggtaggtcttgtgtgttctctgttagaccgtgagcttggttgcagttttttggttatttgggatatttgacctcatttgtctatccatttttttggctcttaacagtatcctgagcttatgagagaggactacaggaccgaggtgaaaatacatggacgttgagctctgtagatgggaatagaaacttttttatggtcatccttaaaaattgggcatggacttgcctgccttaagcagtagtagttcgatattggatgttgtattggttcatatcatcatatcggacaattctgttggtgaatgaatttgttgcacttgtatttagtaacaacccacacagtaacttaaagttgtattgaaatcaaattaacgaagaaaacaaatgctgaaaataagagaaggtgaattcaagaaggtgtgacgccctgtttggccttgaggacaagctcctccgtggtagtccctataatctcgttggctcgcttcagccccatgcagtagtaccttccaatagtgtcccgagcaactatccccaacttctctagcttctggactgcatcttctacatcaaagttacacctcgcaccaaactcttcctttatcagttcctcgcacctcaaatccagatcctatttaccacacattcaaaccaactcaagttagcactcattgatgatgatacaccatataaagagtaaatttaggtgtatgtacctccaaggtagctttcccctgctccattagtatgtagaagcaaatcattacctcttttacctgtgcattacaatccaagtaagctttttgtttctattgtattacaatgtattcatgcgggaacttacttcttgctgaatcacatcatcacacaaatgtagtagcgttcccctcccgctgtctagttgtttatcatacattgactgagttatcaagttctgatacgtagccatgttctgctggaacctgaaggaatacaattttcgaataagaagctgttcgcttaacaaagaagaatgaaaacaaggaaaggcaaaaagaaaagcacttaacgtgaagtatgttttcgcacaataaccaagcactgtggagagaatggcaataattacccatggatctgatttaggcatctcaaccgaagtaagcaccgctacctgtacaaaaagtcatatgataaccaagaaagacatgtaaacatgaactgcaacaaaagaaaagaatctgccaagaagaccaaccagaccaactactgcagatattagaaatttgacccaatccattggagtcagtccagggtttcttttctcaggctgcacaagacattaatgttattgcagctagtttgcaattttcgctacaaaatccagcgatgcaaaaggaaagaagacaagaacagaaacttacaagcacaatctccatgtcagccataggaatgtttttgaaatgcttaacgtagattcctcgttctagatttgttttagagctagctcgtctgcaacatcataaaccacaagcttgaaccacaagttcacaaagttacaaacaaatagctgaaacaagacatacatataccttacctataaacaacaatcattctatcgaatgtaggctcctgtattgtgagcttgctcaaaaaactcttaaagctgaatccatcaacacaaatgccattatcatcatatatatgtacagaatggcaaaagtttgggttgaaagcaaatcataacatgcgagggatactgatgataacctcagctttgaattctcaaggcgaatacgctccacatacaattcatcattatctgtgtcagggtttggctcatcatcttttttgggatctttcttgttaagactgcttgaccttttggcgcgtaatttctctaacctgtgatctaaatgtgttaagacccaacatgtaatcaaatgcctaactttttttacttgtattgaactttaagaaagactagactgggaaacgtgttctaacctggtgattctcatgagaaaggaccaaaaacgtgaaatgatcacatccaatttctccatgaaaaaataatctgtggttttatccaatccaataccacgtctgaagatgacatactatataagaaaaagggtaaatactatatcaacacatgtcgctacatgaccatcaagaaagtctttaggaaactataatcttgaaatgctcatctacagacaaactaaaaactgtaccttatcagaaaaatctggaatattttcatgtggatgctcctcaaaatacctcttgagcagcttcttgtcaagcttcatccaccaaaagcaagaaaactattttataagaatcccggcaacacacaagcattagtgaaagtttgtttaaacaaaccttagactcatcaactttgatgggaagattgagaagatactgcccagagtgtgcaacttccatctcttcattacttgttattttaaagttgctcttctccataacctttataagcggggggaaaaagaggcacatttcaagaacaatgacatagataaatataagggaggagataatatcctaatcaaagagagtaacctgaaacaagtaagctaggaaattttgttcaaggacatcaatctcttgagaagttaagttctgctgctggattttctgagcaccgtgtacaggatcaaacagagagtatagttgctggaaattcaaaagcgcatgataaatgagaaagcaaagcaaaacaagtttgtaaaagagagattttaaaaaggaaagaggttagagaccatgagatcttcaaattgaagaagataccaagctcgaacagtgtactcaattctcttacatagcttaaggaactcttgtctatcattgctatgttctgcaaaaacacaatttatccgaccaaatttgtaaccaaacagagaaagggccaacgattgtgaaaaaagcaaaatttgggatttgggttcaaaacccgagaacagggaagaagaaattggagaaactgaccaatgagattagccaaggtcatgatgagtttaggtttgaggatagggatgaccgattcgggctcaagacgaatcacttccttattgtgttgttccgccatttcaaaaggatcgaatttttgggaaatcagaaacaaaggaggaagaagaaagaagaagaagaagaagaagaagcgtaacggaccctgaggaggaacaaaactgaagcgttccaatgagttaatgtcgttgaactcgaccaacgaatcatcagcccaatgcttttttctatttcttgcttcttctccttttttttattataaataataataataatcaaataatgtgatttttattctttatgttatgtcttaagtctaatcttctggttgatcctccaatcattgtataacataagcttcctatatcataatacatcagcctctgtttctcttaaaaaaaaatcatgtagagagtacttaaacaaattccttgccgacattcaaaagaagaataatttcagaccaataccaatgttgtgacttgtagtaatgttaaaagaccaacaaggtaggtaggtcctctcacttattcaatctcccacaatattattatctctctcatatagccaaaacccaaacagtgcttctgtctctcgtgtgtttcctatttcgtttatatgggctatataaattaggcccatgacattatatgggctttcacatccaactaaatggattatggattcatagcgcgtgtgttcactgtctccttttaaacgcgtggttagatcaaagtctctcagatttcttaccttctcttttaaaaatgcaaaagatttcttaccttttctttttttgtgcaaaagatttcttaccttacaaaattaaaatagatacagagaatgttgacttggtgaggatggaggacacgtgtcagtttttgattgagtaagctattactctcctagatttctttctattccaatgtataaatttgtaacaaacattggattttgtcaaaagtaccacattttcgatttttgtatattgtaaattgtgaaattttcaatatttttattttaaaaatctaattttaaaattcatgcacattagtttgtcccaaaaaaataaaaaataaaagctcatgcattataagccaatcacactaccttgtaatgttaattctaagagttagataattttgttatttgtagatatacaaaacaaatgattaaaaatacatttagtaaattttgcattgttcaacatacgtgctaacatatagccattgtttttcgacaaatctaaaaccaaaattttatactatttacatagaaaaaaaaaataggcatacggtgttatatcatttttgttttagctatattatagcgcgtggttcacacacatgatctaaagagcgtgttgaatccccaattattaaaaagaaagaatattggcatttacctagatattttgttttggttttgttatatatagcacatgaaatcttattcatcaaaacactaaattttgtttcttctctcaaatatatcgtcgtcttcattgcttaagtcatgaatcgtttatgcttttttaacaaagttgtaaaagttgcccgtggtgattcacctccttttgatcttgcttctttacctcccaaagaacaacgagatgtaaaattgattttgcttactttaagattgcagctacttacaaatatagtttatgttatctttatatgacctaaatttctctttttttgtagttgattggtgaaactttgttctttatggtggaagaacttgagccacagtttgcaccaaaaatcacaggaatgattcttgaattggaccaagacaaggtccttcatctgctggtaacacctaaagccttcaaagaaatggtcaaagaggcaatggaggtcctagcgcactcctttctgcaacagatgaaaattgctaggggaaaaagatgttagcaagttcctaccttccatgctccccgctaaactttgaaatgtttgtttggtttttgttcattaatatgagcaacaaaatgtggctttaagttgagttttaaatctttgttttcatttaaaaaaaaaaaaatcatatgttagtgtatccaaatgttttaagacaataataaaaataaaataagttctgcttcgtccaaataattactagagtggttataactgatgttttagttaagttgaatttttaatttgtaaacaatgtatcccttagtaatatctaaacttctttctttcatatttaatcttacttatattaaaatatatatatatatatttatattctattaaataagaaaaaaatatatatacatatatataatagtaataatttatgttgatttcaactatatcgataatgtaaagcatgactaaacactaaataaatgatatttttagtagcccgtaagatatttttattatcatgtattcaaaaagttttaatccaaacatatttatttaaatatttagatttattttactttgtatgatgtaagtagataatgtttagtttttattttactttgtatgatgtaagtagataatatttagtttttaccaaccaatctttttagttgctagttttttaccaaccatatataccctctatcctttttgtatttatatcttttaggataaaaggctaataatagtttgatttactttgttaacatatctatcatatacatcaagtgttgcttcaaaacataaaaccaagacatggaattttataatttatactagtattctcgttgtatcataacttatatttaaatttgtgtttgttgtaaacaatcgaaaagcatatagaattcgtatatattttataataataaagaaaaggaaaaaacaaaatcgagacaaatgaataataatcatgaaaaaatgtttttcatatgttcttatatattttcaatttgataaataccgaataaatgtttcaaagtaatttgactttttaagtcaaataaaatctctaaattataacagtgaatcacaatagaccaaatcaatcatagcaaatagatatgatttatgaaaaaatgagaacctaagttttaatgttatacgatataattagataatttaaaatatatgcataatatacatatactattatttttatttaatgtgttgaaggatacaaaattattaaaaccatagcgattacgtaatttattcactattcatcagtttcttaatccaaaagaaaaaaaagaagaagataaagaggtatttatatatcagatgttcaaaaaccctaaatcgcgtttcttctctcaaatctgccgccgccatcattgatccaggtattgctctaaccttgactcttcacgtcattcgcatattactctcctcctcgctgatccattcgaattctgcactcaaatcgtgtttttgtacatcatagtttcaagcattatgattctctctagccaatgacttttcttgcgattgaatccttttgcagtctcgttatcaaaagttgaagaatttagtttagtttggttgtgtagataagatttgtaatcgcaaaattcgatctttgttacagttatggattcgagttactctgattctcgtcccatgttcgtgcaatcaccttatggtggttggaatcaaacacagatgattgattcaatggctaatccaatgaacaatgaacaaggagacttgcattcactatctgaatcacaatcacaatctcaaccgtctcagcaattacagcctgcattgaaaaggcctagacttgttgatgataacttgtttaatcctgcttcgtcgtttcctcagccttcgagtagcaatccttggatggttccatctttgaaccctcctcctgtgaacaaagggactgctaatatattctataagactagaatgtgtgctaaattcagggcagggacttgtaggaatggtgaactctgtaattttgctcatgggattgaggatttgaggcagcctccgtcgaattggcaggaaattgttggacctcctcctgctggtcaagacagggagagggagagagagagggaaagggagagggaaagaccgtctttggcgcctgttgtgaataataattgggaagatgatcagaagataatcttgaggatgaagctttgtaggaagttttgttttggggaagagtgtccttatggggacaggtgcaattttattcatgaggatctgtcaaagtttcgtgaggactcggggaagttgagagagagctcggttataagtgttggtgctactgctgctgatcaaccatctgatactgcttctaatcttattgaagtaaatagacaaggaagcatcccggtacctgcacctatgaacaatggtggtgttgtcaagactgtgtactggaagacgaggttgtgcatgaagtttgacatcacgggtcaatgtccttttggcgataagtgtcactttgctcatggccaagcaggtatgttatatgttgaacatgtatctttgctaatgcgaccttatattatagtatcctagtatagatttgcaagttctgtgtatacaggctatctctgaattctcttcttttgaccgacatttgtttgatcttgatttggttgttgattacgaaattgcagagttgcataactctgttggaagggtagaaggagaagctatgaacgcggtagcgtctgtgaataaacaagcagtggtacctgcgaatgaagcatttgcaatgaaaccgattacacaagtaacagcagattcctctggtctgaatgaagaagggcggcgaaagaagtgtttgctcaagtggagcgactccaagaagattaaccgaatatatggagactggatcgatgatttaccggtgggtcaaaagtcgacaaagccagtagagagttgagttttctagcctggtttcatttgtctcgtccttttgatgatcaaaactgataaagctttggtcgaaaattttgaagagtagaaacactctttattttgttcattagcaattctttgattcgctatagcttagaatattgcttttgttataatctttgattacacaaaaaaagtggcttggctcactaatagcatcttattcttaatttgtttcctttggcttctaatgttcatcattatatggataggtttcgtatttcgtttgccttttaatgttctaacgaatcggaagagatatagaaggaattgggcgtatcctaaatttggcctctagtgtttgttgttggttgacaaaataaaaatgtttgttgttgacttttgttttcagattaaggtttaattatctacatcaaagtgcattaaggttaatcggatgttaaaaataaaccactttaccgatttatcaattttcttatatgataaaccaaaaccggtacggtttgctaccgttagattttggatgctcaaattaaatcggttggatggtgctagtttttagaataacgatcatacattctcttttctaatctgttgatatattatatacatacgaatgcttattgttaggtacttaggttcatcgcatgcaaacaaaatcatggaattgtaccatcaatttttaaaaatatatatgtctaaactacgaataatgcagaataaatccatttaacaaagggaccataatgattctttagtgccaagcgatctttttggtttgtttccctacaaaagaattaataaagatttcatactaacggcttaaagtgattaatcatattgctatggctatggcaatacttatttgataatttcgtcgtagctttattctttttatagaaatcacacaaaatatatgggccctcaaattaatagtgttcgtaacgtctcctttactattccccacttctccatttctatgaacttttctttttgctactattgtttttgtattcttttcaacatgacatgatgagttattaaagagctgttgtaggtagagagtcgtagtaaaaaactaaaactgtcggtggaggctggagagcacttgggaatcctatggccctcccaaaaacatataaaagataagaaaagtagtgaaatatagtaataattattgtctttgttagtgatttagtggattgtctaaccatgattagtttatatatttgttttctcacaaataatgaaagtaggtagtatcaatatctagacctaatattttccatatatttaggtcaactctttcatatctggttgatcagtaatcatacaacgttggaattgtttgttttgtttctattataaactaaaacattggtaaaaatagattttcatttgtggaattttcgtcaagtcataattcacttgtttgaaaacaatgagaaatgatacgaaagcaaaaaggaaaccaagaaaagaagagatggcaaaagtaaattaacaaagaaagaagctacaagcaaatgtcattgtcattaggtagcactaaatgtcttgtggacatcattaaactccttaattactttgcaaatattagtctaattgtttttctccctgtcattcacgggcagatattagtctaaaccatccaaaattgatggttaagtgtttaaattgtaattatcaatggggagaaattgttttcatgatggatgatggtaaaaattatgaaagcaaagagttaaagcagtttcttcataaaaactttgtatattaattttagagtacagaacacattgttaacacctctagttactttaatgttttatttaagagttgaaacgtaaacaattaatatcagtgtcacatagtcacttgatgcctctctctaccttatttacttgtaaagattcatctctcttctttaattttcctcttcttgttctcttttgttggttttgttaaatacttcttttgttgcagagattactcagagtctcagatacttgttcaaccttaaaactatatacgactatgtaagattcttgcatcccttctctccttcattgaacgtttttgtatattgttctttgattattcatactcaaatataaagtttgatgtttgaaattatgctctatctcctttgtaaatgtgttgcagaagacatcttacagagtcaatggaaacaaaccagtggcggtcgaggaaaaagatagaatcagctgcagaaacactccaagtttcttctagaagaggcagaggacaggtaaagaaaattttgcagaaattgtcaaagtttgctttaattgttccatgttttcttgagcaagacttgatcattcattatcatcttctgttgtgtctatgtattgcttgtgaacttctatggcttagtaaatgtcttttaaatgatgatttgttactttggtattggtctttaggcacgtatggttcctcctgtaagtggagttagatccgagagagctcgaaaaagtctaagtgagaagctagagactgtagctttaaactctcctaagaaagatgctcgtgtgagtctttatggcgagaaaagtgtagtagatgagattttcctagaagatgaagaaatgggtcatgaaactggtttgaagaatggagagtcgtcgcctttttgtggtgtatcggacaagcttctgcagcgaatcgagcttcttgggagagaccatgaggcaacgagacttgataacaacaagttcaggtcaatcgaatctatgaaaaagagacaagaagaatcggcatgtgatgatctagttgatatgaagacaaagattcaaacgttagctgcggagaacactcagcttaagaagtctcttgtggcgaaagaagagcttgcggtaagtcttcaagagcgtaaatttcaggtggaatcagaattcgaagcgttaatgactagattagattcaacggagaaagaaaacgcattcttgagatatgagtatactgttcttgagaaagatcttcaggtaaaaacagaggaaacagagcatactcgcaggtctatggagctaacgcataagcagcaacttaggaatgtgaacaagattgttgagcttgaagctgaatgccaaaggttaagacttctctttcgaaagaagtttccagagaagtctatatctatgaggaatgaaggtgaagaaaagaagatggagatgagaagacgaaacgctaataagagcgatatgatgatgagagatgaagttcagagcaggaagctgaagtatgatcttttgatggagcagattgggaatgttagggcagagaacaagaatctaatggacataattatgaagaaaaacattgagatcaaagatcttagccgcgggcagaaaccgttagaggcttcgagtttcgatattcaaagcgaaagtagtgtgatgagcccctgtggttccaaggagatgaagttactgatggatgattttaatgagatggagaagttagccattgtgtgtactgagaaagatccaagagtggatgatgagaaggaaggatcttttgattggattcaagttgttttgagcgctataacgaagcaagagaggatatcgaaacgcggtgttaaagaactcttacaagacattaagattgctttaggatgtatggatgaaaatgataatgtagaaagaaagaaaggtgaagaagatcctctctgcatcacatggaaatctaataacgaatcgggtccaatgactaaggatgagatcaagagacatttgggtttgacgaaatcagataaggtggagaagattgaatctgatgaaaagcaagaactgagaaagaagcttgaggaatcagtggagaagatcagaaacttagaagcagagatgaaaacattgagagagaataaggaaaaggtagaggcagagatggaaacggagaaatcgatgaaggaagatcttgatacaaagctgaacataacaagagctaacctcaacgagacacagaagaagttgtcttctcttgaagtagaatttgattacagaaagagctgttgtgaagaactcgaagggacttgcatcgagcttcagcttcagctagaaaggtaactgaaacaataatcacatctaaagctttccacatttcttctatttaaagaaatttcatcacttatctatgcgtttttgcagtgttgaaacaaagaaaccgacgcagagaaacaaaaacgtaagtattacaaaccaaaatataaaatttgagtcatgtgtgtttgttgatgatgatggagtttttgtttgcaggggtgggatatagcaacagcttctgtgaagttatcagagtgtcaagaaacgattaccagtttacggaagcaactaagagcgttatctacaacagaaacaagcagcaccattaaatttctacacaaaagatcttctctccgggaaaatatagcagaggatgatactaacagagttgctcaagatgatgatggtaaccgttacaacgctttgatcgtgtacgaaccagtgaaggcgagaggtgagaagatggagatggtaccgagaaagaagcaaggattagggttcttgaaaaaactgttgttcaggaggaaaagagtgagcagcaagaaatgtcttgccttgactatgtgatgaagaaaactaaactaaaaaggcttgtgtgtgtgtaatgagtgaacagtgaaaactgcttttgggtatgtttgatgtgtctactctatgagatgtgatgagtttagactcttatttgatctaataaactaaaataaaaggaatgtgttcaatccacgttaacccggaatgtgaaaaaaccaaactgagttttttaagttgttaaaataatcttctttgataatctaacttatatcaaaacctgaaaaaaaaatcaagatttgctttttcttctaggatctatagctaaagaaaatttgaatcaacattgtgaatgaaaagtgcagttcatataagattggactttattttgattacttttatgttctttttagtagtctacaccttcatagttcatatacacacactatcatatttgagtccatactaactactttattgtgttgcagatattcagccatggcccaagtctaggcccagtttgtttattgttcatttgtttgaccatgtagccgatcaatgatttcttgcaagttgcaaccatttaaagtacttttggggtccttaaaatagagactaatcgaaatgttaacaaatgctttaacaccattcaacaagaaaaaactcaagttgcacccaaaaaatagaaaaaggagacacttaaaagaagataaattaacaagagctctacaacacaaagtacaaactaccataatgacgttcactagaagcttacatgtcgataccaaatttgccaacatgtcgataccaaaatttacctgtaaaaatgcagaaaaaagttgacttacctttagactttaaactttaaaaagcctttaagcatatcttccatttgcttctttaacaacttttcccaactcaaaaggccaatcaaataacaaaataattactttacatacatactgaaaaaaaaaaaaactaattcatggtcatcaaaaagcttctgtatattatcttttcttcttcacatctttccatcaaatacacacaaaaaatgaccattatttttccttctaattaaaaaaaaaacatttttttaataattactgtgaaaaaacaatgttttgaaaaaaaaaaatcgagaaatcaaaaagggaccacttggctgctgcaaccaaagtcatcggagttagcgaaggaattgtagtcaggccatgaatctctcagaagcttcaataacttctgtgctttcttcttcgctctctccgtacactcactctgcaccatcaacaacaactgtaccaccactcccgcccccgccgcttcctccctccacctttcctccgccgtacaaagcgctaacaacgcccccgccgcatactccgtcgcgcgatccgaaactctcaatatcgttttaactaacaacggcaccgttaaagcgtgctcaccgaacgccgcgcatccttccggcgttcggcagagtagctccaccgtcgctaaggctcgctccgtatcgcatctatcgaaatccgccgcgagtctgtctattagaatctccggcgcaccggctgtgatcgcgatgtgtcgcgtcgatttcactgaacagagcgcgaacagagttttgattccgattttgagagctcgtcgtgacgaaatcggatttctcagaagatcgagaactccttcgaatacagattctgaattcgaaatcgaacctttcaggtccgccgatttggttcccgtcgaaacaatctcgatcaacgcggcggcgttaacgcgtgtttcaatcgacgaatcgaataacaaccgggtcaaaaactcgacccgacccggatccgacgatatcgaaacaaactggttcggctccgttatcggtaacataacaagtagagctaaagactcagagactaactccgacgacgtcgtttcagagaacagaatcttaatcaaaatctctgtagcgttatgagctgcgatcaaaacgcgatttttatcagaatcacgagcgaaaccacgtaaacggcggagagcggcggcgcgtgaacgaacagagacgtgggttcctgttatagcagaggcttgactgagaagagcacgaacagaggttggatcagctggttgtttaggagtagggatacgttcgactccattggagcggttagcgacgcaccattcttggatgagacgacggagagtgtggttagggatgagtgtgaagtcggagagaggagctcgtgtgactggacatgtcgtgttgttaccgatggagacccatgactcgatgctggctcggtcgtaggtttggccggtgcagacggtgactgggtcttgcataagttcgagtgatattggacatctgaaatgatatggtatttggattccaagatccaatggttctatattcctaggcattaagaaacttgagaaacagagagaagaagaagaagaagaaaggtgagattgtttgttgtgagcgttaagagtatgaggaacgagagcttatctgggtatgagcccacacgtgtgccatttataactttgttacctgctggattatttaataatatattctgttaaattcgtgatgttaatttttaatcaagtgaacatcatgagatgatatatacgtaaatatgttttgtgggagaaagtcgcatctttgaagtgaagcttaagatttatatgaatgatatacaattatacatctctttatgataatttttacgactatgtttatgttctattataacgttcaaatggatttgtaaaaactctcaataatgcttaatttgaacaaaataaataaacatggttgatttttgtcaaagcatacaaaatatatattttgactgctcaaatgagtctaattttgaaaatgtttatatgaaacaacaaaacatgttggaacctgtcgatttagtacgtagttctcaactatatgagcaaaatattaaatatggatgatgtaatttatacaatcggtttagatttctaaactgccttagttatatataagtcgttgttgattaatattaaattcagaattttccacataattgaaagcttaacgaatcagcgttcgatatatctacaaatcaacaataatgaataatcatgacattcaaacttttttcaatcgcaagcttcaagttacaatcgcttttaatcactacacacaaccaccaaagccattgttgtgttgtctatgtatatatcacaaaaacaagatctagattgaatgtgtgatgtagattttgtttgctataaataatagaatttggtcaaactaaaccagtgaattgcgaaagactaggaacgaagttgggacctacgagacaacttccacttacttgtgttaacatcaaagcccgtgataatcacccataataatacaaccaaatcttaatgcttgactgtttttttcttttacggcaaaaactttgactcgttttaattcacgtatgctttaaataccacttctttttgcacgcatctttcaatgctttcattttctatcgctttagttttacactttgcttattttttcgtttactgacttaggattctccaagagtttacatttctccaaattgtttctatatgtctttctttaataatagaattttttattttcttcacatatatataaaaagaactaattttgtttcaatcaattgcttatttaagtaaaaatggtagggataaaattaacaattataaatacgtatagaatgtagaaaacacctaacattactaagaagaagaaaaattcaaaacatttaacaaattgaaaatgaaggattaatactccattggtatttttgttttttccataatggaactcgattttttacaagttcaaggccataattacacataggtctacaaaactagggacaaaagttgtcatcggttaggtaatctatatagaccaattcatatgagtcaaaaactagttacttactagtcagtaacttttagctcgtttcctataacactatctacaatggttactcatttataacatccactttttcacttttaatactctacatcatcttctttcttttccacattattattcaacacctacacaatttttatctttacaatggttttgtttaataaaattacaacaccttaccctaccatttttatttcatatttttcattttatttatagttatgtttttttgtgattacatattattaatcatcgttaatatcaaactaaatttaaataattaaatatgaaataatcttatgaaacagtttttgttttaatattttatttattttatataagaatatttaaagttaaaacaaaagtttattggagactatattttttttttgtctaaaaacggttttttttttctgtatccaaatcaaatgaaaatagtctctatttatagagaatgaaaaattataaattttgatataaattttaatatttttatgtataaatattatgaaataattgaaattatataattaaaatgaaacaaaaaacataaaaatcaaagcaaccaatcaaaatataacatttgtcacacttatcttctctctcttattttcacgggtgttgatatttatcaacactaaatttgccacctcacttatttttttattacaacacaccattgtagtggattttttttttccaacagttgtaaaatagtttacaacagaccattgtaagtagtctaagcattgataaaaagtcaatgactatatattttacttagtagtcaagactcgaaagtcgaaaccctagatcgattttgatatggcgcttgaagatttagacttcactcaattatttcgtttcagaaataccagcattcaaagtagtgaaatttaagataagtttatgtgttggctttaagtaggatcgaaacttcaacgataactttttctagacttttgacaaaagttgtcgtggaaaaaaatcactgctatcagtttaaaataaactagctaatataattacattttaaaaccccattctaaaatataaaatattgccatgtctagataatgtgtaaatagtttcagtttaatttattttaccttcattataagtttatatgcatatgttggctctgttatcttcatttcttttttggccagtgaatggttctgttatcgaaaattatcgaacgaagacaaatattccgcgacaaatacatcgaaatcaaaataaattcgggaggtggacttggaccttaatatttccgatctttttttttctacttttaatttactttttttttttttgtatacatcaaaactcaaaagggaagaatcttcctgtccattgcattgtcctcatgggaacaactaagaagcattttaatgtgtatttttgtttctgtttttgttctttgtctaatgcctttgtctcgtcctctcccggtgaaacatagaatctcttaccgcaaacgaaaacttgaaatatatttgtttagaagtatgaaaaaatagtacgttgcatttagtcctaatgctgatttttttttgttataatccactgtccgaaagtcgaaagactataaaataaaaataaatagagtgggcgtgacaaactaattaatgctacttagagattaatactactaatgacaagaaaaaaaaaagattaatgacgatgcagcagtctatttaataagacgtgttgttgttatataattacttgataccaaatttcgtgacattattagtgcctagtttgtccaaaaccgatatatgtataaatagatcttgatcaagataattgtcatcgtcatgcatgtggtaatggagcgagtcaaaggtcaaagaatgaagacatgagtgtttcgaagctggtccagcttcgtcctctcctacctcgtttttgttttcttcttttatgtttctttgtttcgaaggctaaatcggttagattctgaaatattttcatcgatttaagaagagcggtttggtccattatcccttagatatattattttgataactcattgcaaatcgtgattgttccacttctacattacctatgaatattatgatgattttgtcttttagcccttgctacatatttctacgagtaagttcacccaaacataatattatatacgacatactcacatacgtagctgtagtgtaatgagagtcaattaggtaatgcttgattataaaatcttttattccaagtaaagtcatggagaatttgttcatttgctcgacacgtatcctctatcctcttgtagtgaagaaatgagtgtaacaagaattttaatacactttttagaaagataaaaagggtttttaataatatatatatatttcatataagaaaaagagatttaacgttttacatgctaccaatcacaatgtcaattctggattagcagttgaaaataacaaaataagaaggtcccattatcactaaaaatgatccttaaaatgaattattttttccattctgaacaaaacaaaacgacgtcgtatattagtggagatgaagtgagttacacgcgtcacgcgtgtgtatgaaacagtgcgactctccacgacgtaccctactgtctccagtcaaccctgcactgtcgttgttgcacgtgcttctctcttctcccacacgtgcttcccagctcattctctctgtttttttttcagtaacaaaaatattccgaaaacaacaatacatactaaacaaataaaaacaatactcgaaaccattattaatatttttttccatttaaaaatgatttgattccaacattcctaacaattactgccactctcggataagttcagatgctttttttgcctttacatttttgtttcgatgtgtagcttttctccaatggtttcattttgcttcgtttgtactttattctttattctctctataaagaaacaagacgatgcatgcatgaacgttatataatcttatcacacttattagatttaatcaatagagcatcacggaaacaaattcatagttaaaaatcgtttttttcgaatcgattattttacaagtatgaaaaccgccatacatactttgatataattatataaaatggttgggacgtccaattgacaaacctcaatatttaataacaacttcgcattcattttccgtaatagatatactttttaatgatcatttcaagatatagaatagagtttcagaaaattttcaaaatttaaatatataacttactatcagaaaagttataaaataaaaatatatgtcataaatttatcgtctaattgtttcaaatggagaatataaatacacaaattatttcttaattaaaatatgcaaatttttattttaagaaaacatctttttcgtttttttttatatccagacaagacatcagataaaaatttataaatgtaaatgccaacgtttgatgaaacactcaatgctatattttaaatattaagcattcgaatttaacatgtaactatctaaacaaagaaatacaaaataataataataatacaaacaaattaaaacaaaacaatggacccctagctagtatagtatctatgcgattgtcatgtttagtaatcgatagccgatagttagactgttagaacttaagaatcataggcagtaccagaaagaagtattggcccatatcgaagacttgaagtgaccaaattagtccatgtaaatcaaaacgtaaagtaattgggtcggatacattttgcagttgggctcatataactttgaaatatctctctcgtagtctcgtataaaggatcggttatattagaggaaaaaatatatagattttttttttttgataaaggacaaatagaagttggcctttcaatatacaaagaataaagatcaattttgggtgtggatactgataaatgatttaaatgtaacaagaattaacattacttcatattcaatggacaatggttatccttttcttcgtcgtcgcccgactattaggagatgacgagtcatcgtttatcttaattatttagaaagcaattgatttagtacgtgagttaaaataatttcgttgcacgttgtccggccgtttatgtctttatgacgtgcctatgatcttatctaactatcattttctcttccttactcaacatcctaaaagaactattcaaatttattagaattccattttcttgagacatgaatactatcaataataattaaactatagttaaacagaaaggcgtaataacataaccaaagccaatgggtttttgcttgacttcccggaaatttaaaagattatgtggttcgataatttacccccaaattattgatgagcaagtagtagtctttagaaaatggagatggacagacctttttcccatctttaaacttgtaattaataaagactttttagactattgcaatactataatgaatcgtgtagtgttgtgttgtgttgatctctgtgttggaacccaaatacaaaaaaatattgtgctaaaaagtgctgcattgatttacaacaatcaaatactcaaccatatttcaagtgggttgaattttaataaggatgaatgattcaagcatcaatctataaacaccaacaacgaaaagcttctattcacaatcgaatgttgtaatcacatacatatatataaactgaaaacaatttttagttaaatatttttagttattaaaagttggcaacttctacttaatgttatatatgttgcacctactattagacaatatctagttaaaacatagcaaaagaaagcttgtggccggtgagaatacaatgaagaatgtaaccccaaaatcatcccaatttccactattttgcctcttaataatagtaaacaattaataagggaacgcatgataaaagttcgaagattatgtacatatgaatatttggttaaacaagacatatgatgttgttacaaacgaggattacataatgtaatagtaatctaaagtcttagggactaagagttcctcattttaatttttaatttgaataaaaattaaaatgatcaatataagagtttttaagatgcaagcaacacaaaaaaacaaaaaataagaaatgaaaaaggaatatttttcattagttagtgtacattttaatagtaataccgtgtatgaccacgacatcatcaaataataataatatgatatcgtatgtaatttttatatagtagtgtgttatttaaaagtttccaaagtgcgtgtaacatatgggttcctagtaccttccgggaatggttagcgtcgtcaagaaactactctgtaaaaagttagaattaggttttccaaactaagaaacatgcttgtaaccaaaatttaaacaatggacaaaatacgaatggaattatcttgcccatgtgatgtgacgtgttttttattttcaatttgtttttattccagaaaataaaataatgacacgttggagccaatacgaagaacacatctatccatcccaatcgctctccacttttctgctcttcgacgacaaaagtttcaaactctataaatacttgaacgcaacagttacaaaaatgtcaaatcgaaaacaaacacaaaaagcaaacaaatatggctacttcaatcaaatctataaccctagctctcttgatattctcagtgttactaatctccttgtctctcggctccgtcacagcgacggagactacacgaaacgaggcggaggcacgacggatgtatgaaaggtggcttgttgagaatcggaagaactataatggtctcggagagaaagagagacgctttgagatcttcaaagacaacttgaagttcgtcgaagagcacagttccatcccgaatcggacttacgaagtcgggttgacccggttcgctgatttgactaacgatgagtttcgtgcgatttacttgaggagcaagatggagagaactagggttccggtgaagggagagaagtatttgtataaggttggagatagcttacctgatgctatcgattggagagctaaaggtgctgttaatccagtcaaagatcaaggatcctgtggtaagtccaattgcgtttgcgttttaatcgcttattttttggcgtttctattttttggttttgagctaatcagggattttttttgggttggttgatataacaggaagttgttgggcgttttccgcgattggagcggttgaaggtataaatcagattaagacaggagagttgatatctttgtctgagcaagaacttgttgattgtgacacaagttacaatgatggatgtggtggaggtcttatggattatgcttttaagttcattattgaaaacggtggtattgatacagaggaagattatccttatattgcaactgatgttaacgtgtgcaattctgataaggtaaagaaccactgatcagtgataacaacgacattgtttgtactttatttatttatggtgtatagtacttatctgttatgttctgttttttctttcaactcatgcagaagaacactcgtgttgttaccatcgatggttatgaggatgttcctcaaaacgatgagaagtctttgaagaaggctcttgctaatcaacctattagtgttgccattgaagctggtggcagagctttccagctttacacatctgtaattttctatgaaccttactttggtttctcttaatccaagatttgtttcgagttcataaaataatcccttttgttgttgttttcagggtgtgtttacaggaacatgtggaacatctttggaccatggtgttgtagctgtgggatacggatcagaaggtggtcaagactactggattgttcgtaactcatggggatcaaactggggagaaagcggatactttaagctcgaacgtaacatcaaagagtcatcagggaaatgcggtgtggcgatgatggcttcttaccctaccaaatcatcaggctcaaacccaccaaaaccgccagcgccttcaccggttgtttgtgacaagtctaacacttgtccagctaagtccacttgttgttgcctatatgagtacaatggtaaatgctatagctggggatgttgtccgtatgagtcagccacttgttgcgatgatggttctagctgctgcccccagtcataccctgtctgcgatttaaaggccaatacttgtagaatggttagtttcttgttctctcttatggcttaaagactttgcttttgtttgtttacttgactgattcgtttatgaaatttggtgtccacagaagggaaacagtccgttaagcataaaagctttgacacgaggaccagcgattgcgaccacaaagtctacaaacatgctagtgggcagcgcttgaggagagataatacaaacgaagaaccgatttgttttcagcccacgttatcaagattcagtcttttgtctttagacacttccaagttggatcatagtttgattactcttgtcaaatttaatgttatcttggatttgattttacttgatgtaaatgtttaagaagtaatctgatatttgcttccataacattgtgtcatcttcatttgataagtttgtaacagagtatcatcattcacatgatgtaagatagattctagtttaaaacataacgtgttaagctataggaaaacagtttggtgatttaaccaaaataaccaaggaaaagctgatccactttaatcaactacaaaatttgttctcttaaccttccagtaagatagtaaaaaacatctgtacaataatgccagacattagcgttaccatacttcctttggcgatcatcatagaatccatacacctagatagcataaatgattttgtgttagagcatccacattggtgggctctcaaaaatataatctctcacgtttgatgaaaagattataaattgtaattttctagaattaaatacgtgacagaatcatatgattttgatatttaaaaatatttattggtctgaccaataaaatatacaaaaataataaagaaaaatcccaaaaacacaactaataattcatctgcctcttcttgtcttgacgtcaactgtttgcagaaatctcactgaaactagagagaaaaccaaatggcggctactccaatcagagttatagtctcagctcttgtgatcctctcggtattactactttcctcgtctctgggagtcgccacagagacagaaattgagcggaacgagacagaggtgcggctgatgtacgagcaatggcttgtggagaatcgaaagaactataatggtcttggagagaaagagagacgattcaagatcttcaaagacaacttgaagtttgtcgatgaacacaattctgttccggatcggacttttgaagtagggttgaccaggttcgctgatctaacaaatgaagagtttagagcgatttatttaaggaagaagatggaaagaactaaagattcggtgaaaactgagagatatttgtacaaagaaggagatgttttgcctgatgaagtagattggagagcgaatggcgcagttgtttcagtcaaagatcaaggaaactgtggtatgtatgcattttagttttcttagctttttgattattggataacgttttagagctagaaacgattgagatttatcgatgaataggaagttgttgggcgttttctgcggttggagcagtggaagggatcaaccagatcactaccggagagttgatatctttgtcggagcaagaactcgttgactgtgacagaggttttgtcaacgctggatgtgatggaggtatcatgaactatgcttttgagttcattatgaaaaatggtggtattgagacagatcaagattacccttataacgccaacgatcttggcttgtgcaatgcagataaggttcttaaaccaaacataatgactttagtttagttatgactcaatttggtgtgggaatattaacatttcatctgtgactgatattgcagaataacaatactcgtgttgttacaattgatggttatgaagatgttcctagagacgatgagaagtctttgaaaaaggctgttgctcatcaacctgttagtgttgctattgaagctagtagccaagctttccagctttacaaatccgtaaattttcaatcacttaaaaagcttgattgattctttattcttgattcgattattggtttttctttaaaccacaaaattatatgttttgtgttcatttttcagggtgtgatgacaggaacatgtggaatatctttggaccatggtgtagtagtggttggatatggatccacaagtggtgaagattattggatcattcgcaattcatgggggttgaattggggagatagcggttacgttaagctccaacgtaacatcgatgatccatttgggaaatgtggtatagcaatgatgccttcttacccgaccaaatcatcattcccatcgtcatttgatttgttgtctgagatttgatttgatcttcctgtaaatgattaataactaaatattttttattacataatccaatgggtcaagtcaaatatttgaaagtctcacaacatgttcacattaatgaagattccaatcttgtcttgtgtttgaaggaacctgtttggcagccgcagcacaatctaagtccagaaagaaatgtgatgctgatggttttggttgttgtcacatgctctgtttttttttccttgtccaatagacacaaaatagaaaccaaataagaaaaagaaaagagttatgaattgaacccgatccgaaccaaaacctaacccgatcagtctcaacggaatctctccatctatagagttataaagtgagcttagcctagttggtttgcattccaagtattcagctcaaattcgattctttatatctcgagtctttcactgtgacggcttgttgttaccgtgatagcaatctacgattttgactctgatgatcagtacgtgtatttgaagggaaatacttacaaatttgctacagctgaaacaataacgcacttaagccttcattgctcaaatttggtttttcaatagagaaatctgtacttgtttctcattgtctgtgctctgaattttctttaacacacaactcactcccttacaaggtacaaagttgtacatatagaaattattcccctttaagttctaattactaaggtacataaattacttgaaatcactatgcgttgcttttgtctttttgggcatccgatgttgaaacacataagatccaacactatatcttcccctcatttcaaaatttgtagctgtaagagccggtgtgaatctgaatgtattcttatgtatgtctactgccacagttccctctataatataatctatattattagccattttcattgtgtggaattgcatgactgctctatagttagtcaaaaactgcatgatcaaacgattgtgaggcggatatagaaagcttgtttgtcaaggcattgtagtatatatctatgcaagtcgcaatttgccatttcagtaattcacagaccgaaatagttttgcttgatcattgatctcacattgctacgaagtagtattatatattgtgaacacatgaagtagccaaagccatttgtttcgtttttgcggatcaaagacattgctacaaagctagtttaatcaccataaagaatataagtacagctttaagaacgaaattgaatatgtacatcatattccaatgggtttccattttactccagtcttatatcagcatttggagaacttgtttagcttcacaattaagtccagaaagaataatgttttttactctgttcgatatatttacttttttaaaaaaaaaaggggattcatatgaattactaggaagtgtctcacgcattgcgttggtttgaaattgatataatttaaatatgcaatattttgtaactatatattatatttataaaagtttggttaactatatactaataaatgatacctaatgaattgtattttggcgcaaaaaatattatactaataaatgataccttattaataaaaataaataattattaaaaggcattttataaatgttaagagatttgtttaagatatatatatatatatatataattaaattgagtgaatatagtaaatagtgtatttaaattttaaagaaatgacacatgtcgaaagaatagaacgctactggtcagcttcttaaagcatgagtttaagaaaactttaattttatttaaaatgaattgatattttggctcaaaaacagtaaataaaatatatattatttttgtcttaaaaaagtaaatattaaaattttataatatttgttttagtttgaaattattttagtataaaattaattgatattttgccgaaaaaagtattatactaataaatgataccaaattaattgatgttttggcgcaaaaaaaatattatactaataaatgatacctcattaataaaaataaataattattaaaaggcactttacaaatgttaagagatttgcttaagatatatatatactagattttaacccgcggtataccgcgggaataatttattttttaatgttagtatatataaaagtttacaaattgcatctatctataaaatatttttattttatagtttacaattgttattaagtaacgtcctgccaaacccgtcccgtcaacccatcccgtaaaaaaacccatttattttattaatgttgatcttatttatgatatgtttatgaatcattgtctaaatattttgtaattttgtagtaattaaatgctatcaaattatatctatgcgctttgatgattataatccaattgttatagtcatggagaaaagtaatatcaaaaatgataattttgtagtaattaaatgatattaaatattttggaagttttattttagtaaataatcgtgtaatcgtgtagttaatgtgaagagattttgggaagattgttaaatgtcaaatatttaattcgaaattttttttctaattatcaaaaacaaacatcaaaatctagtggcagccattgtaaataagtcccaactacaggatttatttcacaaaatggctgcaaaaatgtatatataggtacacaatagtgaataaagaaaatagtttaaaagcaaaaccctaaataaaataaaagattgagaggcacgttttcctcaaagatcaatgacgatacccgagctgccaaaggatttgatagaggagatactctgttacgttccggcgacatatctgaaacgattacgttctacttgcaaaggatggaaccgtttattcaaagatgatcgaagattcgccaaaaagcattatgacaaagccgcaaagcagtttctacccctcatgtcaaccaacgaagagctttgtgcgatgagcgtcaatctccatggaacgataccatctttagaggtaaaagataagccttggctattcgtttcagattctaagcattgtgatatcgaaatatctcgaatctttcacagtggcggcttgttgttatgcttctcccgagacggcgaaatttcaatcatagtttggaacccgttaactagtgaaaccaggttgattcgaacccggaatcgtcgcgataaaggacgcaactttgttcttggatactatcaagaagacaaaaaaacctactacaaaatcttgagcttttatcttgatagcaaagatttcgaaatcttcgagtttaactctgattcatggaggtttattgatgatatctgtccaggcttgtccttgctatactctgatcaatgcgtgtctttgaagggaaatacatacatgtttgctatagatgacttaagtgtatccttgctcaaatatgatttttcaacagagacatctgttcctgtacctcttccctataaaagtcgttcttttgaagctattagtctttccgtggttagagaagagaagctctctgtgttattacagcgagataaaagttcgaaaactgagatatgggtgacaaatgtgattgatgaaaccaccaccaaagtgatggtggtgtcgtggagcaaggtcttatcattggatttgagccctgatcttaaaattaggtatggagaaagtttcttgctggacgaagagaagaaagtgatcatgatttttaataaccggatggaagaagagaacaaatccgaagacaaactatacattattggggacgacgataataaagccacacaagtatatacaatccatggatatggaccagctgtttttaactattttccaagtttggttcaaatcgagcaaagctctaggcaagaggaaaagagttgactgaataaacatgtaatctccattttttgttctcttaacgtaaacatgttcaaaacaaagatttaaatccatactacaaggtgtttttggtgtttttaataaatattatggtgtttttttaatttatatatttgacctttgaattatgaaattcagagtatagataccaaattaatttatatatataacaccacaatatttataaaaagaatttgtggtctattttgtgatatatttttttatataccaaaataaataaataaaataaataaaaagtattgttcttctagataacacatcttttaagttaaaattgagttaaaatagtcaaaatttaattaattttagttaaattatgggtaaggcaaacttgatgaatttctattagttaactgatcgattcaattagaaacgtagttttagaataaaacaaaaatatatgtagctttatctagattaaaaatttttttgataaatttttcagtgataaaaagtttggaatggaaaactgaaattataacaaaaaattcaggcaaccctcttcacaagtttattttagtaagctcttggaattttatttaacgttaaaataaattttggagagatcacgtgcaacgttggattcagatctaaaaaccatcaagatctaacggcaaggattaattgttgactgaaactccccacgtgacttgagatcaccgatacactgtgtttttgtttttccccaatctaaaaatgtatctctctcccgaaaatttaaatccctagctattaccttactcgtcgttctcttttgattttcatttcccgaagaagcgttttctcaggatatgcttctcgatctctgaggttttccccttcaacttctattggatgttccttttttggatttggtcattattatgtgattccttttttcctgatctgaattcgagatttttattcctttgattaaatcctcaaattttgcatgttttattaatttcctgattcagaacatgttttatttgatttagatgtataaagaatcttttactcaaatgtattttgattgatgcttacagaagaaagggatttgcaaatttgagaattcacattttggattaagatagaaacgatgtcgtctgagtcaccgaatttgcctgctgctgcgggaacagtaccagataatcatcctcctcctcctcctgttgttactgctgcagaagctggaagcgatgattcacctaaaggagtagcatcaaaactatctgctgctgggatttcaaattgggccaaaaacttgaaagttccacagccttttgcttccacacaaaacgactctggtgtcgaaaacaccgagaagtctgcgtttgcaaagtttacaagcgggttagggattcgtttatctccgaaatctcctcaaacgaatgacactaccacagaaggaacttcgagtgctacagaatctagttttattgggactattacgaaaggtttggtagatacatcaaagaatgctgtcaaggcagtacaagtcaaggctcgacatgctgtatcacagaacaaacgaagatatcaggaaggaggatttgatttggatttgacgtacataacagagaacatcattgcaatggggtttcctgctggtgatatgagttctggcttttttggatatgttgaggtgagtcaataagcatgcttttaatcgttccccctggatttgtttcaagttaatatgattaatattcgttcaaaacatcgttgtagggtttctaccgtaaccaaatggaagaagttattaactttcttgaaactcaacacaaggtactactacttatttgttagtgaaacaaattaatcccttatctttggccatgtgacgcacttatgctttattgttgttgatctagctatttctcccttttgtatcacttggaatatatttttaacataaagactgggtcaccttatgttataagttcttgatgatatatctgtattcataagctgctctgcataatgacatattgccgaatagaagattctactcaaattaaagatattagtctgtggatacttatattgtgtttctagaattttgtcatattagttggatttcaatgatataagaaatttttcattggcattttgatattcatatctcaataatagctaatgtgtctaattattttcaaacgtgttcaatctcgtcttaccatctttctttttgagattaacttatatatgatgtagtttgcagtttgttacagccttatatttttaggttctgctcttctcttgtactgtttttataattgctttgttcttttttgtagggaaaatacaaggtttacaatctttgttcagagagattgtatgatgtatcattatttgaagggaaggtatgttatcccttattcttcttttttcctcttttccttgcatctggcgaacacatggcttccttaagaaaaaatggcttagtcaaaattcagaaaatttgctccgtagatcttccactggcttagagaaaattcagaaaaaatggcttagtcaaaattcaagtttctttagctctggagtacttattaaacagtatccaccaaaaagattgtttacattgttgcatatgtacaaagttgaatcttgtgataatttgctcattttcttacctgaatcgttggacatgatcatataaaaaccggctgccatgaagtggcttaattctctgttgcagataatgtagccacttcttctgtacggcatcatttctttttctaggttgataactattatgttcaaataatgggggcacagttgtttactatttaccctcagtcttctgtccgttttaatgtccctataaatcttattttgtgctgatcatcttgcatccaggtggccagtttcccatttgatgatcataattgcccgccaatccatttggtcacctcattctgccaaagtgcatattcatggttaaaggaggacattgagaacgttgtggttgttcactgtaaggctggcatggcaaggacagggcttatgatatgcagtcttctgttgtatctgaaggtaagaaattccttttaacgttgtatgaaacaatctgtcactgggaaccaatcatgtttcattttcttttatagttctttcccactgccgaagagtgtatggacttctacaaccagaaacgatgtgtggatggaaaaggacttgtgctacccagccaaattgtatgtctagttttgtgattttaagccgctcatgtaaacattctttgctcttctgctaactattgagtctgtttgctcattattgtgtagagatatgtgaaatactttgaaagaattttgacctacttcaacggtgaaaaccaaccaggccgtaggtaagtatcttattcatacaccttaatatagcatacaattgtttattgacatcaaacacttttttttgttaggtgtatgcttaggggattccggctccataggtgtccctattggattaggccatccatcactatttcagatcacaatggtgagttggtcgatccattgcttcatgacaacatataaagccagtattttgcagagctaacatctggttgtaaattctatgcaggtgttctctttaccacgaaaaagcatcctcggaccaaggatctctcggtacgccattgttattactttattgttatcaagtattttgttgaagcctttgtgaattttcatgatttttcagcctgaagacttttggttcagtgccccaaagaaaggggttatggtctttgccttacctggagagccaggtctaacagaattggctggggacttcaaaatccaatttcatgaccggcaaggagatttctactggttaggaagctaatacctcgtcatccaaaatacattaccaaaatcgcttttattttttgcttctctcactaatattttttgtatgctctctcagctggttaaacacgacaatgatggaaaatagagtgatcctaaaaaccagtgagcttgatgggtttgacaaggtaatatagctgaatccttgactttgtgtgtgaagtctgaggtggggctctttctccatccgtcctcatgtttgaaatgatacatatttgtgtttggcctttgttccactgcagaggaagctaccatcgcctggatttatggttgaagttgttctagctgatataaatgcaacaatccctacgaaccctagttctgaaacagcatccaaaacaccggaagaaacttcagcagctaattcgtcccctgtagacggctctgcatcggttccaggacccgataaagaaacagagaatcctgataaggacgatgtgttctctgataacgaaggagactcaactggcccgaccaaaaccacatcatcggcttcttctcaaaccccagaagccaaaaagagcgcagatgaaaccgctgttctgactaaagcgacagagaaagtgtctatttctggaaacaaaggatcatcacagccggtgcaaggagtaactgtgagcaagggtgaagcaacagaaaaaccctctggggctggggtcaatgcttcttcaagctcagagagtgagttcaaggttatggcggctgatgcatctgtgttctcatttggagatgaagacgactttgaaagcgattgaagaaagataatcaaaagcaggaaggatgtgtacataaaaacagggaatggtaaatcaatcagatgatggaatccatttattgtgttgtggtttcgtgttgtgatgttgaattctacggtcttttttggctttaccgtatggcactgttctttgttttagtaattactgcacaaaattatacattggttgcttacgtcgttgtgttatgactttaatatttggaatcataaaacaatttatagattaatatcaatgatttcttggtttagaattaaagaaaatcaagttacttaaccaagcgacgtaagtattgcgcttcctaaaccatctttatgaagtgagacgatgtttccgtcgaaagtgaaggagtgtatccatatttacgtatccttccatctttatgggagcatcacttcatcataaatataaatttagtgaataatttatccacatgctacttttgttatagcatattttgttgtccatgttttgtaagaaaaagaaactcatttcataacttagaaaattttgataattcaagatatactgctttctgtttttttttgctgttttttttttgaattatatataaattaactgttttatggtttgtatcaactttctttctatctctaatctttccatatacttttgtcaaactatgtctcagctaagagatacgctgacatggatataccagctttgatgctctgacagctatctagtttattttgacatacattttacaaaattttgcttttgttgtcaaaatatattacaagtttctcattgtatcactaaattttgtaaagcaaacaaaaagaaaattaatataaattcacattttaataaattcaggaaaaataaaattacatgtatatcattcattacatgtttcctttctcgatgatattattgttattgaaaaaacaaccctgttacacattttattaagttatatataatattatagttttaccaaattatataatggtatattgtagttattaataaaatgaggagtgtcttatctcttgcaaaccactcccttgccacctaagccactggcacaactcatctcagggagctccaatttgctccggccattgttgctgtctccgttaccggtgaaccttgcggctgaacagtcaggtgcaaaaagtccggtggtctgaaattctctgtcaccacccatcacaggcatgtggactccaatcttaactcggctaacgtagttagacctataagtctgtcccaaaacaccatcgacattatcgctaaggtcttggaacttgaagcctaggtcaaggtgagctagacagtcgtcttccttcacgtcgtagccatggattcttgaatcttccattgttattggcaccactcttgctgtgatcttaagcaaaccctctacttcaacctgaattataaaacatattaattgactggtatcagggatatatcattatttaggtatatatcttaaaaactgaaaatctttgttaagtattattgagtttatatatattgaaaaattgatatgtctttgaataagtgaccttgtggctaaagtaatagtattttcttagggcatacctcaagattgttagtatcagtgttgactcgcttgaccgagacctcagggtatacaccaggggaagaagtccacctggcaccgtctagctgaggaagtgagataacatttccgtcgaaagagacggcaatccggtcaacggaatcatcccacgtggcagtctttagggctccgacgtataaacggtgagtgccgaagagtatggcaatggattggacccatgtgaagtcacgtgccataccagctctacgtttaccgatgaaatgagcgttgatgtgaaggttaggatcagagataaggcagaagttggagtctttcttgccgtggaagtaaaaggttagaccatctcctccgatgaaacgtgggtcttggcaaacagatccaggcttgtcgcaatctgcatcacaatgtatcgttatttagaacgtattaagtaactgaataataaggaatttaagaggagatcgatcgatggattaagatgacatactgcaaacaggcttgcaagtgacgcaatccacttgacaagaacggggacaatcggcggggcaagtgtattcaactccgtaacatggagagcgctgcttcttacacctgacccttttggcacctgctgcttcctcttcgtctgatggcgggggaacgtaagggggagagccggaaggagttgggacggaaggtggcgtaggaggagtgggagtaacatcaggaggacttggcacggatggcgtaggaggagtgggagtaacatcaggaggacttggcacagatggcgtaggaggagtgggagtaacatcaggaggacttggcacagatggtgtaggagttggaggcggtggtgaaactggcggagggggacttggcataggatcagtaggaactggtggagtgggacttggcacagaaggtgtaggagtcggaggtggtggtgaaactggtggggtgggacttggcacggaaggtgtaggagtcggaggtggtggtgaaactggtggagtgggacttggcacagacggtgtaggagttggaggtggtggtgaaactggtggagtgggacttggcacagatggtgtaggagttggaggcggtggtgaaactggtggagtagggcttggcacggaaggtgtaggaggtggtggtgaaactggtggaacaggagcaggaggagtgtatccaccgtcatcaccaccactgtcatcgccgccaccatcgtcgccaggggaaggaggaccacatatgggtttgcaagaagcacattcgacatggcaagagtcagggcaaaacttgggacaaacatgttccaagttgtaacaatgtttgtacttcttgatcttacatgttgcgtggcttgggttcttggctatgcccgggggtgtatcggccattgttaatgcaagtgatgccaggagtatgcatcccaatatttgaagtcttgtgtgtttagctagatccattgccaaaccaaacaaagaagatagaaaggtgtttgttttttcagttgttgtgtgctttaggatttgatggtatgaatgatgatgatgcagtacaagtgctctgatatggtttatatagataaatatgttgggtttattaaatatcatgttggagtctttttaatcttttaaacaagggttccttcttaaatctatatggagcttgtaatttaagattattaacacctttatgcataacttagttatattctgtatatacatgcttcaagtttttatttgatcgcaaaacggattctcgagtgttaactagtagtaggttaaaactttcacaatataattaagatgaattaaaagatttctcgaaattttgattaaaaggataaaaactaattagcctaccattgaaaaaaggcttggccatgatcattattttggttcgaatttttttattaaaaatgagaaatggggttgttaaaattttagagattaatactgataaaaatatcatcaccttagttgacaattaacttgacatgtaaacaattttagcgtaaagtcaacctcatatttaactaggcaatatatacaattagccattagatatgaaatatataatatctagcaaaactgttagaatgagtttcgattccactttatgcaattctacgtaatacataatgtataaatgtgatattagtaattatatgtataatcatgtaaaggctacatgaaagtttatggggaatcactttgcgatgaagtgatccgcatgctacttgaatttcgtgtggtagcacattttgacattttggaggtcacatgatagaaaacaacaatgataagttaagctatgataaacacctgctttacagctatatgttttcatttttctactttgtcttctatttgaagaaacatcaaaatactgccattttctctgttagcgttaacaattcatcaaaattaattttgtcgaacgatactttgtttcttattcacttaactacatgcatgctttggactttatgcgactcaaggaggcaccgactatatgtgttattatcaaaattctcttctttagttacatatgtgttattatgttccctctctgtggttatttggtcctctttattttaaggactactgttagtccatagtatatcagatatttgataaattgatcggcctgaaccagacctggcttgctcaaagaatatgcagaacaaaagccataaagagagctctgtaaagaatatacagtaaacatgttttatgaattaagaaagcttgaagttgaaaataaaacataactcttctttatgtaaggaaatcaaatttgatcataaaaaacttaacaaactgtgtcaattaaaagcaaggaatactatataccaccacttgttattgaaatatatcagtttattgaattattcaagattacagtgaagtaaatccaaaaaaaggtacaaagggtttgccctgtggtttaatcactagctcgcctcttcttcttgctggaattgagttaaacttggaacataattaaacaaaaatggccagtttgaaaagaatcctaaatccacttttctgacttgattgtcctctccaacaatgtatagcacgtttttgaagttggttccatcatatctagaatatttatcacaacacacgaggactttcttctcctcatcgaccaaaaagcttttaccataccaacacctcaaataattcaaatccaatgctacgaccatgctccaagacaaaacgttggtcatctcatcaatcttataattatgacccatatctctgtccttgatgtagcataaagttgtaataacaccgaaagtttctcttctttaacaaccaatagagacgcaattgcataaaaaggatactgacacggaagtagcagacttctaaatctctctgttttataatcaaaactcactaagaatgtgcaaagatcaacttcctttttatcaaatatttatctttttcgcaagcaaaccaatgagtatttctcttcaaattttttggttactatatctcttttttatcacctaagcgccgtcgtttctcttcaaatctctctgttttataatcaaaattcagttatttttaacaactgattttttgtgattatttagaaagtgaagacaaaatgttaatcctcacctcatggaggatttaccaaaataacagagaaattaacgctaaattaacagttacagtattacttttgtcagaattaccaattaattataagcaaaaatatgaattatttgattaatgagtaatgactatcggttccatctttcccaagttcctctgctccaaaacctcttaaaccctaattcgaatttagcctaaaccctaaaatggccaaatggagacttgcgactgcgacgctccgtcgacaacttcaatcctcatcgccaactatctctaccttcaagaatccaaccaaagcattgtctgcggcggctcatcagtctactcgcagctacagtacaactcagaccgatgattcgagagggaaatggttaactttacctcctttttctcccaccatcgatggcaccgccgttggaaaggatctcctttccgacggagactctgtcaaatcttcaacggacaactcaaaaacgacggcgcttaggtggattcttcgttgtcgtcccgatttacccagaactctcgttcagaaactcttccgcttaagacaggttcctagtctcttccaatcttgtattcaacgaattgttgtcagtttcttacattgtaattgattcaggttagaagagaaatgtctatgagtgttgatggtgatgaactacaaagaagccagcttaaaagggtaatgttattttgttatctattgattggaacaagaactgttttgttgaaaggctgctcttttatctgatgatgttgatttctgacccttgaaaggtggcagctaaggagtccttgaatgtaggagatagaatttaccttcctttatcggttgacaatgatacgccgcagacgccacctgctaagaaagaaagctttcaatgtagtgatgaagaacgcaaattcgtttgcagtttggtgttgtataaggttttgaaactgtatactattggtttgcttttttgtttttttattgatgttatatacttatatagattgatagatcttaactgtgtgttaatgtgccaggatccagccattattgttttgaataaacctcatggtttggctgttcaagtgagtcatttatacttcgcattctgttgtattgtgtatcatattcttggagcttgtgaaatgtgatgacatttgctctttaatagggtgggagtgggatcaaaaccagtattgatgaactcgctgcctcttgcttgaaatttgataaatcagaatctccccggctggttagttgcgaatcatagtaaagcactgattaaaactgtatctaaacgaaagtgtatgatttattatgttgtttttgttaatttgaaaagtatgaatctattggcttatgcaagtatgggatatgtattaggtgcacagacttgacagagactgtagtggacttttggtgttggcaagaacacagacggctgcaacagttcttcattccatattccgagagaaaacaactggtgcatccgcatatgtaaatcctctgctttctctccgatctttccattgcttgtcatggatcgtgggaaataaacataagtttctcttccaatgacttttattttacttggcagggtgtcaaaaagaacgtaaaatccttgaaaagaaaatatatggcacttgtgatcgggtgtccaccacgtcaaaggggacagatttcagcgccactcagaaaggtcttcacactctgttttagctagagagttttatccatctgagtttttagtctattttgttttatctaggagttgctttgtttgttcgaattcggtcattgcttttgctgctttactggagtcaaatttgaaggtaaaatatatgttaaatatctgggtaggtggttgtggatgatggaaaatctgaacgtatcactgttaatgacaatggagaactcgtttctactcagcatgctatcaccgaataccgagtgattgaatcttcaccacatggttagtgagactgacttccatttctattcagttaaacttaaagcaaatgattttgccttgagtttttagcacattgttgaattgcaggatacacatggcttgagcttcgccctttaaccgggagaaaacatcaggtctctatagatattcagtttttgtttcaactttctctcttttttatgttctcttaatactaatctgttttcaactgttcttcgattgccacagcttcgtgtacactgcgctgaagtgctaggaacaccgatagtcggggactacaaatacggttggcaagctcataaagcccgggaaccttttgtctcttctgaaaacaacccaaccaagcaatcatcatctccttttggattggatctggatggtggagatgtctcttcgaaacagccacaccttcatctccattcaaagcaaatcgatctgccaaacatatcacagctcttggagaaaatgcaggtctcttcagactctgatatttcggatctcgatagccttaaattcgatgctccattgcctagtcatatgcaactaagctttaatttgttgaaatctagagtcgaaacttgtgacaaaaattagattttttttcttaccgagctttcttctttgtgttcattgaggcccaagtatttgtgtatttggacctgaatattctcatacaaagataaataattataattaaatgatttttcgcatataatcattattgtggtatgattaacacagttggtgtgatgactgattgacacaataatcaccgtttggattcgattcctttaatacttgtcactagagttgtttgactaaacagctaacttgtcactagagttattgtgtttgtattttgatctgttattaatctgattgggtataattacagatagagagacatctatattgtaattaagacaatcttaaagtgtaaactaaaaagatctctctgacctctggaaaacgaaaggtgggtgacacatcactctagctatgaatatgatgaatattcagtacctaaccgaacaaagactggtttggtatttttattggaaaaaagagataaataattgtgaatgtgaattatcctgtctgaaaggtaagctgatgacatggcgttatatgattggacgagcttcagaacaaaagagtagcgtcgaatcgaatctttacctactacactttgaactttgaagtacattacctacttcctccttgatcgaacgtcttttctcaaaactattttatttccccaattaaagtagtggtgataaattcacaaaaatacaaacacttttatttttgacgtcaaaaacaaatacttctttgaacaggctattacaatatttttaagaaaaaagtaagcaaaatagtccacaaaccaaaatctgtaacatattaaacgatttatgtttttttttttttttcttaactagagaacaattcgggcttttactaaggatgatgagtgtagttaccgaatagtgtattcatataatcttttaatgagcttaagatatgatattatttcgactaatcagataagagtagttagataatttcgtaatagagcaactctttcgcaaataaaaccattgtaaacattaccaattagtttttctttttttttggtcacaaccaattagtttgtttgttctattttatgaagtgcgtattaaagctaacgtgtttacagtaacgccacacaaataaaaataaaaataattatgtactttatggatttatagaaaaaacaagaatagtcaccaaaaattgattgtgtcatatatcttttgtcaactattttatcttatttttctatggatatgtatgtccaaaatgttagacaaaaaaccaaaaaatcatgtccaaaatttcgttaggctgccgatatctctgtttccctttcaacgactatctatttaattaccgtcgtccacattgtttttaatatctttattcgaggttggtttagttttttttaccaaactcactttgctacgtttttgcctttttggtatggttgtatttgtaccaccgggaaaaaaaagataagaggtttggttggtcgagcttactgattaaaaaatatacacgtccaccaaatattaaaacaatatatcccatttttcctcctctcttttggtattacattaatattttattatttccccatttgctctgtatatataaacatatgtcaatagagtgcctctacagtcatgtttccatagacataatctctcaccattgtttttctctgcaaaactaaagaaacaaaaaaagaaaaatcggagaaaccaagaaaaaagaaatgggaagtgtagaagcaggagaaaagaaggctttaggatgggctgcaagagatccttctggtgttctctctccttactcctacactttaaggttttgtttcctcttctcctttcacaagaaaatttggttttgttatgtagaatttttatggttttattgaacttgtttttgttgaaaattgaattttggttttgttaatatataggagcacaggagcagatgatgtgtatataaaggttatatgctgtggaatatgccatactgatattcaccaaattaaaaatgatcttggaatgtctaattatcctatggttcctgggtaatttcttctctcttttcttatctgccttatttttcagctttattcttgactggtgtccatgaatggcgattttctttcatctgttaaaaatggatgttatcgctagacttcaatttagatcccaatcatatataaataagatggtttcagattttaaatggaattacatctttttaatttatttgaagttatgcatagattgttggtaaacttaagtatattagcacttgtgactagcttaataatttctaagcgtgctagagataactccaaacagtacattttcaaatgtaagtaaattgtttagacatatattttaattttagataacctaagggcaaaaacaaatattagataatcttagattgtaaatacatgaaattcttatttttaatggttcagatgagttgattagtaagtagttaaccatatgatatgtaatattttgtacaaatgttattgatatattcttctcggaatttagatacccattatatgatgcatgttgttaaatgacttttgtggtatgacagaagattttggtataaagttgacttgacattattgttaatttgaagataattgaacgtgctactgttacacatctgacattcgtttataaccacacctgtcactgtttagtcttctaaattaatatgcaaacaaaaaactctgtcaatgtgggacttgtaggggtaactgaaatatacgagtaagattccgtaataactaaaagtgtaattttgatttacaggcacgaggtagtaggtgaggtgttggaagtgggatcagatgtgagcaagttcaccgtaggagatgtagtcggagtcggcgtggtcgttggatgctgcggtagctgcaaaccatgcagctcagaacttgagcagtattgtaacaagagaatctggagttacaacgatgtctacaccgatggaaaacctactcaaggtggcttcgccgacaccatgatcgtcaatcaaaagtaagcacacgcacacaccttgtttcacaagaaacacacagagcatttgtttcttcatccacaagtaacttatttttgtttcaaaaggtttgtggtgaagattccagaaggaatggcggtggagcaggctgcaccgctactctgcgcgggagtaacggtttatagtccgttgagccacttcggtctaatggcgagtgggcttaaaggagggattctagggttaggtggagtagggcacatgggtgtgaagatagctaaagcaatgggacaccatgtgactgtgataagctcatcagataagaaaaaagaagaagctatcgaacatttaggagctgacgactatgtggtgagctctgatccagcagagatgcaaagactcgcagattcccttgactacatcattgacaccgtaccggtgtttcaccctctcgacccttacttggcttgtcttaaactcgacgggaaattgattctcatgggtgttatcaacactcctcttcagttcgtgacccctctcgtcattcttggtcagtactatttcttgcgtttaaatcatatctagctaataacaacaaaattcaatagcaaacctgatgtttttttctatattttgacagggaggaaagtgatatcagggagctttatagggagcattaaagagacagaagaagtgttggctttctgcaaagagaaagggcttacgtcgacgattgaaactgtgaagatcgatgagcttaacattgcgtttgagaggcttcgcaagaacgatgttcgttacagatttgtggttgatgttgcaggaagtaatctggtggaggaggctgcaacaactacaaactaaagagggcagggcacattgatacatgaacgaaaaattgtaacgggcttgtttgtccaacgaatgttttgttgttgtctttttcaaatggttcaaacacgaatgctttggctttatttttttctaatcaatgtggattttctgtttacgtgtgtttgtcacaagaaaatcattatgataagaattttcttccacttgaactcaaatttgttaacaattctgaatctgaattatggctgacaccaattgaaactgagaaccagtttaaagtgattataaagaaaagtgaaatctttttattgccaaccaactttgggctaagtattaaaagaaaataatacttttttgataagaaaaaaaaaagaggaaaataatttgattataattaaaatctaaaaactttttcgcggaagcgttaaggaaaaatctttgatctttggaaaggaagagagcaggcgcaatcgagtaatccaaaggagttgcgttgttctgcgatcacgaagcggtctctcggcaaatctttcgacgcaagacatcgattcgtgtatttcatttttgctttggaactctatgcggaagaaccctaattgattcgccatgggagattccgtttcttcttcatcccgcgtttctgttcatcaatctcttggtgctggttctggtcagtctctctattcgatttattgaagcctattttggcttttctcgagtttcgctttcgattcaatcgctctagagtttcgctctattcggaatctggaatgttgcgttgattggcgtaaattgagggttttgtttgattgttatgtgcatttggggaatttttaaacttgatcataattatgaacaacaatttcacgtatttggagacatttaggaatctcttgactcgtgactcttgtgtccttaaatgcaattttttgcagttgctgatttgctgctatggagaaaccggactggtgcagtcattttgctaatctcttctactgggttttggttcttattcgagagagctggatacaatctcttgtctttcgtctccaatgttctgcttcttctcgttgcgatcttcttcttatgggccaagtctgctacagttctcaaccggtaaatctctgcttattctattcactgcattgttgtggaaaaagatgaaacctttatgcggcattgatggattgtgttgatagtagagcttgcattagcttcttctttgttaagttactgcttcaccatttgaaagagactattttggagcataaaagcttatgaatactggaactttgctttgacaacccgagtcatgtgtgtttttattcttataaagtatacaactgatgtggttttatttcagaccgctacctccagttccgaatatggaaatccctgaggagtttgcaaataaggctgctgatgatcttcgggtttggatcaattatgtactgtcaattgcaagtgatatcaccatagctagaaatccgattcgtctccttcaggttttctttcatcacttgtggcaaaccatttgttgtatctttttgtttctgcatgtgatgtatctcactgttcacatctcgtttgtttttgctgtgaaacaggtttctcttgtcttgtgggctatatcctatgttgggactttaatcaactccctcactcttgtttacattggtgagcgtctaaccttttcttgtcggttatatagtctatgatcttggttgatatgattaactaatgtgtcgctgtttttatcttgcaggagttcttctcagtctttcttttcctattgtgtatgagaagtaccaagaccacattgatgagaaagtgaactcgacttctaaattcgttcgaaatatctcaaggaagtttccattgcccataaacaaagagaagaaacatcagtaggtagtgtaagtagtctctgatgaattgatcctttgtggtccgagaaagagttagttttcgactgaggttttactgaaacgctgcaggtgaaaaacagtccatttggtcaccagactaattacagctacaagaaggagccattactgtaatgctacaagaggatagtcaaagagcagcggaaaaaagtgaatcacagtacagattttcgttcatttctttctgtttcgcttactaggagttttcttcttgtgtgtttttgttgtgttcaagattcatgagtttctggtttttttggtcttttagtttacacgaatgctttgttgcagtattgttccagtagaaacgagaaagatgaatctaatacaacttgagaggttattcaataattaatttgttgattattaaagattacagttacagtttcaaccaaaacaaaatgtgatatatgtgcctagtcgtcttatctctctctcgttcacattggataggcttttgggcttttaaagtccactttcagtgaacatggacccgattgagctttatgggttcttgtttgtttgttctgtcggtcgtgattcctgaggataattgatcttttcttctttgttaacctaagttatttgggatttgctcttgttttgttctgtcttaatcgaatcctcaagggattgtgccgtgactgccgtcttcaattgttttatatatatcgagaggccgaagaaatctgtaatcacagacagaggaaaaataagaataaggtgcagtttttttgttctttgttgttatttaagaagattaacgtaaatagtttccgacattaactagtttgcgttacattggtcctggttgataatgaagaagatgtacaatcttccaagagatttgccggaggaggtgctctgtagaattccgttgacatctctgaggcctgtccgatctacttgcaaaaagtggagcactttatccaaatgtgggagctttgcaaagaagcaccttgctcaagcaaaagtactagcagacgcaaaggagtttatggtggtcttgatgatgaattttagggtttatttgatgagagtcaatcttcaaaacaacgttgttgaatcatcatcatcatcatcatcatcatcatcatcatgtataaaacgtgaagctaaacttattagcttaggcgatgaagaagctgatatatctcaagtctttcactgtgacggtttattgttatgcatcagcatcaccgaatccaagactaggctcgttgtttggaacccgtattgggggcatacccggttattcgagcccacacatcaattcaacaaattcgatagctattcgtatgctctcggatacgacaagagccgcaaatcccacaaaatcttgaggggtattacttgtttggatcccttcaaaatctacgattttaactctgacttatggagggatcttgatgtaactccggagtggcacttatggcaaatgctccatggcgtgtctctcaagggaaatgcctactggtttgctagagagaattataccgaaacaatggacacagaccattttttcttactctgttttgatttcacaagcgagacatttgggccgcctttgcctcttccgtttgagtttgctgtttctgaagatactatgagtgtatctagtgttagagaagagcagcttgttgtattatatcagccgtgggattatttacagttggacatctgggtgacgtctaagattgagcccaacgctgtgtcgtggaacagcaaggtgttcttatcagtgagtttaaaacaactcgtcagccctcagtttcagttaacttttgggagtttcttcatcgacgaggagaagaaagtcgctgtggtttttgataaagactacgataataagcgcaacatagcttacatctttggagtggatggatcctttaaagcagttgatctcggagattcagaccgaaagtgttttccacttgtgtgctcttatgttccaagtctagtgcaacttaattagtcgaccatctattccttgcttactttttttcttcctcttttgtcatcttctttgaacaagatcattatttgttagtcaataacatattaacttgtttctcatacttgtttttgtttgccatatatatttgaattcgtttccaaatggtgcacacgctccttcccctgcagctaatcgtttgttactttcagtccccttaagttggagcaaactgtatgcttcttggttggcattctccgcgaaagcatgcatcgtttcttccaagagtctttaggtattgatagttcatcgttttctttttctattgtaacacagtagcagttaaagataagtcgaacgggtgatctttttgttcattagacaaaactagagaggtttctcttctctttcttctagtaaggaacaaggctaaggttaatagatagctagctatctgagatatctcacaaaagctttcactatggccctgtactatatcaacttcatattttaggtgtttcatatttcagataaaatgtgctcatatcttcttcctctttgttcagcgtcttctgcaaaagtgatatagatcttgacatgctgctaaaatacctcttgatatatttagtttttcttaccaatttaagttatagcataatccttttatcatgttagttattgttctatcctaattgtctagcatggagtagaatgattttgaagcagggacttgtagaacgatttttcgtgtgccacaggtttactcccttccttaatgtggtgaccagcgcttgtccttgtggtctgtccactcattctgctatctttcaacgaatatcacaaaataatagtggttagtatgtctcatatgattaccttaaatttagcggctactgactgatgaatcatgaggctttacgctactactatttctcttgtgttccacaaggcgtttccaatacttggtgatatcctccaacgacatctgcctagtattttgaccttgccagttgccaaatcaattaataaacccttcaccagaagattcttactacatcaaacaataaataaaactaaagtttgactggaagaagagttttggaacgttagacaaattttcagcatttgacgatatgaaagatgtctaaatctaaagaaacagagatacaattctttcaatattatatacttgctaactatcaagaacaggcatgaaaaaataaaaatattaaaaaaaaatacatattactatatagaattcatatgtcatcgataacttttacattattttttacaatccgccttacttaaacgcgccttatctaatagatatataaatgtatctctatttatattataatttaatttaaaatcaatataaaaaaatgtgttttttcaatttttaaaccacataacctaatagtataatatttgatatattattattttgttttaagaatgtagtatatttgtattttattagcaaaaccattattaaattgtaacttttttttcttctatataaagtttcaaaatccacttaagaagtgaagatataagtgaacaaaggatgtagcgtaatctagcacaacatatttaaacctcacaaaacccacccgaaagatgaacccatatctctctactctgttgctgacgatacatacacctttacttacattatattcccgccatcgcgatggcgacgtctctgaatctatcatcgatcttctcctcctcctcaaggctcgtcaccactccctcctctgtttttcccatccgtcagaggcgacggatcatcctcgttacgtcttcttcttccggaggtggaggaaaaccgacgattctcgtaacggagaagctaggccaagcggggatcgatctgcttaagaagtacgctaatgtggattgctcttatgatctgagtctcgaggagctttgtacgaagatctctctttgtgatgcgctcatcgtcaggagtggtaccaaggttgggagagatgtgtttgaatcgtcgcgtgggaggcttaaggttgttggacgcgctggtgttgggattgataacgtcgatttggcggcggcgactgagtatgggtgtttggttgttaatgctccgactgcgaacactgtggctgctgctgaacacggaattgcgcttttgaccgccatggctagaaacattgctcaagctgatgcttctatcaaagctggtgagtgttttaaacggttgttgaatttgaatagcgatttgagaaattgcgatgtgaaatgtagaaatgtggttgtttgtaggcaaatggacgagaaacaagtatgtaggtgtttcacttgtggggaagactcttgctgttcttggttttggtaaagttggatcagaggttgctagacgagccaggggacttggtatgcatgtcattacacatgatccttatgcaccagcggatcgtgcacgagctattggtgtggagcttgttagttttgaagtagctatttcaactgctgacttcatctctttgcatctgcctcttactgctgctacttcgaagatgatgaatgatgtgacctttgcgatgatgaagaaaggagtccgtattgttaatgttgctcgtggtggagttattgatgaggaagctcttttgagagcgcttgactcgggtattgttgctcaggcagctcttgatgtttttacagtagagccacctgttaaagataataagttggtgttacatgagagtgtcactgccacacctcatcttggtgctagtactatggaggctcaggtattacatactgtatattcgttttgcctttagtgcattttgttctgctctcctgaaacctttacttgacgcctaggaaggagtgtctatcgaagtcgcagaagctgttattggagctttgagaggagaacttgctgctaccgcggtcaatgcaccaatggttccactagaggtaatttcagacttcactatagagtccttaattcaggatcaagtttcattcttctagttcttggtgatattgcaagtagtgataatgatttgtcctgcaaattctctgacactgttcagttgctatctgttttcaggtattgagggagctgaagccgtatgttgtacttgctgagaagcttgggaggctggctgtacaattggtaactggtggaagcggtgtgaatgctgtgaaagtgacttatgcttcttccagagctcctgatgatctcgacactagacttctccgagccatggtcataaaggggatcatcgaacccatttccagcgtattcataaatctggttaactccgattatattgccaaacaacgtggagtcaaaatctcagaagaacgtatggttctagacggctcacctgagaatccaattgaatacataactgttcggatagcaaacgtggaatcaagatttgccagcgctttatcagagtccggtgagatcaaagtagaaggcagagtgaaacaaggggttccaagtcttaccaaagtcggattatttggagtggatgtgagtttagaagggagtgtgattctgtgcaggcaagtagatcagcctgggatgatcggtaaagttgctagcatcttaggagatgaaaacgtcaacgtgagcttcatgagcgtcggtcgaatcgctccaggcaagcaagctgtgatggcaattggagtagatgaacaaccaagcaaagaaactttgaagaaaatcggagacattcctgccattgaagagtttgttttcctcaaactataggttaatactttacatggatgcacataagaaaaaactcagagatcgatataatcttaaatgatgatttattctgtactaatgatacaatcgagtgtacatgaaacaaattacatagttgattttttccaaagcggcatgtcgacgaagtgatgtgttattgttgcagccagccagggattttttcttgttttctcagagagaagaaatacagagattgatggagcctatgaaccagtgagaaatgggatctgagccacagttgttgggatctcgaaatgaagattatgaacggccagataagctgcgataccagcagcatagccagcaaaagcaaaaccactaacctgcatggagaaaaaaaaaaaaaactgagtttcttgcgcagagccacaagagtattgagtttcagtctggttaatgcaatgttgtgttgttgatcgttagacaagccggaagaatgtatcttacctttcggaaataccaaaagaaatcgactttctccatccccatgaaggctacaccagcagcagaaccaatgacaagcatcgaaccaccagtgccggcacagaatgcaatgagctgccaaaattcagaatcttgagggaacgatgtgagatcatacatccccatagtcgctgcaaccagtggaacattgtctatgattgctgatacaacaccgatagcacttgcaatgagctcaacgttgggtatattggcatcaaggtagtttgcaatctcccggagtatcccagctgcctcaaggctggaaaaaaggaaaacaacatcagaaaagattgtgaattcttaagagtaatggaacataaggagtttggagatgaacagttgatttaatacctgcttacggataaaagaatcccgaggaaaaacagagcaccttgtgtgtctattcgagataaggcttgaggtactttgagcttttgtctttctgattcaccgtaatgaatggcatctgtcaagatccaaagaactccaagacccaacaagatacccatgtaaggaggcaatccagttagagctttaaagactggaacaaaaaccaatgctccaaggccaactccaaaaactagcttccctcttggagccatcttttcagaagccaatacatctttaggatcctgttcctttccatttacctcactgagaaagaaaaaaaacttacatcaattagcatatacattgcaaacatttacgagacagttgaagccaaacatagtctcctttttcgtttgaggatgcaagaagaacttaacctggtcaaagacatgagggctagtggaacagcaagagacacaaccgaaggtagaaaaaggtcctgaaaggaatgtaagtaaacctccatcaagaacatcaaagttggagtgaccaaataggggaatactttaaccacttttgtctatacagttcaaaacacttagagagcatgccgagtaacaaaaccagctgtcgtaccatgatcacgatcagaggctccaacaaaaaattacgacattaagtaacttcagaatcactggtgctttagccaacctttactttcttattctttctgagtcaaatacaggcaactccacaaattttcaataccagaaattcgaaacaaaggatcttgttcagggtctgcatcttaactttgatatagacagctacctaattattaacagcagggagcttagtggtaaattgtgatctccagccactttcagaatcaagctctttactaaacaaccaaatctaaactcatgaactattcagtcctacttctaagcattcgctacttgcgcttatgaaagaaaatgaggaacattaactatctcagaagagaaggagaaccttcatagtcggcaaggtggatatctgaccatgaatccataacatagttgtagtaacatcaccaattggagtccatgctcctcctgcatttgctgctatcactaccacacctcctagaagtctgccattggtcattgagcgtacaaactaacgttataatacagagtattatcgtaagaggtataacaaaatttaaactctaggtacatggccagtatgtttccttgagaatcttaaggtctatatgtagggagtcaaaaactaactaactaataggagagcattaagaaaaggtttccatacttgcggtactctgattgtggaaccagtttccttattaaagaaaccatgacaatggtagaggtcagattgtctagaatcgaactgagaaagaaagtcacaaagccaacctgcgacgccataaatcaataaaaaggaaattcatgtccttaaagaagaagacacagaagctaataactttcaagctacagtaaatcacataccacccataaaagtgtctttggcttccgagtggtgatattgtctgtaaccaacttaaacccttggtgagcatcaactatctccacaatggtcattgcgccaagcaagaaaaatactatttcactaacttcagctgttgcatgttgaagatctaaaacagctatttcagttgaaggagcctgttaacaaggaattcaatatacacaaaaatcatatacattaatcataaatttaagtataagatagacaactttttgcgcagattcttacccctatgctccgcacaacccacaaactcacagccatcaaaagtcctattccacttttattaaaagctaaagactcttcaaagatgatgccagcgtatcctattccaaacaacaatgccatagcaacatcctgtaacataacattgtccatagataattgttaatcaaaattctgcattttgagttgaaaccaaagaacataaaaacaaagaatcacacctgattagcagcgacccaggaatggttaatggcagctgttcctgtaagagctgctgcaagaatagcaagagctttgattatatctgtctttggctgataattcgcctcaaagtaacttgaactaggttcatcaaccgagcataacgggtcacataatcctgatgagtccatcaaatcctgtggatcacagaaagatataaactttcatttctgtagcaatgaccatcgattactacacccattttagtgttcttcttcaggtcactatatgaatgaaacttatccaattagaaaatatgtgacttgttcatgagtaattagctaagattggatcaaaagcgaaaatgggtaatcatcaaaatcgaattttgtactaagacaacatcgtggaaactcgaacctcatcgattggttcatcgagagaagaaggagaagaagagctccttatcttatcctcggccctcacgagaacaccatgtttggataacctcgtcgagcctgtaactccagatactttcgaaaaggaaacattttgcggcaatcgggtggagatggagataggtgatgaagtcgcgatgacgtgtctcttcgtcaactgatgcggcggtgcaaagtgagaaccgataggaaacaccgccattggcgaacaccagagaaagatacggagggagagatttaagtagtgaagatggagaggaagagagagagcgataaaatctccggccgtccggcgatgtaatgaaattaccggtcaaagtagaagtgtgtctgtgtagtttgcaaatatcttaaattctgggattttacaatctaatccctttaaaacaaaaacaactacttttaagcttaatataattttactggaaaagttacataatattttagcacattaactagttaaaaaaatttcaaattttcagtctattttcaaaataaataaataataacatttcatatctaattgattgatgaaaaaacatccataacactaacacaaacaactatactataatttctaactaatctgattatgcttaaaaattctaattaattcattttcatgtcttctttttttaagttgggacatgattgggattaaactattcttaatcatttagactaatttggtctagtaacaaaataaacctttcattgattattgcttgttgaaataagaaacaaacaaataagaatttgtgcacgtctactatagtgactagtgagtgatgtggtttggtggcattactacaatatttaggtgtgagtaaatcttagcctctcagttccactgctcgacgtgactgacatctgagaaacattcagaaaaattggaccagaaaaaatttacaaacacaaaagattcaatctatttttaaatgttaataatttggtctaataatattatagtattcttgctttctttgttaccgcgcttgtgaaaatgtgggaaaacaaagaaaaaacgttttgcacgtctttagctcaagtgagtgagtgagttatgtgggttggtgacttggtggcattacaacactttaagagcgtgaataagcttagcctttcagtaagtaccatcactactcgtcgcaactgtgacagtgacatcaaagaaactttaagaaaacttagacaatctaattttacaaacacaaaagattccaacctttttataccacccagataatcccaaaaaaatgtctgggtgtaacatttactagtaatagttcttcagccaaaaacaaaacccaagaaaaaaggctactaaaatactactaatatatatcagcctacgaccgtttaattaaaatccttgaggtaacgacggtgacgtagtgtgacccatagtagcaggtgaccagaaatcagcaccgttggaattttccacgtgtacggtggatgagacaggtactagacataatcctctgcttctcaagtctttcgctttcatcgccgccattacatctccggtgacaactccaccgtcctaataaacgtcgccgacatgtcagaagtatcatttcattaataaaaaataattaagagagaaagagagagacttctacttacgagagaatggttgattagataaggagagcaaaggacttgaatctgatcttgtaagaatttgatgtaacccatcgcttcatgcaacacagaagctgcatctgtctgtcatttaattttatttttgtatcagtcagaaaagtcaaattttactattgcaaatagtgtcatttatagatattttactattgcaaatagggtcatttatagatatttgtttggtaattttacccctctaaaaaggtacacattgtttaactaatgtacaatgatgatggttaaacataaaccagactagaataaagaaaaacaaagatactttaatttattgatcaagtttcattgtctttcatgtctttttgaagttcacattggatgccaatttatgctacactaccccaaatcgcgacttcttaagcttccttttggaaaaactcaatatgaaatactatattaatattcaaaacaaattatttttcattactttggtgttatgttatgattagaggtctttcttgcttgacttaacaaaatcataaattgcatcattataaaagaatttgagttagatataaaaatcaccttgccgtatggagaaaccaactgctgcaacgctgcaattctttcccctaacctttctttcctgacctaattttaatattttaacaaccaaaacgaaaaaagataaacagtaaatctataacattatggtcaagagaatattaatctataacaatatggatcataaagaaatgtgtatatacatactattaaatgtcacacctttgcaattccaactgatgatttctcttgatttcgtttccctttcttgcccggttttcgattttgatccgactcttgcccattacccgttccggttctcttcttcttcacaagacacacacaataaaaaacacatctttaaatttgtaatccttaattacatgcaactatgcaaataaagaatcagtaatgagagacttacggttgatgatttagtagatttatcgaccgtacacgcgtcgtttgagttcctgcaatcaatcttaatgcatgaagggtcaagatcagagactccggaggttggaacagaaggttctaggaagagtgactcgtcgtcgttttgatagcctccactaaaacagagcattcttgagccagttttgccggagaatacaaaacctaaactgtcttctccaccatcgccgacattaccctcaggttggtggtcggaagaggagctgagaacgccgtcagagaacataagaagttcggagaagctcgttactccttcagcttccatcatagctcggtcgtcctgatcctctgcggtatctcccatcgtgacttttcgtggaaagaggttagaaagaaaacaaagagaaagtgagaaaacattaaccagaggattttttttggtgaaatgtttttctctttaccttttttagacttttataactggtttattcacaaaatggctgatgttctaatatttatttatatacatatatatatacaattattagttttctctttttttgttttctttaacatcacctgtctaaattctacgaaggaaaatgtaatgtttcttttcttaaaatcaaaaacattatactatctatctatttggttagtgttaaactgttaattcaagaaaaaagatagtgatacttttgttgataatgggtattcagtttatgtgacacttgtatggatacttctgtataacaatctagtgaagtgatgatgattagtgttgattgataagtcgttaagggagggatagaaagggaattatagaaatgttgaagagaaaattgggtcaaagccacctggcccgagaaaactgtagttttgatttacacgaagctgatgtttcgtttctcacctttttctttcttagtaactgctgcattccctttttttgagtctctctttctagaagttagacaaaataataaatgagtgtcacacacgtattcaatatcgaactagtactcattattcatttattcaataaaaccattattaccaaaccatacaaatattttttagattaccactatcatgtttatcatatagttatgaacatacagtcacatgaaactacaactactaaattaaactaaatttttactaactgacatgtaccaggtttgacacgtgcaaagactctgcaaacacgtgtgtggtaagaagaaagtgaactccacaagttggcaaaccactaaaataaatccataagaggaaaggtcaaaaaaaaatcataaagattattaagtagtccaacttttctctctagcttctacttttaactccagaagcaaaaacaatctcaaaaagactttggttttggttaggttggtttcatataagattttcgagttttcgacaaggacctaaactcttagctactgtttattgtcccttagctacatatatatcactttaattacccaaacaatccctaatctttctctctcgttattacttaactgccacttctactttgctctgatgagtttctttcattaccaaagatgagattaagtaatgtgatgttttcgaatctaagaatgtaacaattttattcaggatcatggaaacaaacaagaagctagctactcaaacaagacaacgaccaattcagcagtcaatcacagaaagtcaagacaactaaaaaggaaagacaaagacacatgaacaacccctgttcttgatatagctatcaaaagtagaaaactgatggtacccatttaacaaatcgtccaaacttgttccaacactctcagggacataacgtcgaacacttggtgtgcgttattattcaaaacaaatctctttcaacttcgtcgctgctgattcgtcaattgagtactgcaaatgattgagaacagacagttaacacaaagggtacctagatttaaaagaaacccagaatctttgttaccttcttgagtacccaaagtgagtgattataggctcgctggaagagttcgtcgagggatgtttcgctttgatcgacttcacggtaattaacgaaattctccctggcgtacttggcgtaatacggccttgaatccgccggcaaaagtctcaccagcctcataacgccgccgtatactctcagcaccttcttcattttcgtttaccttctgcaacacgttacccaattctaggactctaatactgtatcataaacatccatgggctcttaatgggcctttaataataagcaattacagaccggttaaacgttcacatttgagggtttaaaaccggttcaaacaagacttttaaagtttaaatctcttgatctcttaaaccggtctctatcgattacagaaaccataactcaaaacatctctccagatggaaataaacaaaaactttcataatcataacacaaagccttaacttctttaactgttaaaaatgaacctatcatccaatttcgaagaaaatctttctttctttcttttgcctcaaatttcaaggtcttcaaagtaccccaaaaatgtgaaacaaagaactgaacaaacccgatgctttgcagggtttggtgtcttcatatctcggggtttgggtaagtatgtgttccagtattgtccttgcattagatctaaaaccttcatgattgaatctaaagtctactttcttcttcttttccgtgatccagtattggttggtttctctgcaactgactcggtttccatagtttgtttgctacttccagcaacagatgtctcacattcaccttccttgcctgtttttaacttctcgacattttcctctgaaactaaaggtttgctgtttatcgaccaacgcctatgcttaaaccagttattaacctacagaacataatcagttcttagcagagatgaaactaggtcgactaaaagggagaactaaacaaacaatttactaggagaaacttcttacttgcttaactgtcatttgtagctctttggctaagctctccttcgtggctttgtctggatattgattctcttgaaaagatatgtacagtctctgcataaaagagggatcctttcaatccattgctccctccctcataataatgtaagattggcaccttaaagcctcaagacagctatatctttttacctgagttttgggatctgtctgtttacatgctgaagagctgcttttttcaatttcaccagaaccaccattttctccaggaccttcttgtggcatttctaaggtatcctttttatctgcccttttcgacttccgtataagtttcttagaagtatgatcttctgcatttgaagactgtttcagaggtacagtgtccccttcatcttccgactcggaatcttcttttcccattcttgcagttttatcccaatcgtcatcatcacttgacgaagtcggaacattgtcatattcctcctgcacatagaagaaaaataccattcagaggtttttccaaagccagatagaaatcgattatcaagaaaaagagagatcactcacatcatacaactttttgtaatccagcctttcaacattcctccttctggatacaccggcaggaccatcatcaagcccaacatctgactctaaaattgcatcaccttggagctgagacgtctgtctgccaggatcctcaagtggtgtatcttcagcttgctgattagtctcatctcctttgaaggaagtttcaagatcttcagtgtctgatgtacaatcagaatttgaactttctttatcatcatcacaagtcggggcatcaggatcatagtcatcatcctcagaatcatcagatggaagggccattacatctttcattatatctttcccttctttaaatgactcaatcatttcgtcagatgcagatgtgaattcagtttcatcagaactaccatcttcgttctcagattcttcattgtcatcactgccatcttcatcattttcattatcattcaaacaatctggatcatactcttcatcatcagaatcatctgaaggaagatcacagtcaagattttgacctccaccaaccagcgctgctgctgcctcaggaaatattttctacacaaaagttcaaggcaggtgtgtttttaagtgttttctcctctttaacaataaaaacctcaacatatatagttatatacctcccaactgtcgctgaccgaaaattttgtccctaaagaatcattaagcaagtccaagctgtcatctttgcaatcacatccggggcatagccaaccctcatcatccggaggaactacaaaaattaaaaccaacaaaaaagacagctgtagataccagcaagaactgcttaaaacactaccaagtacgtaggcagagaatattactatcttctttccgcagaggtggttcaagacagtattggtgaaagcctcgatcgcaaaacccatcgcatagtatgatatcattatcaacagacaagtcctttgaaccacattttgcacagaagatctgcgattaaacaactgctcgtattatcaatacttctagagacacaaactggttctatcaggataaacaagggaacaaaggttgagttcagaacaatattctcttacatcctcgctagaaatctctccatcagtatcaaataaagactctggaaggcttccttcagcacagagtgtgtcaaggtgctgaaaaagatctctaattttaagcttgcgccgcaaaatttcctttgtggctcgttcaagctctttctctggccttatcttttccaggctacaaagaacacataatcaacaagactgagtgagatcagaaatatatctcacagaggatacctataactctcaaataatgcatgaataagagggaaaacaaatgtcatcaagagacaaaccttgaacctttccagccttctaacgaataggcgtcaattaggctttgctcatagttaatccggtttagaaagtatcgaagtttctttttgattcttgtgtactcatcatcttctctaacttgtcctttgttcatagtcttattctttttctttggtcgacctacaggtgtggaattagcaacaaccgaagatggtccagcatcttccttagatctctgagctctcttgtgacttgcaaacaacacattcctttctccacctcctcctaacctcttcgaactcgtagatgccctggaccggttgtggatttcaaattgtccacggcaaggaagaccgatgacaagctcacgatgagaccctgaaaatttggtattggtattagaatccttcttcacggtttgaggggttggtttctgttcttcattcccctttccatgatccataatctcatgatgcaaatgtccatttccgtttgcatcagttggcatgtgactccctgcctctgatgatttgccttgttcagatactctgtcaacagttggactaatctctcctccattatctacatttgtctgcttcaaaccagatccactacttctagttacccgcttacttactgctttatacattctctacaatcaactagctatgtttatactgctatcctcgaagatgatgcactcaggcgtttctaaatcagcaaaggtttaaatacttgtagattcctatataatcaaacaaagaagcaaaacacacgtatatcagatcagaatcaatatgagcaaacacaagagaaaaacccacaaaagaaaaatgggagcttggtaaatatttctgcgattgcttcgtctagttcctaagctacttacgtgcttgacagagatcttaaacaagaacatcagacaaaaaacacagatcgacccttgatatggttttcgatgagcacaagagaagaaaaaacgcgataaagtaatcttagctataacgaggttagatttgggtattgctaagctgagtattgaattttctaaatttctacgagataagaaaacaacccagacactaaatgttaagctttttcgatctctctatccgccaaaaattttacctttttccctcgcccgcgaaatgtcccgcgagaattgagaagaaactcggtgggtgagttgagaagaagaagaaaaaaagaagagagagccttgcaaggtcgctcagaagacaaagggaacggagaaacggcgtaatttgggcttcattatgcattatattcttaatgggtctacttatgaggcccatttgcatatcaatgtcttggtattgttgttttgtttctctctttttcgtcccgtgacatgttaaggagccttaaaaagccaacaaaaacttgtacctggctaatagacaaaagaaatactcttgttttactaaaataggccatgaaagtgattccctcaaatcccatgtgcacaacctgatgactctgtacgggccttctttgtacccacatcattaccggcttcatttgcaggccgttttcctctgtcgtagcaaaaaggaaacatacaaccatgaatcacaagtcacaaacattcaaaagactcacattcaactttggatccaaatcagcttacctttcaacaatttctacaggttcgtgcattctttcttgaggacctttctctccaaatttactcaaacttgtcaaaccttccgtaaccatcttgatttcttctccacttacattgcccaagctctggaatcattgaaaaaatgtcagaaaacggctaaaataagaagaacacgataatggaaagaacaatatcacacaaccaagaaactattgtgcagaatcaggtatttatcctgttggaaaatatgaaaaaaattggccctgagtcccgattccgttcaaattcatgtgccacaccaaaatagttggtttgagtaaaacaggagatatacacaggtattcacgtctctgtaccttgtcagaatcaggcatgatgtgctcgttcaaggagttatgaaacttgctagcaccaaagtcaggatattgcatctcttcggacttctctttcgggttatgttctggattccctttctggttatcttctggattctcctcttcgctttcagtttctttctctctctctctttctttctctttctcattctcatctatatctatgatgatgaattcagagagaagatgcatcggcttagaagtagcccgaacatgttctttttttttaggactggcacccacaaccatgtatgttgtcgctagagaaaccctaacatatccttcgtcacaaactttagtaccattgctcatcttacagatggccaccacttctcctttatagatctcaatactggatactatcactgcatgatatgagcggaaacctctggaatttgttccgggaccataataaatctcctctcctacggtccacaattccttaaaaacaactaagtccgctcctatgggaaaatgtggaagcaatagcaacgcctcctccattgattcaatttttcgaacactctttaattttgtcgtgtgcatatgtgggtcgtcagcatttggaggctgccagtccttacagtcaaacttcttgcagatctctctaggaatgccatgctgtttgatgtatagtaggcaatcctctatatcatttccataacagtaatgccctttctcaggattttcatcatcttctttctcaggattttcatcttctccaagatactctggtcgacaaaaggagcaaagataccatggacacagaggaatatactctacctcccagttgcgcataattctagtagcactgactaagtcagaggctgcataagcccaacaaatgaggtgaaagagttggtctctaataaaacctaggaatttcttccatgacttggacgtcaccaattttaataatgtctacaacaaaaacaaaaaagtaaatcttgataatttcttaaaaggtaataagtagatggttattatatagaatattaccgattctcgtatcctccaaaagagacaaggtacttttggattttcatgtaagaaaatcctactttctggtaacgtgtcttgtgcttgtttaagtcctgatgaacccacaagtgcttgaacctgatcatcttctaattcgcacattccctccatatctagtttattcagcaagtcttctgagagtttgtccataaaattatgaaacgcatcaatatccgggggtatgccatacattaggtctgtatatctgagaaaccaaaaatcagaaaagaagatgagccatgataagcattttatcatatttgggaagcatgataagaaacctgcaaaactaacaatactaacaaagctcttgtataggctaatggctttgtggcttctttccaagaaagcttaacaacattggtgtccccgataaaggaaggcacttctgcatgcaaaacctgtaacatacatggacaacatagctaaatctgagttagctaaagaaaaaaggggaaaaaaagaagaggttatggctctgtttttcacctctgtcattgcgagtatgtttatgcatgttcttagttcagtttttgtatcttgcctcttcatatactgaaaggagggttggctagattaaaccgcaaaagagaatatattatactaggtggaaagggaaagagaaaggagtgataagttactgctctcaccaatatcgccttatcatcaccgctcatagaatcaaaaagcaaataggctttgtcgtggtcactcatttcttgtaccagttgctccactgatgctttgattagatcctcaagattgatcaatctgcaataacgtccgtttttattaagacagttgtttttgaaacaaaacagcaaaaaacatcttacaacaagaaaacagaatgccatactactgttatttacaatacctctcagtggattccttgtataacttcgaaaagtcatccccgattctatctgatggttgtgtgggcacaactttgtacccgcacaagctatttgttgcttcaggaacctatatgttcaacgataacagattagtaaataactaagaaaagggacctaaccaagcagcttaaaatagttagacaaccttgtgcgccatatgatgaaacacgtataataagcactcaacatatctggagtctgatttttccacagtgttcctggcaggcatgtatttctgaaagcaaatgataacagaaaataattgatataaaagagatgaaagcaaatgataacagtaaataattgatataaaagagatgcatgtatttctgaaagcaaatggtaacagtaaataattgatataagacaagaagagatgtggcaatgttgcttaaggattaacctttaagagctcaaatattgggggaagcatctcggatgctatcagagttgttgtgtgtggtgagatc

SEQ ID NO: 442 - DNA, 81035 bp, Arabidopsis thaliana
gatcttgttaatagggtataacaattagaaattattgatttcatactggaatggtttgtttattgagcatagaagtattgtggataatgcgtggttaaggatgttttttggttgatgttgcagtttcattgtttcattctcgaacaatgcaccagacccggaaaaagattgtgctatggttcaggagttcttttctaagatggaggctgctttcagggctcatccactttggtctggttgttctgaggaggaattggatagtgctggagatgtgagtatcagtattcttctttttctgtctgtgaattgttttcatctttgtaccataatcattgctcgtttgtatacacagggcctggagaagtatgttatgacaaagctatttactcgggtgtttgcttcaaacactgaggaggttatagctgatgagaagctatttcagaagatgtcattggttcaacaattcatttctcccgagaatttggatatacaaccaacttttcaaaatgaatcgtcatggctggtaagccgatctagtcaaaagctagctcccggtagtgtttcctctttttgttagtgttcttacttgtgatcctttctctccttttggcagctagctcaaaaagagctccagaagataaacatgtacaaagctcctcgtgataagcttgtgtgtatccttaactgttgcaaagtgattaataacttactgctaaatgcttcaattgcttcaaacgagaatgcacctggagcagacgaatttcttcctgttttgatatatgtaacaataaaggtattgggaacgattgaacaacttatgcatactggtatctgaagtcgtatttttgttgtacatgattatgtttcgaatgtgcaagaacatctactagtgctaattctgttctttctttttgcaggctaaccctccacaacttcactcaaacttgttgtatatacaaaggtataggcgtgaatctaaacttgttggtgaagctgcgtacttcttcacaaacatactctctgcagagtctttcatctcaaatattgatgcaaaatctatttcactggatgaagctgagtttgaaaagaacatggaatctgcacgggcacgaatttctggtttggacagccagacttatcaaactggtcatggctctgcaccaccccctcgtgatgagtccactcttcagaaaactcaaagtctgaatcccaagagggaaaacactcttttccaatcaaaatcgtctgatagtctttctgggaccaacgaattactgaatataaacagtgaaacaccaatgaagaaagctgaatccatttcagatttggaaaataagggtgcgacgcttctgaaggataccgagccaagcaaagtctttcaagaatatccttacatatttgccagtgctggtgatttgaggataggagatgttgaaggcttgttaaatagttataaacagctcgttttcaaatatgtgtgccttaccaaaggattgggtgatggaacatctttagctccatccagttcacccttgcaagcgtcgtccggttttaatacgtctaaggaatctgaggatcatagaagatcgtcttcagatgtacaaatgacaaaggaaactgacaggagtgttgatgatttgatccgagctctacatggtgaaggggaagatgttaacaatctgtcagatgtaaaacatgaagaatatggcgcaatgttggtagagggaaaggatgaagaacgtgattccaaggtgcaaggagaagtagatgccaaagatattgaattgatgaagcaaattcctaagagagaaggtgacaattctagttcccgacctgcagaagatgaagatgttggttccaaacagccagttacggaagcttctgagtgagccaaatgacccatcttggtgatgagagtctcttgtatcggatcaattattcatttaatgggggaagcaaaggtcaagtcatagttaagatgtcatctattcgtttcttggagttatgagttttgaagatgactggagagccgtatgagacggaagctatctgcatctgtattcccttggaaaagaggggcagtcaaatggtaaattactttcttcaattgtgtttctttttttgctctttgtttctcagtgatatgattttggaggggctcgtcaacatttgtcaatccatatgtaactcttacatctgctattgcgtatatacaataaggatataatcagaataatatttgccaagctgttagatatgagaaggaagtagtcttgcaaatgattgagtgaattagctgagtaatggaatctgaagtcaaaccacatattccatgacaaaaagaatgggtaaaatctcaacagagtattgaataagaaaaagatgatttgtaatgtttgaggcttcctttatttatttgccatggattaacgttgttggaagctgtgagagagcgtcagacaagatcagatcaaacgtcagtgtctgaaaaacctgagataacagtaaaacacaagacaaggctttgtgagcttgaccatctccttcaacgaacggttatattcagatagagtttgtaacgtcgctgcttgtgactctagagactctgtgaatctagctaagttggagtgaatctagtaacaacgaattctgaggaatctcgtaagaccaaccaacagtcaaactcgttggtcaagaatctgaaccgggattgatgatgaaccatatcgttattaattccatggatactcgaattgattagtgtcggaaatgtttgtcttctcaccaccagataatttcaataattttggagtaattttctgaacttctatcaactttttattatacacgtgataagggaagcaaccaaaccatcgtccaccgaaccggtaaaatgctgacccttcgacaatttaaatccgttaaaccgaaccaaccaggagagaatcgggatcgcgacgtcgaaacaaggaagaagacgcgacgcgacgagtgagagcgagctgttttccgatgaaaacgccgacgctcctcctccttccattcttggtcttcgtatccataattcttccctcaagctgccatggcgaatgggaaatcctcacggagcaaaacttctcttctcagatccgtctccaccctcacgtcctcctctttgtcaccactccatgtactctcactctcctcctcagatcagtttgcttgttaagctgaatttctcacttgctgaggtttacctttatggagatatgtatcactattttatttgttttctgattggtttcattactgatttcatagggtgtggtgagtccagatctcttaagtatgaaattactcagatggttcagagaagagaagagtttggcttgttgaagttaatggttgtatacagaaactcagaaaaggtgttagcacaagccattggtgctgctgtcaatgggataacaattttgtactatcacaatagtgtgccttacaactatctagggaaactccgagcctcgaatatattgtcatctattcatccttatctgacatctacgcctgaagaactccctctcaaacatttgaagtctccaaagagtttgaaagatttccttcaatcatctgataaggctttacttctgttcgaattttgcggatggacaactacactgatgtctgagctgaagaaaaatgttactcaagataacctttggcagggtgagagatagtcctcctgatcttgtgagattaattatgttcctatcatgtttgtttcttttatggttgatttctatatagtttcttcatctcctaatagatgaagctagtaatagatctttagagtttagagaaattggaatgtgtgcctaatccttagacattctgatcattacttcgcaagaaacttctccaaaaaagtagaaactgatcgagtgctgaagctaataggaaaaaataaccagaaggtgcctggtagattctcacttcatgtctagatgatgttgatatgttctagtaggtgcattgcttccattatgttaatcttctttgaaccctgaaaacatgctatgcagaatggaacaatatgtgtggactccaaagtggatttggtaaagttccctggcttgaggattttagctatgcgaatgatactgctgctttgcaggaacatggcagggtaaatctgggtcttggacagacatgtaaccatgaagagttcaagcgatttagttcattcctcttgaaattgattgccaccacaaaagagttttctctgcctccggaaaggcaaaaatttggtctgatcacagaagaatcattggcttcatcatttaattttggaaaatctgattcgtgggcagcggtccttcagctggcaggatgtccacattgttctaagattttcaaggccggggatgacattcagagatttttaaagatggaaaatccgatagttacagaggtatggttctttctgtctgtatgcttagttgattttgcatattcacgtatctttatttaactgattttgtattactccagtgacaataagcggctttttgccgtcaaagcaaaatctctatgttgtttgagtcaatacaatttgaatctgtcgttacatgtctattaggcttatatagttatgtccattcaaaattttctatcttgcctgacatacatcaattttctttgtttttcttatgtagctggaggacgactggcaggaccatgagtcatctctacctgcaagtaaaccgtcagttattctttttgtggatagatcaagtgggtccttggaggagatgagaaggagtataaaagcacttgataccttcagacaggtagctgcacagcataaattgtctgacataaaaaagtgggagaatgatattatgtatgagaaccccgttagtcaaactgatcaagaatcggggtccgtgccacttccgaaaactgtccaaaagtttaagaaaattaagttcgagaataaggtttcttttatgattatggatgggggtaaacatgtagccctagatactatagcgccaggtatggaaggcagttccctgcaggagatactgaaaaatcttcttcacagaagaaaagaaagtaaattgagctcaattgctaaggatgttggtttccgtctgttatctgatgatgtgcacataaaagttctggatgcgttaccgtcacaagcagaagttgtgtctggtcaagatacaacttcatcttctgcagaaggttccagtgaaatttcacttcaccctacagaagcagatgtgcagaacagagtcagtatgagttctgaagcaaaagatgaaatgaaatcctctgaaattgaatcctcctcccctagtgatgaagagcaggctactacaaacaggagtgaacaattagtagtggcagaaaccgataagactgaggtttatttgaaagacaatgttaatggagagatcaaggtctcgttgcactcagaaccgaaggaagatctagtgcataaattcacgggttcatttttcttctctgatgcaaattatgttttacttagggcccttactggtgatgtaaagattccatcagcagtaattattgaccctgctttacaacagcactatgtccttcaagataagttcagctattcgtcactggtcgactttcttgatggatatctcaatggaagtctatctccttatgcacagtctgaatctagcattcagacgcctaaaagagctgcagttccaccttttgttaatctggattttcacgaggtggattctattccccgtgtcacagtcagtaccttctcccacatggttcatgcatgggatcaatccagtgcagagaaggctccttgtcctctgtgccaggacgttttggtcttttttagtaatacttggtgtgggttttgtcagaggatggagctagttctgcatgaagtttaccgatcattaaaggaatataaagcgattatacaaggaggatccaggaacaatcaaagatctgaattaggtatgtgatatagattgactagtttttttactcctattttctatctgagtgtacaatttgtaaaattgaaagtgaaatggatatgtttctaagtttcttatttctcttcttctgttgcttttttctgctctgaagcagagacaccaactaatggcgagaatctaaaatctccacttatctatttaatggattgcacgttgaatgattgcagcttgatcctaaaatcaataaatcaggtacctttgatgatagcttgtctggttcgttttatttattttagtatttgcatatcacagttttgctattgagtagttagagcttatgattgtacacaccgtattctcatttctgaatccagtattcacttgctctatgaatctgtaacattgcagagggaagtgtatccttctctgatattatttccagccgagagaaacaaagtcactccatatgaaggggagtcatctgtaactgacataacagagtttctagctcgccatgcgaataactctcgcgagtttttcagtaagtctttcagttgtttacacatttatgctgaatattatctctaaagtgtctgaccttccagaaaaatactgttttctgcagaatcttaatatgttttacaacttgtgactcaattttttcgtagtaactcgtttttttcctgcctaagctggttactgaggaatgcttttggatttttattattctgttttgatctggagcataataaacaaagttatgaatctttctctggcaggactccttcctactctgtctagaaatggaagaagaaactcaaacaaggtggatcagtcttcttcatctgcggtaaataataaagtgacagatggtgataaacttgttgaggtcgttttaaggaacagagagcccgctgaaagagaggtaaaccacgaccaggtcaattcccaatcgcctccaatacactcgctcacaaacgctccccaagtgaaaactggcacagtcctggtcgctacagaaaagctagctgcctccctaacatttgccaaatcaaagattctgatcataaaagcaggccccgagatcggtttcctgggcctaatctttaacaaacggataaggtggaaatcattccctgacctcggtgaaacagccgagctcttgaaagagactcctctatcgttcggaggtcctgtagtggatccaggaataccactattagctctgacccgagagcgagactcttccacaaaccatgatcacccggaaatctcaccaggcgtgtatttcctagatcatcaatctgtggcccgtcgaatccaagagttgaaatctagagagctaaatccaagtgagtactggtttttcttgggatactcaagctggagttatgagcagttgtttgatgagatcggtcttggagtgtgggatgttgataacagtgacattgactttgcttggccttagaagctcttgcgttgcatctcttgcaatgtttttcttttacgttttgttttagaaagaagaagaaaaagagtagaagatagtaaaacccatcatgtgggtagaagaaatgtttaaactgtaagaataacacttgaaaatgtcttctaaacaaatacaacacagaattagatatcttcttttgagatcattcctcttgcagattacttcaataggaaaacattttaataagcaaaagcaaaggtcagaatcataacaaaagtcattcatctctctttttgccagtcttgttctctaagtagcaaatcttatcctcaggatcagaaaatgccaagaaggcctctctatgagtaacatcagcctgaaaatgagtcaacgatgcacggtataaaggcgaccacatcctaacaccaggtagatcatggagtgccttcattgaatcaaacacaatactagtcttgttggaatctgagggttgcttattgctggttcgtagagcgctaagtgaagggattctagcagcaagaatatcatcgagtccgtctgttaaatcatcatacatctcatcataccactcattaatcatttcagacattagagaatccacaaggttttcttcatcgcttgattcttccgatccgctcgcatcagacatatcatcatcatgctcttcagactctatagaatccaaactgttttccccaacgcttgatcctttcgatccgcttgcatgatcattgtcagcttcctcttgagaaataaccatattgagtgagaatctaccaatttaacaattcaatgttacaacagcatacatatctctaacataacatggaaaatcaaaggggattattcagaaaaaacaaaatctgggactagaattccataatgaaaatctcaaaagccgattacctgatttttttcgggaatggttgtcaattcatcctcttgttgttgaaatctgaaacgaggaattgggaagatgttaaactatttgagcagaaactgattgtgttgtatagcaatcaacgctaaaagagtagatgagtgactagaatggaatctaatgttcgttcgaattactaataaggactcaaaattcaaatcaaaactcagagaagcaaaatgtggaaaaggagacgaagaagaagatatatcagattaccttttcagagaagcgatggagagaagcttttctgggtccgagggttttaagaattgcgcaggtctctttttgtgggttcccagataaaggtaagggtattttggtcataatctcagcttacatacttgtttgacttttttagtatgacttacgacttttgtttctttttttgtaaatttactaataatataagtatgagaagaagacacgtgaagcgccaaaagacttgtggggagtgtataccggataaggtttgcatggtctctaagacctcaggttcttcctcacagtcctttctaaagaatcatcatccatggatgtacgttgtttgatctctccaaatcttttgaactcgaagattaaagtttccggcaatactcatcaccttcccttttcttccctctccaagaaacaccaagcttcttccgtatgttacttcttctctgctttctctacttttctttttgcactgcatgtgtttttttttggttctgggtttggatatgtaaagagtcctcacgttttggatccaaacccaatgttttagccgatacaggcagccattaatggaggagggagctcaaaaacagtgaagcgtctgatcactttatctcctagtgaaggcaaatggaatggaaattggaagactcagtacgatgtctctctgcgtgatcttcaactccaagaccttgttgaagatggccctcccaattcccgtgtctctgtcgacctctctgtccaaagggtaactatcttctccaccactatgttgttgtgacagtgattgaatattagaagctgtcttctctcttacctaatcaatcatttagtgttgttacttgtctagcacgcgagcatgggcctctcagtagatggaagaatcatgacttctatcgcaagaaagtgcagcatttgctcttctctttatcctcgactggtaactatttcattctaaaggggtttcttcaaaaaccctttcgcaagaaactgttttgatgaaatatctgtgaccagatcgatacaagtttcaccgtctggattttgccatcaagccgggaaaatcgagcttcaacactgccagaaattggcggcgatgatccttcggtgagagcccttagaacatcataagctctctatatatatttttgcatttcaacaagtggaatgaataaaagtctctgttggcaggtgatatatgtcagacctggatatgaagctaaccttgattcccttgtgcaagacactatccgcctcacaacttatgctaaagtaagactctgtttaaactattaccaagtttcatggaatccacaaggccaaaaccttagatcgattatgcccatctcttggctttataaatcttggttgtgaagtctgattgtttcacttatattgttgtttgattgtaggatatatgctcggattcctgcgaaaaatcggaaccaacactgcactgtaagcaacattctgttggttttgtttctttcctattttcacatgacatgttagtaaaatattcgaaaggattaaagagttttcgttttctcaattgcttctgcagacgttggtcagacaaatacagcttctgtcgataagagatggtcaagactacttgaacttaagaagaagtagaaacctttttattctttgaatctctctgttcaatgtacttcaaagtcttaaaaagattttgatactgttcatattccaatatatacaaaataaaaaacacatttacaagaatatgtaatgattgattctaaataaaaatcatatgaatgagataatgaaaacgttatagctacttaagattcacatttgaacattattgtacctgattttgagttttatgacagtaacaccaacaagatgaagatgtaaaaaggaaaatacatacaattatcgttgagttgagtttagttccttagtccctctttttgttgcatttgctctctaagatttccgagaggtccatatcctttatccttctcttctctgccacaatcacatttcctcttattcagattcgcaccacacttcaagcacattcctttacatgcagaatcgcatatcgcagtgatggtgatttctaaatgcaccaagtctcttatatgctttgagatatctatttctttcacctcaggtggaaaatgaagcttatcctcccaatctatccatgaatcatcattatcatcatcatcttcgccttcttctttgtcattaccgaatgtgaatcctagatcaatgacatcgggttcttcaactggctcttcggttagtaatagcgagaagttggagaagatgctctcacctgttgactcaccacatcttcaaacacataagagaaaacccgttaaataacaaagttgatgcaatcacaataaagtaaaaaagcttcgatgagttcataagaaagcacctgttgcagccgagtgtgataacagtcctgacaattccatcaagtctcagcttcttcttcttccttatgacatcaaccgaaacttgaactggtgtgccatctggataatccttgacatcttttgtcactctaagtcccattgcagaagctctcttcttcgagacatctgttgacaaccttcccaacccaagcctctctaaggtagtgcaatattcaacatgtgtaactgaagcatttctcctatacataaccgaaccttcccaaggtgacccagtatcctcaatttcctcctgatcttcccaatccatatctattgtgctggtctctgtaaaagactcctgactaactaatatccgactctttgctagcctaggaagcttgatcggttcagtgaacaagtaactgatatgcttcctaataccggtggtaaaattaggatagccagcgggagaagataaacttaaggtacatgtttcgagtttcagaaaacttggacgcgactgtttagtctgtggcaagggagctacacaagataaagagcaaaccagagacattttcgtagcaaaggtgacaacaagaggcaatttatcaagcgtttatcaaacaatcatgctaaaatatggtataaaatccagccaaatcccaataggattgggtttatccagcttgaaacagagcacctgcaagaaacatttgctgatatagtgtcaacaatagagaaaagacagaaaatcttgagaagggaaataataatcttcaattgtttttgaaaagaatgaattgggtatcgagacttcacagttacattccagtcagagctaatgtaactaaaggaatttgagctaggaatttggtcgaacaccttctatgcaccattttatgtagataaaggacagacctttccacttccaattaacagagccgcaaacatcatgacggagacgaaatcgaaaaacaagcaagtaacttcgaatacaaaagatacaacaagaattaataaatcgaaattacttaccactaacaagtgcttcaacaacgctttagacgatcgactctgtaaaacttctttcagaaacagagctcttcttactcggaaatggctgcttgggtttatcctaaaaagtctcacccggtcaacttcggttcaaataccggtatttccaggtttatatcaaacctaaccgcaccccaataaaactaacaaagtcgggttttagtgttttagattcacgtcgtgaatgatctaaagcctagttggtggtggtataaagagagaagttgaaatgatctctcaaattggtagatcaattaattcattacagcaacatgcttacattgtgacagtcaagcaacacgataaaaccggaaaccttcaatttcataggcaaatccaaaagttttaaactctaaaatccactcaaaccagaatgagtcaaacaacaacaagaagcaaacaacaacaacaagagtcttcaagacactaaaactgaaattaggaaacaacaacataacagacactactaggaataacaataatcatcccgagccattacatcaaaccaaggcttattattacttaatctgcctcggcataagcagtttcgagatgagcttgttcggcttctctaacttctttctcagtcttccttcctttcttggacttgtagtaaacactcatgaacgttccaatagctctatacttcttgcggcactcctcatacaattcaccattaaacattctccagaagctcttctcgtcgagctcagacaccgcgtactgaggctggaatccatggttctctatcagccatttctccatcctacgcactgcttctgatccatcaaactcttcacctcttaggacacagccaggtgcgtagtagactccaacatcagtgtacatctgtgcatcttctgtgtctccttgtctgttttcgtactcgaagcctggctctgggtagatttggcctttgattggctgcttgaagagtttgtgtgggcaaagccaaattggatacacctgaaagagaacaaacaattcatgattttgttaataacatcaaaagaaactttaactagaagatgatcaatcatgaaaccgagcttttagttttacctccatttcgcggtggacccattcgagtgcatcgccaaccttgtaaagaggaacaagcatatcctgaataacatgcatatcatggtaatagttcctgatagcttcaccttgagtggccttaagaagagagacctttggaggcatcaaccaacctaagaggtacctaaaccagaactgatcaccaaatggaagaataagcttcccttcccagtacaagcaccttgtgtgcctgtggtagtattcacgagttgggatgtactcaacaaactgtccctttttcagggcggtctgcgcgtgctggtagaaccacggcttgaaccaccatcccacattgttgattttgttccctttcttctttgcctcttctttagatgcatatgttccaaccatcatcactccttccgttggattgtaaaccatgccttcgacgaaatccgggattttcgacttgtcaccgtctttgggagcaaaagaatcaatgtaaccttgagctaaggcttgaagatcacccttgactggtatgtaagtgagtctcatgtactccttgactttaataagcctgatctcagcagctacaaggagtccaagagttccttgcgaccacgggattgcgtagtaaagatcagaatactcattatcccttgtggcgcggacaagctctccacccgcaagaacaatctcgtaagcctcaacggtatcagcaaacaaaccgtagatgtgagagcttccttcaataccatatccattgataagtccaccaacggtaaggtcatcaagctcagcaacaacagcgagagacaggttcattgggacggtagcacgggaaatctgtcccatgttaacaagaggctccactctagcagtcatcttctccttgttgatctcaaggatgttacggaactcccccaagtcaacctcgaaatgccgggctctcttgtagtcaacgttcctcattccaacagcgatccagggcttacgagcagtgcagacaagcccgtccttggaagcatccctacccttaagccttttgatgactttcttgacattctcgtcgtgttccttctgacgtttctcaaaggacttggactctgaccacatgtccccgaggtagatgaggaagtagaatgtggctgagaatggaaggacgatgaagatgacaatgatccatctgaacttgacaaagtaatcaacccaagtcttcttcctcttgggcctcacaagcggtgtctgaagatccgacatttcctctcctcactgcatcaaaccaaaaagaaaatcaaatcaaccagagtttcaaaatccatcactgtaaaagtcaacaaggcctaagaagtgagcataaatctaccagaatgtcaaaaatactaaagattagtttcttgaatccaaaaagagtataataagcacacataaacacatacgtatacacacatgtgtatcagtgtatgtgtatgaaataaatctgtaagaagaagatagtgtggagtccatggaaacagagagctagtgaacagagagacaaaaagacatgaagttatgttctgaaagaacaagaacacagaaaatggttataatctttagatctacacatctagtattcctacaaagccatcaaagtctgttttctaccaccaaaataaataaataaaagttggtgagcaaagtttgaaactttgtttgaaattctccaagactgagatgattaaaattaaaaaacccacatagttcactagtgcgtgctatgaaacaactatgaaccaagtactgagagatctaacgacaggaaatgataagtcagcgactgagacagagagagaaagagaggtagagagagtacctgaagaatccaaaggagagagagagtgagaggatgagatgtgaaagtgtccccaagagtgtgagagcatttgtctttataataaaacgtgattcaagccagcctgcttcacttgcatttttcgctcaaaacaaggtattttttatttcccatttttttatataattttaaaataaaaaaggtaataataacgcaaaaatatagaaattaagaaatatataatgtatatttttcatgggtttgtataagtggtttttcatatttctaagtttctttgttgttatcgcaattaaaaattcgatgttagttgtaatgttgataaatcacatgtgttatatttatgagcaattttttagtttataattctgatgtaagaaaataaaaataaattgtttttacttatatcagtatttaatatatttttaccaactcttttaacatttagaaattatatgtaaatcgaacctagagcttaattagacatatcttccaaaatataatttcttacttagcagttagcatataaaaggaatatgaggacaaattctttgtagggatattttttctgaaaagagtttactgctataaataggtaaaagcaaataaataaaaaaaggcaacaaatcttagcagtttaaatttcttttaaatagaaaaatatatctttcttttggtatgtaaatcacaataaattacaggaagacatgtgcccaatgaaggaaatgtaattgtccaattcgttttttttttaaatgcattttatgggttgattgtattgatttttgttttctaaatgcttttagcgaaacagtcctcctacatgtttgttgatgtacctaaagcacattccatcctcgtgaggttactaagccgacgatcttatatattgtttattggcaaaaagttcattacaacttttcttatcataatagttattacaacaatctttaacatttagttttgatatgttatgattgaagcaaaaaaagcactgcctaaaatatcttgaaaacattatacattatgaatgctaatgagagttccttatatctttctctcaactcttaagggatcttcaaatgagtgttttttttaagccaaaacaattgtgaattagtcattcactttcatcttattcagattacaatgtagtattttagaaactaatgtgtagtaaaaaattttatataaaatgcctcttatttatataaaaaaaaaaactacggctgtgatgagaaatgttttcccaaatcccaatagccatgcttttcatcaaaattcatatatgaaatcatttgtatcattatcagtgcctacataatacagtaataaacacacaaactatcacgttatttggtgaaaaaggctctcaatatataattctgttactgtaaccaattatttgatttccacctaagtattttaatagttgatttagaaaagcaaataaaatcatgatttatttagaaaaatggttacactttaaagtaatgaagtgctcaaaaagttttttttgtcgccaaaaagtaattatttatttatttgacatagaaagaaaaaaaaaattacagggatgatggcctgtctgagaaaatatccagctcttgcaaaatctctcataaaatatatttactctttaaaatatgccaactaatttcttactcacatttacagctacaaatcatttttttgtagtatggaaaaataaatgtctatttggcgaatcacaccttttgacattgacagtttgacgtcagtgaaaatttggttgacgcttgacaaagttttaaaccgttacaaggtcgtgtaatcacaccaatgtttacattacaagaaacaccaatttgtttatatatatatccaaatacaaagacattactctttggtccaacgccaaataaacccatgcgtcatttctgcatcaacaaaaaccgtctttgtccattccattagtacctaaaaaagtgtgaagaagccagagacaacaacccacataaattatgatttgttaagattgaagcgtattatgactaaacacttctcttgaagtaaaaaaattaaaaaaaaaaaaaaaggtgaaagaaaaagacaaaagagaacggagaaaccgaagagaggagagttgaagataacaaatctataaacgaggactgtcctactccccacatgtgcctgacgtgatctcaactccttcacgtgatttctcttcctcattttttgtaattttattactaattctccattttttctcacttcttattaatccctttttattattcaaatttttgttttctgccacttccattttattactattcttgctaaaagagaatggaaaacaaaatcactttgtttaatgcacccacgatccagtttttattttaaattgttgtgccttctgtttgattgcatgtacttaacttcttataataagtgtagatctactcttaacgtgcaattaactaatagtctaatacatcggggacacgttcaattgttggtagcattcttgtttagcattatatataatccatgattttagcaataccaatcaatcattccaaagacagatcgtttcgttttcagtggcttttcattagacgatacattgttaccctactcaaaaacttaactcaaatgggttacttcaacaatcaatattgaaaagaaatcacttctcaacaatagattaagaaaacgaccagaaaggagactttcttgcgcctttgtcttggttccctgaaattaaccatagttcagtcttagtaacatcgaacaaaattgctaaactgatcctaatggggaaaacgatgcatgcatacaaaactgttacacaatactgtaaattgctaaacgcatacaccaaaaaagaagcaatcatagcctataaacagcgttctttgccttcgttacaggttgtgaaacactatttctaaccaaatattgcaatgaattttcaagcaaaatattgtgagttagataggcgatgggctaataagtaggagttgattgggaagaaacgatattagatatttgagagttatgaagagtttaacctctccctaacatgatctagcaagacaaagtttaatagccaggaaaccagcaaaacattgcaaaaaacagaaagaagatgaatgtaccttgtttaggctctgcgcatcgatatctccatgaactttttgttcctcctccagaaaggcatatccatggcagaatattaaagttgttgtagctaacaatatggaaaaaactaaaaccaaggaataaaaaaggccaagtgaaaaactcattactacttccacctagaattcttggagaacacttttctcaatcctaaagttagtgactgctaatatcaggtgtcttcgtgcaatgtgttatggaatcccttcagaaaaagaaaaaaaatctttatttgaataaaatattcgtgtactataacaaaccattggtatacacgttgatcacagttgtaagagattgggtgaaatggaccctaaaactttctgccgccaataagcgcccctcttctaaatgcatacaacagcactagaatgtaaacacaaaactgagacctcgttatacgccatctctgaggccgagaagagaaaattaaccaacctgccattacataaaaggctttggtcagtcaatcaacaatgggacactaacaaatgcaaatagcagaacaggactatgccacattgtatagaagactcacctgaccattgccaaatcgcacaatctttccaaaacaatacattggtttttaactttctagcgtaaattgtatgctaggtactcagtatgtctcaattacagaaaattaggttcatcattttcaacttacatagttttatctaagtgacacctattttcgagtaacggtataaacataataagccaaaacagaaactacacccagcataaatccagcgaaaaacagtaaagtgattccaaaaagattgcaaggccgatcctcaactatatgcagagattccatacatatattcaagtgaagtcaactgatattggcaaccataggcataacttacaaagttttcatttcgaggttcatacttactttggcaaaagaaatcgtaattatccatacaacaccatgtcacgggttgaagaaacttgagccgcccatgttgatagcaacgagcaccagtacagaagtgattacaccgaaccacaataatgctaatcctgaaattaacaaagcttaatagttttagacaaagcaaccatagaaacaaattcatcataaaatagagcctcgatatacctccattattaatagaacctctatcagatttcgcatttttcacttccaaatctgatacgtccccattgccagcatcttttggtcgagattctgagtccgccccagacattgaaggaacaggtgacacgcttgattcaccatcatcaactttattgttcccagtttctgatgaaactatgccttgaaattcctcgctcaaaatcaatgcagacaacacgttcataaatgactcttgaccaatatcatctgaaggaatcttgtcattctgcacaaatgagctaggttcttccgaatcagacatttcatcatcggaagcatctgcatatatggcttttgcgttgcgtttatcatcttcttcatcctccacgtatgctttgtatgtaagccggagtagtatttctccagtagatccctttccgaacaaactccaaccgcctcgtaaactaacaaatctgtctgtaggaaccgtatctggcagtgattcaaggtcaacctggatgtataatcaaagtagtaaggttatgtagacagcaaattttctattcagcactattttcctggtaatttatgtagagattatagtgaaaaagttatcagagcagggctgactactcaacctacagcaccaataaataattatgtgttgtcaggtttttgtgcagaaacatgtgaattggttgcttagtagctgaaactggaagtgaatacaggtgccctttgtaatactgacaagaagagcaataaccgatagggtgtgtaccctgaacaaactattcaaaagaggtgtgacatgctcacataataccagctactacagatacagcgaaaccattgccattgcggcaactaattgttcactcactgtttctcttactcattcaatcacatagtttttacatcataaattaaaagcaagctgatatcttattagtattggtgctagttctcagtctcatcttctcaattcaaacccttaagttgagatattgtgcagagaataacaggatggaactgggttcttgtactatgaataacaaacatgaagtagatgatcatcttatgaaatcattgttgttaacagatcaagctattcttctgcagatttcaaatgggataaaaagaaagatgatttacctctccgataccaatagccatatcggcaaatccaagacagtcgttgacttcaatttgtaatacttgctctctaggatttgacacaaggaattggaagtcctgaccatatatatgatacagaaatagtctattaaattttaggaattcagcatatactataatccaccaccagattatgaataagccattaagatatattgagcagttcaacctggttccagattggctgaccaggagccccaatcacagtagtttgactgttcttcttactgcggataacttgatcacctattcgtaaaataacatatggatccgttctacctgttacaaattatcaaagaacatgtgctgaaggaaggaacttgcaatttttaagtgatgaagcattcgctatatgtgatataagcattagtatagcagttcttattgctctaagaattcaaagatacttaaggatatatataaataatacaacaacacagactgctagagaacaatgaactgaagaagaagagagatgaggagtgagtatatgacttaccagagaacatgtatggaagtttctgggcatttacaagagtaacagacagttcccctacaaaatccttgttcccttcctgcatttctccagattttaagtcttctgaaacaggcccaacagcttttcccttctggaaatccaagacaattttctttgggcgtacaaataatcgaggcaaatcttctgtcagtagtttggtcaagaacctgaaagagatgaagcaaaggaaggaggaaagaaactgatttatcaatacgtcggaagagagtaaacaatcaacagagagaagaagctaaaacgaatacattgaggagacttacattgataaaacaggaattcctgatgttgtcatccaaagcattcatgcaaaaagaagaaaatgattaaagctattactaatgtacatgattataaaaatcaaaggagataatgagaaagcaacagacaattatgattaactaatacccattagattaaacaatcggaatggtgcaagctcaaatttgatctttggaagtgaaacaaacgcccatgatgctgctccaacccaaggcgctgacggaatcaatcttaatttaacccatagttcaccgtcaatgtcaaaatcccgaataccaactggcacaactactgggatgataccaaattttaaagagagcattaacaacatccgagcaccaccagtataccgaagaccaatctggtacctataagaagaaaaataagagtataagcaactttcaactgagccgtgaacagactgtttggagtacccaagctccaaacgaatcaacagagaaaatttctaagatgcagtgaccattggtgtgttgaatccgtggatcatgtcagaacaatcccatccgtaaaaaccaagtaagaacaatcccagcatttgatccaccaacacaatgcattagctacctaacatataagtaacgtaggcaatcgcaccaaggtataaacttactgcaagtcattaacacggcgagatgtcctcctctcaacatttctaacagacaaaggctcatccccaagagagaattgcttaatttcaactctctgcacataatcaggcttcttcaaatcatcaatcacaggctgcaacaatccaacaagccaattctcaatcccacctctataaactttccagagcttaaccaacaccatgttcacccactccaccgactctttcctttgcaaatccttctcaagggacagcgagaaactggtgggaacctgtgcccatggcccggctcctctttggcctccatcaccagccatttgtctccgcctctttctccaagtccatagcttatcacaaataacaccaacaaagaagaagaatgcgaatagaccaattgcattacgactaatcggtggagacgggattgggtggattacacctagctgagtcctgagcttatccactataggatcttctctaaagttagtgaaattgtttctatcaccttgaattgcagactcctgtgaagatgaagatgcttcttcatcctcaaattcattcgaaaaccgagtaaccacaagacttctggcagctcttctcgccgaatccgctaatccaatgttcttggaatccgtacgaattccgctggaaacaaacctagaattcgaattcgccgcatgaactcgacggagaattctccgcctctttgtgaatccatcggagaacacaatcagaccgtgctcattggagcaaggacagagcagacgacgtgacacaaaagaagggaaatcgaaactagaacaagaagaagaagactgtagaatcatttatcatcaatcgaattcaccggaaactccacgcaggtgaacctaattgacgcatatcttcgccgttacaacagcagacagaatacagagaaacagaggaatagcgaatgtattagtcagtgttcacggtaggtcggtagctgagaaacttaggtctgtcttccgtagggtttcggataagaaattggaatcgagaaggttcgaaagtagtagcgacaagggatgcgcagaagatgggagaatgtgaatcggcaagtaagtgatcggtggagagtctatcgtcgtgaccttttgttgtacctatgcgaccaaagaatatgcgactgactataaggacccctcaaacttaagccatttatgttttttttgtggaacgcgttaggcgcgttactatatatggttggtcattatttcatttgaactatcagatcagtttaatttctaacgttgttatactatcgttatttaaatgaaagaaccgaatacaagaaaagaaaagcttctgtatcgtcttgctactcttgggaggtcggcgacccaacttgttagtagttcgttcgtaatcctttgctttttggactcttccacttatgggtcggccacccttttatgtccatcaagttaaaaataaaataatagtggtggatgaattatggtcaacaggttgctgttaaattagatagttcattggttactaattttagttttgtgcaaccatgtttattgtgtgttgttttctttttgtcggatgtcaataactaatgtcactaaattgattattttcagtcaactttcaattttcatatgtttgagttagcttcttatatactttttgaatctaaaaacactatccacgtgcgtataacataatgtcttcttttcgatcgattagggggttttcacgaaagaaattgacttaggaggtgaccaaatcacgataaagaaaatactgggttatttcataaattaactttaaaatataaggtcttctcggtaataatttaaaatatctcctttcttccttttcccccggaacgtaatctcagccgtccatcctttctatcatcctacgatctatctaaaccgtcggctgaacttcgttctcctgaatcgcgcgacatcgacatcttctgattcttcctcactagttttttcctaaaccctaacttcttcgttcgcgtcgacgaagctgctggcaatttctcgtcggaaactattactcgataccaccacctgtttagtctttaaaggtaatggaaggggagaatacaacggatccgccgtacacaacggcggcatcttcgggacagagtatcttcgtccgtcctcctccaattgctccagtcttggctactacttcgaatttctctcagtcggagctgaaggagctacactctatgtctgtatgttgctcatgctcatttctgattgttgcatagtttgtttatcttgagcgctgtttaactcgtaaagaagctcgatcttgtctctagttcttatcttttgatgtggatttgtgtagaaccttttacaagaacttgtcgtatattgatttagcagaaatccttataattagatgaattcatgtctctaattgaatctatcgaattttcgtgtcgttctgatttagctcactaatagaatttgtcaggattcaaccttttttggtgtatgcattgaacacatgctgattcatctatcatcaggttgtttccttttagtctctaaactggttccgtggttattttggttgctgttgtgcagattgctagtacaggttttgtctctcagtcagttccatattctgttactgcacaatggggtactaatgcagcagcctcctcaaatgttaatcccatacctcaagcttcgcccatgctagcaaatgcaccttttggtcgaccaggaacactcgcccctcctggactaatgacatctccgcctgcttttcctggttccaaccctttttctacaacgccaagacctgggatgtctgcaggtcctgctcaaatgaatcctggtattcatccgcacatgtatcctccatatcattcactgcctggaacgcctcaaggaatgtggttgcagcctccttctatgggtggtattcccagggcaccttttctttcacatcctactacctttcctggttcatatccatttccagttcgtggaatctcccctaacctaccatattctggttctcatccgcttggtgccagtcctatgggaagtgttggcaatgttcatgcattaccaggtcgtcagcctgatatatctcccgggcgaaagacagaagaactctcaggaatcggtacgctcgaggtttcatgatagattactgatccatgtaagagctgtttgaccttaatggttattctattgagtttacatatttttttatcaggatcatcttgtattttgcagatgacagagctggttctcaactagtaggaaatcggttagatgcctggactgcacataaatcagaagcaggagttctttactactataattccgttacagggcaatcgacctacgaaaagcctcctggttttggaggggaggtgagtattgctgattacatggcttgttcattagttgagactacgtctattccatacgcatttggtatcacgtctacctattttgcttcacgacatgtcatttatgagttcgtgtctataatacgtatttgcatttctagtatatccgaattgatgttttacaatgtcagaatttgatccagatttttgtaaagtcctagatgtcatatattcattagctgatgaagttctctattttccgggccttatattgggattgtgatcctttgttggtatcaataggtatgaagttgcttaagattgtcgagttactatattattgcagtgaacttgttgtaagagcatgtgaattattacacaaatcaccttaagtttattcacagactgtaaatataaattgccttgatgctgtgcaaaaacttatgaatgatatttgttctagtataccttgataatggatgcacagtttcttcatgttgccctagtcctttagactttttaagcaatttataatctatacttttttcttaacttttgcagcctgataaagtgccagtgcagccaattcctgtttcaatgtgagttcttagatccatacttgctctgacaagattagttgtcatattttcaatgatattagcatggtgacattatattgttaaatttctcgtgtattattttttgtactaggtcgccaacaatttcattcccatgaaatcaacatatttatattttgttgaattactttgagcctgctaaaatactttgtacatgttagagatatctcatctaaatgttaccaaatgtagggagagtttacctgggacggattgggctcttgtgtccacaaacgacggcaaaaagtattactataacaataaaacaaaggtcagcagctggcagattcctgcagaagtaaaagatttcgggaagaaactagaggagagggctatggagagtgtagcatcagtgcctagtgctgatttaactgaaaagggttctgatctaacaagtttgagcgcacctgctattagcaatggtggccgggatgctgcatctctaaaaactacaaattttggttcgtccgcgctggatttggttaaaaagaaactacatgattctggaatgcctgtctcatctacgataacatctgaagcaaatagtggtaaaacaactgaggtcacacccagtggagaaagtggaaatagtacgggtaaggtgaaagatgctcctggagctggggccctttccgattcttcttcagattcggaagatgaagatagtggaccatcgaaggaagagtgttctaaacagtttaaggtgttttgaatatttcttgtggtttttgtcttttttgacatagggtttagtttagatttcttttctcatgtttttcttcttgcaagttaaattagccatttagacacatcttatttaaagcattctagagaaaagtttagatcatgcattgaaattttcctctgtagaggggtcttgttcatatatcggaatgccatgattccttgatacatgccaacttctagtggacatttttaagtttggaaaccttgaaattattcagattgaagataattttctaatatcctgttttttttacttgatccttgcaggaaatgctgaaagagagaggaatagcaccgttttctaaatgggagaaggaattgccaaaaattatctttgaccctcgctttaaggtctgtcaagcctaaagatcgtgacaatattttgatatcttattctattttgaaattccacgtccattgtttctttccttgcatgcgtttgcaacttgcacatttccagttaatgttatttgcgtctatgtcagcattgtaacatccattcgttttgggtgctcaaatagagcacaaattaaagtttcctatagatttcctagctcggtgtagaaagaagtttacatctatattacatttggaaacaagtctttcactttacttatattagagtccataactagtatcctcactgattaattgttctgatgccttgtatgctagctaaatgattttctgtagagaaagagtatgcctttggttccttccaatgttagctaagtaaagttttgaggatgttagagccattatgtgatatagtttattcactccacccataatatgttgtgtcgccagaaacttcattcttatttgctaattagaatgttagaggaactattactgtgttaattttccagcattcctgttacagtgccacagcttgatctttggactttttcgattatgtatttttatccggagagttcatttttcttgcaggcaataccaagtcattctgttagaagatcattatttgagcagtacgtaaagacacgagctgaggaagaacgtagggaaaagcgtgctgctcataaggcagctattgaaggtttcaggcagttgctggatgatgcgtctacggtaaatctttttaaggaactgaatgtatttttactttgagctacctgacgtctttaaacatttttattatttggtttgggatgttctcaacttctatatctcttgtgggaatgtatcctcatttttccaggacattgatcaacacactgactatcgtgcttttaaaaagaaatgggggaatgatctccggttcgaagcaattgagcgtaaggagcgggagggtttactgaatgaaaggtaccaatatagatcttgagatcatattctatgtatgttggaaagtttgcttatagccttcaagtttacactggatgtgtctttccctgttgctttgtgatgttttggttgtaactgcagcggatccttttggggaagtttttccttgtacaagaatgatatgccctttatgattttatttgtcttcatgtgagtttttgagtgtttgatagtttatacactgtcttggctcttatattttccctggttctgttgcagagtcctttctttgaaacgaagtgctgaacaaaaggcacaagaaattcgcgctgctgctgcctctgatttcaagacaatgctacgggaaagagaaatatcaataaattcacattggtccaaggtatgtagcatatttgtttctatcctttgcgaccaagagagatagagtatggaaaatttctaaagttttcaggaacttatggtgtttgaggaaattgtaatatttacttattgaagttacaagtattaattttatgtatcttatctcttatcaaatacatcatttgattggcaccatttataactggttagcatattcataccacctatatgatatatttccatattttatcaggtgaaggatagtctgagaaatgaaccaagatatagatccgttgcgcacgaggatagggaggttttttattatgagtacattgcggaactaaaagctgcacaaaggggagatgatcatgagatgaaagccagagacgaagaggtaaattaactttttatattcacaaattacaattcatgaaaagcgctagaaagttccacaatgtttaagcagccctcttatactttcttttcaaagtgagaatattcacgtattccctgttttctggcatgttatattacttgattgtttgttctaatttgagagactttggaaaatattattatcatcagattctctgcatgctattgctagtggtgcaggaagaaacaagttgtaaattagcgaatgttatagtttgctatacaagatttttggatctcttttgtttatgtgcctggaatccagcgtaaaaaaataaaaatgatgttttactggctataaatgtggtaaactacatagacacataatgtatttacgtctgtgtgattcctgaatttgggttcaggacaaactgagggaacgggagcgtgagttgcggaaacgcaaagaaagagaagtgcaagaggtggaaagggtacgacaaaaaattagaaggaaagaggcaagctcctcttatcaagctttgttagtggaaaaaatcagagaccctgaggtatttctacttcttttatgtagctagctaaaagtttcatttgggctaaagatgttagtttgtaaattgtttactctgtggggattctgattggttttctttgttactttcttcaacatctgaaggcatcatggacggaatctaagccaatacttgagagggatcctcaaaaacgtgcctctaatccagacttagaacctgctgataaagagaagctattccgagaccacgtaaagtcattatatgaggtacgtgtactactcaactgtaacccttaccaaatcaaattctcagcattttctgcaacaagatcagaacaaaacttagtgtcaaggaccttttcggcttatctcctttttggttgatttgaggaaggaaatatactatggttgcctatttcgtctaaatgtttttcttattgtgcttcacagcgatgtgttcatgacttcaaagctcttctagctgaagcgttgtcatctgaagcagctactctacaaacagaagatggaaagactgcgcttaattcttggtcaacggctaaacaagtactgaaacccgatatcaggtacagcaagatgccgaggcaagatagggaagtcgtatggcgtcgatatgttgaggatatatcgaggaaacagagacatgaaaactatcaggaggagaaacaacgagattacaagacctaaaaaaaaccttgaaccaataggctctaccccatggcttgatatgttgtgaacaaagatcaccatgtcttgttggttttttccctgtttgttaactgtaaactaaatagttttttttcatgtttctactttaatttttccgaacagtattgtttctgtctaaatgtttgatttggtaagatcttaatgtatacaattaaataagatgtaggtttgtttttgctttgtccaaaaatttaaggtttggagatgggaataagaaaatgaagattaaaaacgttactccgaaaatttttaagatttacttaaaccgtttttctgaaaattatcaatcaaattttttattctgtagttatcacttgttaggctacgatgtagaatctactaatattgacaatctaaaaaatatgatactcttttggatatatattaatcattactacagttcaatctatatggtacaacttttattttcgtgcaaacaaaaaaataagaatctatgtagtacaatttggtaaattgtatagagtggaatgttaggatatgacaattttcagtctacgtctgtggtgtaatctcaatatccatgaatttcaagaatatcaaatctggaggggggcatgtgacgtatatagccaagaaaatattttctcccgtgatttgattttgattttgaattgttttgtatgcaatgctcaatgaattcaaaggccaacttgttcatctattagtttctttcgatcagcatttttatttttattttctaaagaaccagaaatccaaatttgaagtgtatcctataatattcgaaatctgtacttgttatgtgaacttgcagtgactaaaggaaatgtgcgtcgtataacagaaactgattattttttgttttctacatcctctgagcaaatgcctcaaatctaagagcaaatatagaacgtatttggaagtgtataatccatgattactcaaattacaaaatatccattttatttgcatccacaaggacataattatatgcattctcaaaactacgtaaaatacattttgcatgaaaaagcttataatatacacgagacgtgcatgtgtgtgatgatgatatgatgacataaaaatctatatctagagaaataagaaaaaaatgacgagtgaattaattatttaacaaagccttggaaaactagaacttgaatgtgtatgtccatgtctcacagatcttgacattacttcactcttcttctccttactaactttttcagaattattccattgcttcctctccaaattcatcattagatcatcttcaaacttctccgacatatcaaaacctttcaaacacaccagtattggtttctcttctaagtacttacgtgaattccagatcttgtttactttgttcttgtcctctcttgagtgtggtcgagtctcgtttgataattgttgtgacttgagtgcttgaactgcaatatttggagggatcttgggattttttgcaagttgtttgcatgtgtccaatgtcaatttcttgtagtttagacatcgacatagttttgttctatcctcggatgatagtttcggatgagactgcataatcatagtttatattagttcatgccttcaaaatatattgactaaacaaaaccaattatatagtaaaactgtaaaagtactaaaaaagcaagaagacgccatattgatttttcttttctttgcaagatcacattaagcttaattagattgaacatatttagttttcacgtgaaactaatcttgttcttcttatttagaaacttaataataataaataattagtcaaacaaaagacaaagtagctagattctgatcacatgaatgtccagtaaccaggacaatatataacacagtaattactcattagcaccctattcttttatttgtttactatttataaccacataacatgtttattaattaatgtttttatcaaacagtattcgaaaattgcaaacgcaaacatacaaaccaatcaaaacgtctgtgtgtcgtatttgtgtttgcaaatttcaagtgaatgtttgatcaaacattaaaactgttttttttttttttgttaaacaacgttaaaactgttatgcttttaaaatacagacaaaatattctaactagtagaacacagaaatccaaatgtaaatgatttgcgtttgaaagtttcaatataattccacttatttaagttttaggacaattattaaaattttgccaccaaagttaccactagtacttcaacgtgtatgaaagtagtatgcacatatatatgcaatttcagattttcgaatctttagatatcacaaataaaagaaagacaaaaagataagttaaactctttcatctattctcttgagaagtgtaaaaagccaaactatatagaaacttgtatacttcttgtcatcttctatttcactctattgtttgttttcttttgctaaatctctactttgtttgtttttgtctcattttgttcaatatctttttttccaaatcaacgtgcaattatttggaaaataaatctattaaaaaaaaacaagaaaaaacagaaatgtaatgagtgaaaaactgacctcaagatagatgttaatggctctgtataatccatcaaaccaatctctagctgaatctggcaaactctctgcaacttcaagaaactttgacactttaagattctggtctggagatatctctctgagatacttatcaatcaacttcccaattcttctcattctcaaattctgatctccttcttctgtgtttccaattcttacaaacactttgagtaatcttatcaccaaatccacatcgtaaacccctttttctccttttcctccagctggtatcagaagatcatcaagtgttgcttgatccagcatttctcctataaccctctctaaaccaattcttgattctttacttatgctaaatcccgataaaactcgcagaacccagaacatttttctgcatgaaaacgcggttttcgctgcgaaaaccactccttgaaccgctgtatcagctaaacctgaatactcgagcttgttggttgacttgtttgggacctttgtcttgaggtaatggagaagaaattttgtgaggaccaagctgtcattgttcttatcatgcgcaccaagtgtatttatcagcttttcaatgatttttggcccgagaattgacatatcgtcgaaccaccactcgttacttgtcctgcaagaaaaagacctcgaagtagaccttttgtctgaatacgacctaatcattgccgtctccggcgactgagaggaggctgaggcagaggcagaggaagacggagaggatgatgaaaagacatgactcacgtctgaattctgagggattttggctaaaaccccgaaaacaagcttatcaacaagaccgtaagaatcagcgtgtaagaacacttgctcgcagctcttgagacacaatacgatgtcgttccaggaccagtagaacattccttctagaaacttctctgttcgaagcaagagattcgaggaacagagtttctctgtcatctcaaggaagacagaagagcaatgcaaaatggacacatttgagacatctatcgagattcctccaccataacagaatcttaaaaccaagtcgaacccatctgacccacctggaaaatcttcaacctcgatgatgattctactgttcttgtgattctttttcttcttattgctctgttttatcatcttcctcaagaagcctgagtactctgagatcaaatcctaacccaagaaacagagaaacagagtttaattcagaaaatggaaacagaggaagttagggtttgaattagtgtggagatttgatttggtttattacctgattgacgaagaaagtaaattggttattgagattgatttgaagatcacagcaaagagacattgtatcaacttcttttgcatttggtgaagatgaaacttcttgtgagctttcttgttcttgttcttccttttggattggagagagagagagagagcaataatagttatcacatggaaacggctatttatatatctctttttcggcgtctttatttcaattatctaatgtacactttcttttatcatcctttataactcatataaatttatgcaaaaggaacttatatacaaacgtcatcgaaaaattgtataaactggtcgcatggaccaacttgtaaccctagtgtgtagaccatctaaaatagtgaaaatgtaataatttgttgccgtttgtaatgaaaaaattattgttcgttattgtttagtttttttggtattagataataagattcattgcttaatcgaaatgtactatatgatattaattttggagcaattagcttgacatgcatagtttacttctttacattagaaaaccttttttctaacatcgaacttaagaaaagttatataaactgcattaattgactgcatgtttattttgaaatccatataatcttgtgtgcagagcacaaatcaatatgacgaggcgttgttagttgttactaaaaataaccaggtgcaaagattgattccttaatgcttcattgatcaggatggccaaaaaataaaataaaaattggtgttagaggaagaaaaaaaaaatacagtaggtgggtaaacaaacagcagggaaatagcttacaatttgttgagaataattcataattatgaccaacattattcaggttatttggggtaaagtaaaaatgtattgcatcaaatcaaataagatttacattttagacagtgaactataggtcacgactaatatcaaatatatatttccagtagcacagaaaatgatgcttcatgaactctcacttatgacttgtcaatagctcaaggactatgctactcaagttgtaatatatatattctgtatttatatgctgttttatacacacgtaacgtatatatgaatgtgccccctttgtttttatgtgaattataaatattctccctttcttggcattacattataaattcgtaatactattattccacttccatgtaatttcaagagttttcttccctttttatttgtagaatatttatatatcagttgcttgtaaagttgggagtttcactttcattgcatgtgaatgggccgggtagggttttatgactctaacgtttgtgaataaagtcgactacttgcttttcatcattatccaaatccagccatgtaaaatatatgtaattgaaaacgatatatgtaacaaaaatgttataaaaaaaagatacaccaatgtcgatatacattacgactctttgagtacaaaataaaaaaatatgactaacttccgataatagtttttatttattattaaaaatgaagtttccaaataaaatatcattttaatatccatacaaattatgaatagtatgtgaggtttagggcaaagtcttctgagggttcatcaatgggatgggagtgggacgaagaaacgaaggcgacgagaggatttaggttttattgttttaaaatttttgtgctctagtatttaagccctttaacaggattttacagggaccaacaaaaatgtaaagccccaaaggaagaagcccacttaaaaaatactaaagtaaaaataaataattaacaggcccatttggcctcatcgactaaagctagcccaaaaagaggatacaataaaattacataaattttgtgtccttttcgatttaactttttcttttagaagaacaatcctttgtttttttgtgcaaatctttagaatctcgagaccaaaacttaagtaatcatcaaaaattttgtcaagtttacatttctatgccaaaaattatacaatatcataatgttcaagcagtgctctagagagcaagaaaaaaatggttaagacataaaaactagtcggctaacactgttcaagaaccatgatttatttgcttcatcaacgaactgattataattcaaatattacaacagagcggcaaatcattcgaaacgcggtacgaacattaaaatttgatgtgcattttggccaaaatatttgttgatggattcaattgggtagtggaagaagaaactgtcaaagtacacctactttgcagtcaagttgtaagaacataaagtacgtatttttttacaatttctaaatatactaaaagcttgcagaaagtatgtatatctagaagtacgtatctcttacgtttgtgaaaactatttttataatttgacaattttaaatgatttgattattacacaaaaatagtcgaggttatgtaaaaatattttttaaaattttcgatattttgtccggtacaattatgtcaccatctcgattcaagatataaaagagttaatttagtttcacaataaaaatctcgtacttacttttcaaactttataattgtgttggataaaaagtacaattgaatcttttaaaatcaacaatgagtgtctgttttgataaatgcataaattggagtgaaaagaaaaaaacaattccagcttttgcgaagttggacatattaaattctacacaattgtttttttttaaaaatacagaattgtagatagaatgaatattgttttttttaattaaaataattgaaaaaatggggataagagaaaatggaataatgcttgtgagcagagagagagagcgagcgaggaggctagagaatcgagaatcgatcttcgccgaaccaccttgtcttctcttagctcatcgaatctctccgtcgccgtcgattcttcccgccggtgaatctctgccttattgttttcttcaatttgatcgtcctgaattcatcgtcctatttagggtttcgatcacaatctggtacttctcttaatcaaaggaatttttattttgattttgagggttttattggtttgaacttagctctctagctcgtgaaagtgttgttagttcgtcgtggaaatcaattccttccctgtgttcttcttcaacaacgtttagtaattttttcgtagatgtttaaatctctaacttgttgatagagatagatgttattattgccaaattaggtgtacaaaagaatgtggaattttctgtttgagattagcttctctagtaaccttctttgcaattcatgatgccaattgctaagtatgtaactatgtctggtatgtgagctgggatcatatgatacctgactatcgactcaaagagaattatgttaagtcaatcaaggcttagttctgaggctacagtgtgtgtggtcgatgtgctgttatggtggaattggatactaaaatatgtctaagagtgggactgcaatatgaccttcttagtttattcgatgttttggttgcagaagaggaggtcatggacgtttctgctagaaagtcacaaaaagctgggcgcgaaaagttgaggagggaaaaactgaatgagcattttgttgaactgggaaatgtactcggtatagactcaatggttatgtggatttttctaaacagcagatgatctcactttgatcctcacatagctcttctgtttgcagatccagagagacccaagaatgacaaagccacgattctgactgatactgttcagttgttgaaagagctcacatctgaagtcaacaaactgaaatctgagtacaccgcattgacagatgagtcccgcgaggttcgtaccttatcccttacgctccaggcttttcctaacagaaaaaattagcagtctacatgacgtaaagatatcgatagggatcccaatatagataactcattgtctttttgcttttacgatatggtgactacacctatttcgtaagatgcaaactcagacgggctatataatgtaactgcttataggacttgttgttatcatcaatagcaacacttacaaatttactggtacttgtataacaacggttctttctgtagttgacacaggagaaaaacgacctgagagaagaaaagacatcgctgaaatcagatatagagaatctcaatcttcaataccagcagagattaaggtcaatgtctccatggggagctgcgatggatcacacagtcatgatggctccaccaccctcctttccataccctatgcctattgctatgcctcccgggtcaatcccaatgcatccatcaatgccatcttacacatactttgggaaccagaaccctagcatgatcccagctccatgtcctacatacatgccctacatgcctcctaatacagtcgttgagcaacaatccgtgcacattccacagaaccccggtaaccgttctcgggaacctagagcaaaggtttcaagagagagcagatctgagaaagcagaggactccaacgaagttgcaacacaactcgaattaaaaacccctggatctacttctgataaggtagagagacttaaaactagaagctagagatctccaatttttttcggatttattatcttcacagttattcgcgaaattgtattttgaaggatacattgcaaaggccagagaagacaaagagatgtaagagaaacaacaacaacaactcaatagaagaaagctctcattctagcaagtgttcatcttctccgagcgtacgagaccacagttcttccagtagcgtagctggtggccaaaaacctgatgatgcaaaatgattcgaaagaatctgatgttgatcatctcaagtatccaagtatcgtttcgatgagtactgtatatagtgcgagtacaaaatgcacttagctgtttaaagcagtgttttgatgcaccgtggcattcgttttcctcggatagtcatttctcagatgattttcatccttaataggtctgctttagttctaaaactcggatgatttgtaatttccagtgtccaaatctactaattttattaatcctataaattaaacaaacttatatcttgatttttttttaaaaatcatagattatttatactattgtacaaaaagaattacatttaaatcggtaaatatagtttcaccataaatatatggtttcattaatatcataaattagtaatgatatagatatatcaacaatatatatttatatatatattatatgtaagaaatttctttgaaatatatttttaatatttagttctcatttgtacttatttgaatttagttctaatattttactgtatcaaaaaaaatttggtgttattttttagacatgagaattattttttacttataattagttataaaaaaaatattttttataatgaaagaaatcttatagtaaaaaattactatgaaaaatttctttataaattaataaaattttagaatcccaacattattaatttgtaaaggttttactgtagttaagttcaagttcaatttaagctggtgctaaacgttagctacgtgttcgtatgatgtcaactgtctagatacaggaaaatttctccgaatatacagcgactacacatcaaccatagagaacagtatgaagtaaatataccctctatccatcgcatatgtagtttgtgggagtgctctgttggtttcgctttcctctgatgttgtataccctgtattgtcaaatatgactgcgacacggttcccactcatctcatagaccgctagataatagtctgcatgtatataaaataattgttaaagacaaaacatagggcatacccaatatcctttgtgcatagtatttagtatgtcatggaagttaactaggtctttgagagttcgaacgccatgaagagcaaaagaaagagaggaaatacggaagagaaagacaaaacaaactaaaaaccaaaagacatttgacctatcgtttctgtttcacaggacgaccataagatgtaaaagtcttgcccatccattccacaacccattatcgattcacaaggcaacataagaagaagtttacatttcgatgagctagagcaattctctagcgcagatcacaaacaaccaactccaacctctggttatactatccaagatttttacaggatggtgcctgaggctgccaggtttcgaaggaataaagagttttggtgtagcaagaaaaattaagttacaagacactaattatattgtagatagagacagaattgaaataaaatatggaacataaataaataattagataaatgagtcagcagcttcggtgaattgttctgtatctcggagtattactgccggcgacgaggatagtcttatcttctcctctctaatgactttgattcattttcctcttcagattcaaatcctagattcaatcggagaatgaccacgacgacgccggagaagactccggcgagacctctctctatccaagattgggacgttctcatcgacgacttccgcgacgccggcgctcctcgcgactggttcacttccgttttccagattgattctctggtggacttcgctctctcgtctctcctcaaaaaagacttccctacaccagtgaagctctcaatcctagtctttctcgatgaattttccccgattttgtttgataattgtggtagcgatacctttgatcgcttcatcgatgttctccggacgatcgtgcaatctccaactgatggatcgtcaggattgaaagagcaagctatggtctctttcacgtctgtgcttgtatcgattgattctttctctgtaggtcacgttgaagcagttgttgatttgcttcttgcgctcgttaatcgtcctaaccacggatttgatcgacaagctcgtgctatcgcctgtgagtgtttacgtcagcttgagaaagcttttcctggtttgttatctgatgtcgctggtcatctttggtcgttgtgtcaagcggagagaactcacgccgtgcaagcttatcttctcttgttcaccacaattgtctacaatgtggttaatcagaagcttaaggtttcacttcttagtacctctgtacctttggtgccttttaatgctcctaattggatgcgtgatgagagttcgattatgagtcaaggtcaagggttggggccagatcagaaggaactgagacgaacattggcttttatgttggaatctccgtatttgtttacttcttgtgctatgatggaatttatgggtatggttgtgccacttgcatcggcgttggagttacaggcttctatgttgaaagttcagttcttggggatgatttattcgtttgatccaatgctttgtcatgttgtcttgcttatgtattctcggttccctgatgcgtttgagggacaagagaaagagatcatgagacgtcttatgctcttttcaaaggagactcagatctatcttgttttccgtttgcttgcgctgcactggttaatgggtttgttgaataagcatatgttgagtggggagcttgagaagaggacatctgttcttgagatgggtcagaagtttcatcctgtcgtttttgatccactcgctttgaaagcgttgaagcttgatctgctggtacaatgctctgtgagttccaacgctttgagtggaggtgataacagtaaatctgctggggatttgttgcaggactgcttggtatcggtttcggatttcaaatggttgcctccatggagctcagaaactgaactagcattccgcactttacacaagtttctgatatgtgcatctacacattccgactctgacccttccaccactagaatccttatggagtctagcctcttccaaaacgtgcaggtctgtagctctctttacttgcttcttggtcttgcttgatgatggtttacttttgctagttttcagaaggaacggaactgtgtggccctttttagttctaattagcttttagttcaggaaccaatcttttgctgattctgctctcagatatactcttcatttgttttgattgtcttctatatttaattcaggggttgctggtagacatgactttggagtttcaaatcttggtccctgttattgtggcttttattgagcggttgattcactgtcacaagcatcagtggttaggagagcggtttcttcagatagtcgatgagaatctgcttcccaaacttaagaaaaaaaacttattaacagcttacttcccgcttttccatcgaatagccgagaatgatacaatacctccttctcgattgatagagctgcttacgaagtttgtaatttcacttgttgagaagcgcggacttgatgtggggttgaaattgtgggatcaaggaactgaagttcttggcatctgtcgaacattgatgagtcaccataagagctctagattatttctcggactctctcgccttctttccctcacatgtctctatttccctgatctggaggtccgagacaatgctaggtatgaccatgacacccacgtaaacgaatctttctaatatttatgaattgtgatgacgttaactctacctcataaattggtacattgtaggatatatctgaggatgctggtctgtataccaggacagagaattaagaacattttgaagccggcagatgctgtcactccatcaacccattcttctacattttttagtgttcaaagtcctcgttttcgtcatgatcctagtaaatctcggaacctttcatcctatattcatcttgaacgggttacgcccctactcgtgaaacagtcatggtcattgtctctaccatctctaagtgttggaactgatggatatagcattatagaaaacaaaatccaggtagatgaagttgagccggatggcagtcaagaacttcagattttgccagaagctcgaagaattgaatcaggaaaacctacgttaagggtaatggactcaaagattgcagagattctagaaagattaagaagatatttctctgtgattcctgatttcaaacacatgccaggaattaaggttagaataacgtgtactttgagattggatgctgaaccatatagcagtatatggggaagtgaaactcagaaaatcgatttagagaaagtcgactcacctcctgcgattttcgcgacggtgctcaaattctcatcttcagccccttatggctctattccctcatgtcgcatacctttccttctcggtgagcctcattggaacagcaatgtacccaatgaagaagtttctttagacattgtcgtggtagaaaacacactgaaagaggaggaaaaagatggcttgagaggagcacctgtaacagtggaactggaacctagagaacctacaccaggtttggtcgaggtttcaatggaagcaaatgcagagaatggtcagatgattcagggaaaactcgagagtgtccctgtggggattgaagacatgttcctaaaagctcttgctccaccggacgaacctgaagatacaataccgagctactactcagatctattcaatgctttgtgggaagtgtgtggttcttcgtccagcactgcacacgaaacatttgcactaaaaggtggcaaaatggctgcagcagtcagcgggactcggtcagtaaaactgcttgaagtccctgcggaaactgtaatacaggccactgagcttcgtttagcgccctttgtggtggctatcagtggagaacagcttgtaaacattgtaagagacggaggaattattgagaacattgtgtggaaggaagaggaagaagaacaaggggatcacacaaatgcggaccagccttcttcatcctcggtgggattaaaccgaggccctcttcgtctgacatacattggatatggagatgaccaagaggttccgatgacgagaagtagggggaaaatgggaacgataaagatgctgatgtttctgccgccaagatatcatctaatgtttgaaatggaagttgggcaaggatcgacattggtgcatataagaacagattattggccttgcttagcttatgttgatgattacttagaagctttgtttttgtaataatagcagagactttcactattttcttcttattctttgggcccaacctacatgtaaagttttacccaaacgaacaaacacaaattctgttttttgagaagtttatttttattgggataaagtaggaactagtgcaagtgagatggttctaaagttaatctgtatctttggaaggccataaatgacaaagttctaaaactgttgtttaactaaatagaagaagaaaagaaaaaaaactattatcataaaaaaaaagctagtaggttaatgtttagtcttcatgtactcgtttagtggtaaaccttgttggttcggtccctcacacttctctaccctttcctttgctcttcctcttcctcttattctctctccttttgggtactgcaatttggttgatttgcactaaacttggaacatacgagctaaaacacacaattgggctacgcaatggtttacattctccaagatccacttctttcaagtatctatcttctccaataatgtaagctgttttgtagcattttgatttgtttgaactaaaaaccaccgcgagtttcttctcttcgtcaatgaagaaactgtcaagctgaaaatcaagaagagcaccgagtactgtctcaatatcaacttttaagaagggtttccaaaacaccacattgggctcaatcttagtagtaacccaaatctctatcacattttgatcatagcgtttaagtaacaccgcgagtttctcttctttaacacaagatagacctccggtatctccgaaatcaatatcaaactgaaacggtagatgaagaaacttgccaaatctctctgccgtaaaatcaaaacagattaagatttcaggggtttcaacttcatcttcatcttcatcggaatcttccactagtattctttctttagtcaaaaagtaagtatttccatttaccaatgcgcatatatcatagtctatatgccagttgggatcagtgacattaaaagcactccatgaattagactttacatcgtaaatttcgtagtagcactggtagtcatcacagaaaactttcaatatcttgtgattcttgttgttgtcacatccaagagcatacgtattgtatcctgtttttgtggttttggtgttgatccatctggtttgtcctaaatacgggttccaaataatgagccttgatgacttctcccttgttacacataacaataagccggcgcagtaaaagacttgagatgtttcgacttgatacattgatatactaacaaagtcttcgttgaggattccgtgaagattgaacctcattgagcaaagcctataatccaacatcatgaaccctagaaactgctgttttggttctcctatacatagaatccgttctttggataaagcgttccatcctttgcaggtggatctcactgctcctagagaagttatcggaaccctagacagtatctcctctaccaaatcctgcgtaagatcactcatcatcgtcattgttttcaaataagaaaattagggtttctagctttcacgcctgccactcttatatatgcgtagcgtaactcatctttgccaaaactttttttctttttttttcttttataaccttcaaagagataaatatgtaagccttgcaaaatgttaaatcgacaaaaaaaaagaaaatggaaatcgtttccaataggcacatataatttatatttttctttattgtcttctttaatagaagaatgaagtgaaggaactgacttttcatacaaaatttgacacaaaacagataatgtatgaaacggaaacgtgtgatatgcaaaatacttgaataaaatggataaatactaaacctagaagaagaacaaggcgatcaagcaaatgcatgatcaatcaatctacttcaccctcggcagggaaaacaagattaaaccgaggcgctctttgtgatcaactgatcatgacatacatacaggcccgactcaatattttattgggccctgtgctacaaacaaaaatggcccttaaatctaaacaaaataatcttatgtgacatgtgtttactgtatttttattttaaacttattatcttttattttggtggctgttttctttgtagtttttccctaaacaaaaaaaaatctgcaaactagaagacttaaaattaagaaaaaaaaatgaggaccatgtgcactagcacctctggcactcccctagagccgggtatgatgttgatgtttctgccgccaaaatgtcatctgctgtttgaaatggaagatgttgaagtatcgacattggtgcagcatatataagtaacagatcatggccttgcttagcttatgttatgttgatgtcttgatgattacttagaagctttgcttttgcaataggagtaactgtttactgccatttcttattcttttgtcccgcacctacttacaaaaactaacaactacaaaaagtctcaggatgttgttttgtatcatatatatgttattttttcaataaatgaaatcagagatacaccatttgtttcaaaatctgttaatttttccggtgaaatatgagataaagagcaaagaagtattctagtaaagtttctgacagataaaaatgtctttttaaactaaaagagataagctatcatcgtattagcgattaattaatagtaagtgtacttcttgtttctttttcattggtgttagaccttgttgtttgttggttcccttcctcttcttctcttttcttttgctcatccacttcctgttcctctctcttttatcgcgtcttgcaattgggtcatcaatttgcactaaacttggaacataacagctaaataccataagttcggtataactatctgctttattatttccaagattcactgtttattaagtatccatcacctccaatgatgtaagcattagctgttttgcagcgtttagattcggctaaatcaaaaaccacggcgagtttcttctcttcgtcaatgaagaaacagctatcttcatgtaactcaaaatcaagaccaaaactagtttcaactgtagtagccttgtttgactgtcatttataatgactcttcttgacttctctaatccaaaacatgacacagaaatgcatatcgatctacttcatcctcggcgggggctctcttcgaatacattagatatggagatgatcaagaggttctgatatgacgaaaatcagagggaaaatgagaaaaataaagagtattgcaaaaatggaagttggtgaaggatccacattggtgcatacagatcatttgctagcttagcttatatgagctttatttatgcagtataagagacttttactggtttttcatataatttttgctcacctacattaagttacctaaacgaacaaacacaaattgttttgtttggagaaatatattcttatttgtatgaagaagaaattaatgcaagtggacaagaactttattcgtgcctcaatgaaatgagtctaaagatattttgcatctactacatcattttgtatcatagttaattaattgatgtattctaggttagatcttcaactatgtatttgttttttttcttaataaatgaatttagacaaaacaagttagtattaaaatatgttaactatgccggtaattgaagataaaaagagcaaagaactaagtttaagatcaaactgtcttgtctgttcaaccaaacagaaacgaaataatttgactagtcttgtccaaaggacattgcaaaaacaaagaacaaaaacgaatgaagaaaaggaagaaggtatttctgttaataaagttttattaccttttgctcttcctcttcctcttcttacgttgcctttttgtgtccaccattttgattgatttgcacttatcttcctcttcctcttcaatttggttgatcttctctaaacttggaacataagagctagaacacacaagtgcgctccgatacacgtcttttcggacctccacagcttctccaagaacctcttttttcaagtatcccttctctccaataatgtaagctgtgtggtaacaacgtgtcttgttattccttttaccacgttttttatctagattaaaaaccaccgcgagtttcttctcttcgtcaatgaaaaaactgccagcttcatctttacattgttgaaagccaaacctaacgagtggtttcatatcaactttaaacaagttgctccacaacacctcattggactcaatcttagtggttacccatatggccatctcgcctgtatcccagcgctgatatagagccgctagtttttcatttccaacacaagaaagtgttccaacgtatttcctatgatacttaaacggcatagcaataaaattttcaaacttctccgttgtgaagttaaaacaaagcaagaaaacacgatacttatcttttgctctttgctcttgagtcaagaagtacgtatttccatttaaggatacgccgcggttataagaatctatatcccagcctggaaggtgatcttcttccccccatgattctgtcttgaaattgtaaacttcgtagtagtaataacactcatcgtacaacctcaagatcttgtggttcttgtccttgtcgtaaccgagagcaaacatgtctgattcgtcgtgaggttctcttgcttcgatccacttggtttgacccaaatacggattccaaaccacaacactagagttgtcacttggaacgcacaacactaaaccatcgcattgaaacactttagagatgtcgatttgattaactatatcacctacctccctgatagatggacgatcaaagccttcaccgtctccttttagaattccattgagatggaatatcattgataaaaacctatgatccatcaccatgaaccctagaaactgatccttcgcttccgctttatacaacagccgacctttggataaggcgttccattgtttgtgagtggatctcacggctccaagagaagttatcggagccttagagagtatctcctctaccaaatccttcgaaagatcagagatcatagtcattgttgtcaaatggagaattagggttttggtttttttattggtgagaggatttgttttttttttttaacttccacgcttgcccactctttatattagcgtctactagataagtgtgcgtctaataactttcacaacgataccctaaatatgtccactactcacactcttagggaagctcatatcattaaattattcaaatcccttaaattacttctgtaatcacattaacttccacgcttgcccaatactcccactctatatatgcgtctactaaataagtgtgtgtttttccctaacaacttgcataacgcgcgataccctaaatatgtcaaggatactcatatcatctatcgttattcaaatcccttaatttaatcctatatactcaatcacatttacttctgtaaccacacctatgtcttctcttttgtataaacttaagtactctaatttatttgatatacaaatttatatctttacaaaatatgcgatttctgtctgatcctctcgcaaaatggcattgcagaagaaaattaaattaaaaactaataaaatggaaattcaagtaaaaacaaggtattttcatacaattagttgtttggcacatctaaggctcctatgattatgattggtgaaagtcttggtgcatgaactgaaattcatatttttcatggtctaatctttgtttataggttcctttaaaagacatattaagcatgtcctaaaatcaagactgttttaacgtttgtttgttaatggcttcgcaaaatctaggacgagaaaccctgagtttgtgttgttcattaacctccaaggaaaatgaactgaaactaaattaattaacttccgttgatccataaatatgagcatgttgtagtcgtatccaagatcacacttgtctggtctgtcagtttctactttctaggtttgattcacatggctattcccatatgcaggttccaaaccacaagccacgtgttgtccgttgtgacacataacaataagccatcttaacgaaagactttagatatatcaacttgattgaatacacatttacatataaaaaaagtggaatctttttgttactaaattagtaaaatgcaaaattccgtatcgtattggaaagcaatttgctctgtaggaagcacatcaacaagagtaacacagttgttttttcttttctaacattttgttctgtacaaaacctctaatacttaggaggctaatatagtttacaataatagtcttccactactttctttttctaaccaaacgatttaaatttatgcagaatctcaaaaccccaaaccacattatcttttcttttctctctagctctagagatacagaataagaagaaaagaaaagggttaaatatgattacattctacaagctattgctctcaaccggttgagcctgtaggcctcctcctctgtcatcgttcaccatcttttttagggatcggtattgcagccgtacattgtctccgctttcgacaatctttaatagataccttttattgaaaaatatatgagaatggattagtttgagaattgaactcaacaactcgcttcacctatcacgtatagttttgttttcagctcttatatatcatagagtaatacttaccagccattgagacactgagatgtcacgattgcttcttttccaacaaacttttctggagttcgccggtttccctgcaattggaaatgtgttccataacaagctagaaccaaattttatctgctggaaaaaatgcatcagaaccaaaatgaaatgtaatggcctaccttgataagaactttctcatttacagcaaatggataatgcaccactcgatgcataccatcatccgtagctggatctccattttcctgtagagaatttgggatcaagttgtaacttgtatcagatcttcatcaacaacataagcttaagctaaccagaaaacagatgatgatgcaggctgataagtttggagatggtaactatgtaatcggaaaccacccacaaaagcaatatgtagagcagagtcagatcatctcaccacatccatttgatcactcatttcttttctacgccttctcatggctgcgttgtggaaaagtcgtttatcatcctgttgcttgatagctgaagcggcagctctaagtgctatgtgttcgacattagcaaagaaatatgattactcggttaggactgtttgtcaatgtgaaacccgaaaagactatcgtggatcaaattatttattgaggagcacagataagaagataatgaactttatcggaattaccatggttaggaaccagagacccagactcgatctctgtattgcagagcgtacatctagactgtgcataagatcattgtggttactaaatattcttgggtatataggaagaaccatcacatgagactagcatattaatagaatcgaagtaaactagtaccaaccatttcaaggactcttctaagcataaggccaccaaatgaatgtccacaagagacaaccattgcatcttcaagaaaagcaccactaacatcaaaagtttgcaacagacaaattagaacgtttttttcactgcactgccttcgcaaaattacagcaacagaataaaaaggtggaaaacaattgaacatattatacagctcatggagctagtaacaaaatatgactaaataatgtcttcagtgtatgtctactatctggcacggatgattagctttggaccacttgctaaatcagaatagaaaactacttgaggagaagtttagaaaaagggcttgccagcactcaagaaaacctagctagggtactttttacgtgatcagatttagcaattcatccaactaaccatactaagagaggagatttattcgtcatagataatattatacactaaggaaaaaaatggtactcacgaaattggatccgagagaacacttcttaaggaaggctctttgcaaacatcatcccgtggaacctgacatcaacaattcataagacctcgtgctctgagcagttaacatcaaacagagaaacttatatcattatagtattgaggtagtgccaatcataaaacagatccaaaatagtgagatcctcaaaaagagtaatataagtagcacgtccacttattaaaatctcgattgagagtatctaaaagaaaaaaatgcatgatctgaaagaataggaaagacatatgacttttaaaactcgttcctcaatacaatttctgctgcaaatgtcaagtaaaaaggcagatttgggtactacagatatcaatgttttatacgtttaaatgtaattctacaatctagacagctagttttactactgtaataaagggtgagcttacattggttttcacaggcggattaactagagtgtcattctcggctaagaggttatccataaactgactaacagatactggcacatagctttgaggaattacatggccggctgcttctattggggaacaatctaatatagcattacttttcggcataagcctaaaagctaatgatgccctgcaagtggaaagagttaaagttttaatcaaatatgtatgcatacattcatgtcataaggtttgttaaggaaaagctgtcattaagttgttgaggaaaagcttatttcgtcttaaaaacataccttcctcgagtgtcagtggcagacaaatgatcggtagtagttctgtaagaggcagctggacggagacctgcagtagcatgactaagcgctttgccggtaatcagtaagagatcacccaccccacatccattatctgctgtgtaccaacgaccatttgggtcacatacctaaggaaagaagaactttcagaaggaacaaaaaaataaaagccaaatgtactaaatggaatagtgtaatgaatcaagcaaaatggaaactcaggattatggctgatcatgtctaactcatagatagtattcttacacaactatttcgtccctcgaaaggataaaatatgacacgttttcccatcaagtttcttagctaaaataaaagcatatatgtaaccttctacacacaaaaagttcaatagaggttacctgaatgccagtgccatctgagcagaacagtgtcaacaaacccttctcaacttcaatcttagcagataggttcccacctccagaagcatgttttccattttgtatcgatgcatgagcataggaagccagtagcaccgaggaggaaacctcgttcggagctagtggaaagtcatcaagcatatggttaaaaacactgcaaaaaaaggagatacgctcattgtataagttaataaaagtaaagagacacaacaagtattagtaaaaacagagaataagcatcataaccatcctactcgcttcttaaacgtagatgccttgctattgcagataaagcagctcgtgctactttacccaaacacctgaaaatctcagccatgcatggaggtgaagaatctaaatcttcaacagacctgttcacaagacaaaaatcactcactacacatcgtatagatcaagaactgctatagtaactaaaatcaaaccaatttctcaaattcaaaaacgcaaaaccaattctttctacaaaaaccaaaaccagagaacaaaaatgtcgcaaaagagctaaccttccggctctatacatagagaggccacgattgcctttaccagaaacagtaaggcttctagttctaaaatacaaacgagcagcttcaaggccacatcgcatcagtgcagtgtcttcactccctatctcgatcacagacgcattatacctcatcaaagacacagacaaagcctccacagcttttgcatacaccggagaaggagctccttcataaggcaaaatttcagataatcgaaccctagcgagaggagtcccagacatcatcaaaataggatcaccggaagggtaagcagcagaaatcggcgaaactggaatcgcgtgagataaaggagacttggttaaaccagtaggtacatcagaagcaattgaaacggcggcgttatagtttgaaggcgtaatcggagacgagccctgccggtgcatcgccactccaatcaaccatatgtctctagagttttccgattctgattcagttgccggcgtcggaaaaatggattggaatagtaacgtgtctcgttgaagtcgttgagatcgttgttacagagaggaattgtgattttactactgtacggaaacctgactggtttgaattgggtagacgatgagtagttaggttacaaattgtaaccacgaaacgccgtataagggtatatcgccgtcaatatagtggagaattgtgccggaaacgttggattcgccggagaattgtaattgtgaaaatttctaatgtagtagactctggttttgagtttgtgttaaaggctttgtaattttacctttttggtcaaactacctacatattcgaattggaaatgattcactaattaatttgatgtattctggtaataaattattacttggtggcaaaataataataattttacttttagttaatttacatttttttaaaaatttactacagaacgcaattaaataaaacatgcgatgtagccaggaaaattgtcactacacataattgtatgtattgtaagaaattaaatttaattaattggtcaaaacttaattgaaagattaaatttgaaaaattgtgatgtaagttgcgattataaaacgttatcttaatacaaatctttttagtttagtagcattaatgtgtgggcaataatataatcaatacttaatgtagtatatattgactaaaaaaggggatataggggtgatgatgaatgaggaattgaggatgtatgggggatggtaaagatgatgaggatgttttacttgttagtggttgtggtgatgagaagagagggatgcttttgaattttcatgatgaagttaagaagcatacgttgatgatgtgagtcatgatgtgtatcgtgatgtgacaacatcatcaataatagtaattatgataatgatgatatgatctttttcttattttatgagaaaagaaaaataacctcaaattaatgatgatgtaggacgtggaggtggatgagtgtgatgataatgatgatgaagatgagcattatcattatgtgttgtataaaaaagtatcacgatgctccaacatgatgttggtttaagtttccaactaaaaaatatgtattttaaggtgctcttataatattggagcaggacttgctcaactagaaaccggaaactataacttatttgattatcatatgtctaataaaaatcatataacttgaaacaaaactaagtaaacaaacccatgaaattaatcaaggaatggtcccaaagctacttttgttttgggggcaaagccaactcaaaggtccccaaactgacatgaatgccaaaactaatacttttacagatcacaaagagaggaagattcacaaagatgattgaatttcaacacatggagatattttacacagagagttcaagtaaagatttgtgtctacttaatacacacatgtacatatatactacctgatttggacatcaaatatagcaaaaacctcggtttctgcaggcaaccatcactgaagagccttcaaaatgaattgatgacgataaacgtagagacaaaaccttttgatttcttggtttagcagctgcaaaccggtcgatttttacttgtaaatccattcatttgctcttccccctgtcgaatccatgtctatgaaaatgctgacagcctgcatgaagaggagaaaccatccatgtcgatttttaaactagaaaaaacgatgttaaagtatcaaagtggtctctaatcgacctaggtgatctagctaatatatgtctgaattttaaggttactgttttaggttgatctcaccttccctatccgaggtcgctccttcgactttgctaggctgctacggatatgtgagactgctccccagcatttcaacatgttggctacatcgtcaagtctaagtatatattcttcttcggttagaggaaaagacctctaggcgttgaagaagaagcaagaaatatataaaggtgaattagcttacaaggattgacttgcaaaagcaagaactataccaacaaaatatggatatacacttcatctttctatgtggcaaagattctcataccaaatctgaatgatatggaaaacgaagatcataattatctaaagtccaaacaagtacactaaaatcaattgaactatcatatcattaggcttctgtgatcaagtatacagcaaaggattctcttacctgttctctgtacttccacatgacattcattgcaagaagattcttccccatgaactcctacattaatcacatctaagaactatgatttatatttttagcttctaaagcgacaaatctttccacattgataaaataaagctcacaccaaaaatctcaaaatgaaaaggaaaatgatcaactgaatttcgtaaaagctgattctgtattcatgcaatgaaatgaagatgattggaggtcttaacttctttctacgatacagaatcacaaacacacttgaatacagaagggcataccttcttgatgagttgaacatcataagattttccatacttctgtctgatgagggttgcaagatctaagccgttaaatgcagaatcatctgacccaaccattctttcaagattagcccgattcatatcattcgcttgctaaagaaaaagaaaaaaaaagtaattctaaatgattagatgatatcaagcaaccaataaatttaaacaaaacgcttgtttacttgctgtgtcactaagccatgacagagatggacaaacatttagacatcaaaaggactcaagaaatcaaattagttacgcactttttccaggatcaagcaggagtagatcaacattctaagtaatctcacgaactagagagtttgaggctttcatgtacaacaaggattaaaaccacattgactgtttaatataattctagtgtataaagcacagggaaaccaagtctcagttcttaaaggtcaagtcatgacttcaccttagaggacagcaaaaaatggccggagtttacaaagcttatagatttctcatacatacccttttagttttatcatcgagtgattccttttcctcgtcatccgaattatctagattcccctcatcatccacaatactgcaaattcttgaaaactttctcctatcagttttcccataagtagtcttcaagcagaggctatgagagaaagccagtcgtccagagaaacacggaccgcaatatctcgaacaagaaaccttagatattgttcctataccgctacgttcgtgtataacagattgttgacagtgatgatgacttgatacaatgctcatcatatcctgtaaaccagtgaaattccaaaccatgaagcaatttgcagaatctaatagaggatgaatctaatcctcaaaccaacagtgaacacagtgatacagaatctaagtagagaaccaaagcaaaagttcctgataaagtgatttcacagacaattgcgtagtaattgttaagaatatgaatctcgtagcatcataatcaatctcactccttttatattctaagagattcatccagaaatcgctgttctgctaactaagcagcaattatctgaggattcatcgagaagcgactaaacatgaacaagtgagggagataaccagtgaagcagagactcaatttaagaatttagcaagaagtagagggagagcgtaatcttaccgccggaagaggtggggaagtgcacggcgacgatgcggaggaggagattaatagatgggggacaaagagatatcacacatatcagtgaatgaacggtgaaggaggaaacaaaaataaaactcttaaaactttgcgtatagttttcattttcgctatatcaatgatatcataagatttgctaaaaattatagtagaacaaaaaaaaaagatagcatgcacaaaaacgtcttaaattaaaatacatgacttataaaaagacaaaaaaaaacacatatttatccaaattagtttagataaatatgatatttaattttaaaattgctatgatataaaaaaaatatataaatttggattaaatagtcaacaattatgatgaattaattttcgagataaaagtaaataattaaatattggataggttatcagaataaacaaaagtaagccaaagtttttttccattaaagtcaaggttttgtaacttgcacgcttcagcgaagaaacggtggcgtctcggcccttccacacattgacacataatatctacttggtcttttgctcgtctcattatctgaatttttttcttgcagcatcgacacatgagatttcaagctaaaccatcttacatatctttttgtttttgttttaattaaataaaataccaaattgattcgacattccaatatgtaaaccaacatacctgaatacccaaaactcttttgactcaaaatcgaagttttctttcatttttctcaacaagcagaacttatttaaatctcatacgtttataagatataaactgccttgattaataatatagatctactatatcttgttagcttgtgaaagaaatatttggatgcacaaagattaaggtcttgaatggttgttgaagccattccaaatctgaccaaagttagaccaatctttttttcttctaccatttaaactgatctacacaggacgaatacaatgtagatgagtacacaaatcacaaagaacaactattacataccaaaatatcactatctatattttaatttcttttactttaaaattaaaacgtactccaatatagagtttagcataccataatatcggtatggttggtgtagtatataccacataaccattcaaagtctatataaattttcggttatgtaggggttttaaataggccgatagtgaaaagcatcgatcaaaaatgaatatactcctaatcatgatttttggattaacacatactacctagtgatgacttttggattaacacatactacctattgacattataaacggaaaggtggaggtgtaaatgataataaatatatattagtcggtgagtttagaaagaaacaaaaattaaaggggtgtgatttcgaagaaaatgttgcatagttttcaaaatttgaaaatctcagctaaagagagaaagagaagcaccatttttctttctcgtcgtgtcatcgttttctcagattcctgaataatcattcccttccgattccaaaatccccaaacctcatccactcctccatctcccggattcggattcccagaatcatgcccatggagaacgacaatggcccacacgttggcaacgtcgtcgtcaccgctgagcaagcgaccaagattaacgagactgatggacggttgccggagaatcggcagaccggtgttgtctctgacaccggaagtggtagcgagagaggagagcaaggggttggagagtcggcagttgctgtggcggtgccggtggaggagagcggatcgatttcggtgggagagctacctgctccccgatcttcctctgctagagttccgtttactaatctaagccaaattgatgcggatcttgctcttgctcgcacactccaagaacaggtgcgtctttctttctcatctctctatttcggatttctccgtttttaggttattccatgcttgttagggctttgttagtgctacttctccggcataggcgaaaatcttagggctttctttctaattgcatttgcaatgttattatgtaggattgtctattgaaaaattgttgttttgtatgtgtgcgtgtatgtttcgggtttcaggagcgggcgtatatgatgttgaccatgaatagtgaaatcagtgactatgggagctgggaaactggaagctatgtatacgatgaggatgagtttgatgaccccgagaatgaggatgaggatgatgatgaagatgaatatgaaacagatgatgatcctcaggaagatgggcttgatgtcaatgtgcacgccaatgaagatgatcaagaagatgacggtaactctgacattgaagaagttgcttatacagatgatgaggcctatgctagagctcttcaagaagctgaagaaagggatatggctgctagattgtctgccttatctgggttagcaaaccgtgagtacacacttatagctatcattcaagttctctttgaggggcgttctaaaataaattttggattatgctaactgttattggttgcaggggtggttgaagatctagaggatgagagtcatacttctcaggtaggctccttacactacagaaaaatcctttaattatcttgagctgtaaacctttttcagtttttctgcttgagaatatgaaagtttgaaccttttttcccccagtttgggagtttgtttagtcatatagtggccaaaggacaaagtcgtgacattgaacccgccattgtctagttatacatcttacatggctccatctacctactatccttctgttgtggcattagtttgtttcgttttcgtgatagtttagtccatggtgttaaccattttagaccggagacccagttagattatcctccctgtgtatggggtagttattgtttgtagttaagccagtcactggaatagtgtgccatggcccatgaataattattatgtagtcttactcagtcgaaattgtttggtatttggtactaggcgtacctaattattctcggtttatgctactggaatttttcacaactgtatgtctgtatgtttgaaggtcaaaatgcatttaccagagggtaattgaatcaatttagcattaactggtcactggtattggagatggttatgctcacaccttgaagtatgggccctcgctgtacacactgaactttgtggaaaaaaatatactgaaatttagaattgcagggtagagaatcatagaaacttaagcttcattgatgtgatttgaatcttcttccacttacgttctgtacgattaatttttgcaggatgcctgggatgagatggatcctgatgagctttcatatgaggtataaaaacatttgtggtattctatgctttttggattctcggtctctctcatgattttgtgaatgatttgtagtttaatgcgaattagattgttaaacttgttagaatctagtgttaagatccgtcatgcatttcaattttcaatatgcaaaattcagataacacatttactggcttataactagactctaacgtttgcaggagttgcttgcacttggcgacattgtgggaaccgaaagtagaggattgtctgctgatacaattgcatctttgccttcaaaaagatataaagaaggagacaatcagaacggaaccaatgagtcgtaaggccttttttgttatcaattaagtaaaccattgacaattttgtgcatgtacctagataattaagtttttctatgcttgatgcagatgtgttatatgtcgtttagactatgaggatgacgaagacctgatactgctcccatgcaaacattcttaccactcggagtgcataaacaactggttgaagataaacaaggtatgtcttttatgaaaaataaacctgtagagaagctaaagtatatagttattgtagtcagctatgtggaacctgataaacccaagcagggagtctgtttgtagtctgtttttatcacttgacagataccgtttttgttaaggatagatgtattcacgttagaaaaaccgccacagctcctgatatttccataaaaattatctgtttatgagagggaactttatggtcagtacagactatctcatggttgttgagtttatggattgcatttatgcgtttcccgattgtgttcatcagcatcttcaaaaactgaggggttttgttgctaataagcagaaatttgaacttgttaattcattaggaagagtatctagagtatggtgaatcatctcatcagcttccatcacaattaggaagaagaacttttgtcaacattcatgtatgaacgagcttttggaattccattaacaagccaaaactgacacaatcttttgcaggtttgccccgtatgcagtgcagaagtttcaacttcgacctctggacaaagctgatgaggcaaaggaagaaagattcagaaagaatcataagctaagaacttcaaaaccttagctgcctgtttgtacacttcttataaacaaaataacatcatcagatttccttggatcctttaaaaaatctcaaagattggaacattctcaagcgtttttagtttttgcattcatctgcttccgtatttgccgttgtgggatatagtttatcacatagtaagtatctatttcattgatgttcacgtatgctactgtgaaatagctaggataatctggttttcgatctaagaaagaacatataagctagaactttgaaattccgagactcagagaaacatcacaagggtggggggttgcatggtagccttgtaggtctgaaactttagaatagatcgaaacttgttttattacctaagataaatatgtggacacagaaggtaatatcaaaactcgtagcaaagaaaagtacaacaaattttcatgttttctctttggaacatgactatggtattggtcgtctacatgaaaagttggcgagtggagtggcaccaacggtcatatgctggctgaagattgggccactcggaggccgagactgagaaatcttggagccagttagtgagtaagatttcttggtccaatgcaggtaaagtcgagatggctttgtctatggctcgttccacctcaactctctcataacccgtcagtacgggaaacgcaagcccgttccttgcgtgactaaacagtgggagccagtttgcaaggagcctgaatgtcacttgtcctggaacttgtgtgctgtctcttgctaactctccaattaagagcgctgcaaatcattaaagtttgtgagaaaaccacggatcatgtcgagatgctatgaattcgtgggcatagaaaccgaatataacagaagttcctaaacaaaaccaaactgaatacatatactttacccgaaatcttaaccatgaggccttgaaccctgggagcagccgtgagagacaaggaagctaaaccggaagcgtagctccaccgcttaatcccttctgccaccgcaccataacgcctaagcttctctgtcatccacagcagctcctccgcaagcttctcgaccgctagttcagcctcattttcttggataccacccgctctcaccaccgcagactctctcctcctagtctgcgataacaagttcccagtcatgtctgctaaggacctgacggtgttgatacatgcacttaaccctctcacgtaggaggcaacgtagccgcccagagggagggcgctgaccacacgcaaaggcaaaccaccgaagggctcgtcagcggttcgagagcgtttcaagcagtcctgcaatcgcgcagtagtgcgcgcaaaggaggaagctagggccgctctgttgacgtctagtaaatccacgtggccgctctgagcgttgtcttccatgatcttctcagccattcccatggcaaattgatattttcttgaggttactggaatctcgttcataagcgctaatgcctaatcgtgaaaacatgttaagatatattatctcatagaatccatatacgcaataaactatagcaaagtttatgtggtaactaactatggtaattaattatcttttgattaattaatcgagcctatggattaaacttccctctttggtttttcatgtatgacgtggcaccgtgcatgatatccacgtggaaattacagagataaaatgtccacgttaggaacttcgtggtgccagaaatagaaagatccaacataatattatataattttatatagaaaacatgctattttgattaagatcgagttatacaagtctaagtacgtcttagttgaaccgcgcaaagaagtgaaaatattgaaatacagtatcaatggaaatgttaatgttaatgaactaacttttgaataaaaagaaattatatattacaacttacgtgacaaagagctctaccgagagagttaacagaaggctcatcaacgccgtcgcaaatcatcatacccaaatctgacgaccctgaatacttcaccaacgcagttgatgacgtggacgacgacgaggaagccttagccgggaccaacgcgttctccgcagccgtggtaagaagacccgaagcgaaactaaagggaggataagaataagaataagcagaagaagaagaagagatgagaggaagaggaagatagtccaagaaaactctaaggatccaaagggtaagccacgtcatcatcatagacatgaacctgaggtggtccgaagccgaccatcgcctagaaggaatctctggtgtagaggcggtggaagcgacggagacgagagaacgagcggccgtgttgacggtggtcatgaagatggagttgaggagacccgtcgtgggacggttgtttctgtatgtgtactccaagtattgtagctccctcgacgacgacattgttctctctttttgttgtctctcttaacgaaattaattaatgttcgatcggtctatgtatgtatatatatatgaagatagaggttggtttggatatttcttctttccaaagtttatgatgaggtgcaccgcctttgatccacgggtgtgtgttctcgtcgtcgtgtaagcattttatgtcttgtcggttaaatctttgtcgggactcatacgccgtcgttccctttctttaatttttcacataggtgaaagtctgaaagagtacaaatgtaattggtgaaaatatgctaaccagttaacctatcggaatttggtagaaattttcttccatttcacttttcacatagtgtgacataggtaaaagagggaaaatagcatttggtcgaagtatgtcaaccagttgagctatatatcagaattttgtaatattcaatcgcttatcaaaaatatactgagatttaatttacctaaggcaaatatgttgcaatgtatatatatatgaatcttttgattcaaagtggaatgttatttaatttgaagacctttgtatcgctggtttcggttaatttgttggtcagcagttcagtctttcagtttccgctaaagattacaaattttagaggcaaattatttgcgatatcgagatgtgactggttaggagaaacttcggaaggtcacacgctatctaaaccactataccaggttggaagtctccaactaaagatgtttgacaactttttgtcatcgaaaaatgatcagaaagcggtgtttttaactattctccgataaatattggtaagaatttgatctattatggtgagtacattatccaggtttatatagatatggtaaattatgttttgagttgggtctagttagtggcaaagcatagagcaaccgattgcatatagtttccggtgaatatgatataactaacacatgatggttataatgaataattatgtcgaataccatgcggcggatcatatgttttaggctgtatatgccatacgtgatcttggatgacatgtctttttttcgagatgataacatttattagtcggtcgcttaattgatttcgagttttctgttgccattttaaatacacatttgcgtcaaaaaaaaaaacgagtttgctgtctcgaaaatagcaccaatgcccattatttcttaattgtattttttcggctaaggtttctaattattaatttattatcaaaaccttacatatggtaatggtacactgtacgagtttttggttgtcttgtgtttttcaatttgttcttcctctttatgttttgagttttgttgtcctgtttcattttattcttacttttgttttctctgaattttgttttcagtgaacgtataatttaaaaatctgcaatacaaacaaacaaatatctaaaagtcaagttggctttacgcatgtgatcgacgaaacacctaattgtcttgttctttttcattcgtctgaataatttcatgaaattaacaagacaaaggttcacatttataaaaagggaacgagagcaatcaaactacagaagatcactacatcaaaataacgcatttctcagattctcagattcaaacacattcacctaattgttttgttctagctaggccttttagctatacaaattttgcattaacattacaatttccatcggcatgtaaacaattagcactaactaattaattagtactgcaatatatcaaacataaaagatggttaattaattcagtgtcaagttgctgatcctaatgagaatgcagtgctgagacaagatctgatgagtctaacaaaaatgtgactaattcaaatcacattaattactgtatgtagcaaacataagattatatatataatatatcacaccaatttatatagggaataaaacatatccttgtatgcaatgcataacgtagttattaatatagccttacatgaataacgtcgttaagataacgatatgacactataatgacgaaaccttatgggaacatcatgaaaataatgtaacgcgagttttgactttccaatgtaaacgaaaggagtagaaagcaacggaagactacgaatgaaagtatggagctacgtatagtttacgaaataattaattatacatatagaaaagtagtgagtcaacttttctttccatcgtaatcaatagcccaactgtttactatcattgtttgaaatatcctctgacacagaaatgttatcttatagtcaatttgacgtacaatatgctctcttaataaaatcaagaaatctagtttttatcaaaaactaaattttgtccccattccatggataatgttaaaacattacattcattatagatccatgcatgtgaatgaaaaggctcacgggtaaaaaggttattaaggtatcaatatgacctcaaattttggatagatattgaagatttcataccactttttttagtgtcaaaagacggaaaagtaataactaaactatactacttttaaaagtttgaaaattgaaaaacagattttacacctaatttaaaatatcagatcaaagatcttatctacaagactaaaattaaactagtagcggtctttgctgtccattgaccgagttttgcgggtggtttactcatttaagtaccacagcatcaaattaaaataactgtcacttgtcgaaagtgactagataaaaccaaaaatagctttaattgagtcaaaattgtagttctagtgcaaagtaaagagttatcatcttacaaaatgcgactcattagtgtattaattaattaattttcagtccaataatctggttaatttggtaaactatccaaagagtaattaaatgattcctcgtcataaatactaattttctacgttttaagcaaaaaagacaataattatttggtctgaaaactaaaaaaagacacgagattaagggaagaagataacgatctagaggaataggcaagtggaagaaccagaacaacagctgttcttttcttctaaacttcagaagtcagccgacagttaatttctcctttttttgaggttttgtcgaatcctataaatttcaactaaactcttcttcattttcaatatcaaatcttgtcttcttcttcttcttcttcttctttttcttcttcttacatttgatttctctgtctgaattcgagaaccagatctactaattacctgagagaaaaaagatctgctctgtttgtctgaaacagacagaagtcaacaaatctttcatttgttttttagcaaatcaaagaaatggccggagggttcgtcagtcaaacgccgggtgttcggaactacaattacaaactgacaccgaaagtgtttgtgacatgtttcatcggtgcttttggtggtctcatcttcggatacgatctcgggatctcaggtttttttcttttcttcaagtcttgttcttctttgatctgatctaggaatttccggtgactaattagggtttctatattcttgtaggaggggtaacctcaatggagccattcttggaagagttcttcccttacgtctacaagaagatgaagagcgcacatgagaacgagtactgtcgatttgatagtcagcttctcactctcttcacttcgtctctctatgtggcggctttggtgtcttctctctttgcctccaccattactagagttttcggaaggaaatggtcgatgtttctcggtggtttcaccttcttcatcggttctgctttcaacggctttgcccaaaacatcgctatgcttctcattggtcgtatcctacttggtttcggagtcggattcgccaatcaagtaagctctaaaaactgtctttttccttgatgaagaagtaacactggtggcttagttaactggttttgttttgtgtttcagtctgtaccggtttatttatcagaaatggctcctccgaatctaagaggagctttcaacaacgggtttcaagtagcgattatctttggtattgtggttgcaacgatcatcaattacttcaccgcacagatgaaaggaaacatcggatggagaatctctctcggattagcttgtgtccctgcagtgatgatcatgatcggagctctgatccttcccgacactcccaactctctcatcgaacgtggctacaccgaagaggccaaggaaatgcttcagtccatccgaggaaccaatgaagtcgatgaagagtttcaagatctcattgatgcaagtgaggagtccaagcaagtgaaacacccatggaagaacatcatgcttcctcgttacagaccacaattgatcatgacttgcttcattcctttctttcaacaacttaccggaatcaatgtcattaccttctacgccccggttttgttccaaaccctcgggttcggtagcaaagcttccctcctatcagctatggtaacgggtatcatcgagctcttgtgtaccttcgtctctgtttttacagtggataggtttggaagaagaatcttgttcctccaaggaggtatccagatgcttgtctctcaggtaacacaaacgcctaaccctaaccctactatacgtttcttaattggcactcaatatctcaaaatatcggtgtgtattacagatcgctattggagccatgattggagtcaaatttggagtggctggaacaggaaacatagggaaaagtgatgccaatctaatcgtggcactgatctgcatctatgtagcgggtttcgcctggtcatggggaccgttgggatggttggttcctagtgagatatctccactagagatccgatcagcagctcaagccataaacgtttcggtcaacatgttcttcacattccttgtggctcagctcttcctcactatgctttgtcacatgaaattcggactattcttcttcttcgccttctttgttgtcataatgacaatattcatctacttgatgttgcctgagacaaagaatgtgccaatcgaagagatgaacagagtgtggaaggcacattggttctggggaaagtttattcctgatgaagctgtcaatatgggtgctgctgagatgcaacagaagtccgtatgatgatgatcaagaatgaagttttctttgggcaataaagatttatgagaaaagagaaagtgaataattcttgggatgaaataagaataattgtcaaaaatgccttacttcctaaaagaaagctgctctgtctttagcttcagagacttagctttcattgtttcttctttcttcttttttaatgtttctttgttgaaattgttatttggggcctaaagatgtaaaaacaaaaaaaagaacaaaattatttaaaaatggtttcttattttacatttcattgaatctttatttgagaaaaatagtgttaacgctttatgcaagaaacaagaatagtcatcactcatcaatcgatattccagtttatccttaccatttttttctttccaatgattgcggtacctcttcagctcttctttgcaacaaattttgtgagaaagtaatttcacattttcgaaaactgatcgtttaatataacttaaaactatcactcatctagtgacggtattacaatttcccaaaaaaaaaaagttagaaataatacaagtactgatgtgcatcagtgcatggatgaataattgagtacagagtcaaaaactcccgaccaaacctagcagtgatattacctttaaactttgatagcatatatcaaactgagattgacctatgaatatgatggcaacgagctcgtggaaactggtaactgaagattctttttttttgtctatttggtttcattgcctgaaactccctataacgttttccaattctttctttcaaattacgcattgtaaataacattatttttgttgaaagatatttaagattattaaaaaattcaaattgatctatatagtaccaattcttttttctgaatgtgatcatgagagagtgtgtgtgtgtgtttcgttttgtcaacgaattatgaatttgctacgtacgtgacaagtttctatgattttgaaagagaattatgaatttgttacatctttctattttttggggtccaaaataatagaaataaaaaaaagtctacagacaaagaatattatatgatctgtatgtgaaattggaaagataaataaggtaaattatgtctgtaaaagaaacggtctaacaaacagtcaaacacagacaagaatcaccatgaaacttggagtttaacattaattaagcaactcctgttactaactaactacttcccaatcttcagtcaaacgacaaagatataagataaaactttataacataacacgcgatattccacaatacctaattataggatcattacattgatctatataaaaagatcacaaagtgcattttgaattaagccacaagattccttctaagaccaaaggcaagaaaaaaaaagatggcaggaggagcttttgtatcagaaggaggaggtggtggaagaagttatgaaggaggagtcaccgcattcgttatcatgacatgtatcgtcgccgccatgggaggtctgctctttggttatgaccttggaatctcaggaggtgttacatcaatggaagagtttcttaccaagttcttccctcaagtagagagccagatgaaaaaggcgaagcacgacacggcttactgtaaatttgataaccaaatgctccaattgttcacttcttctctctacctcgcagctcttgtagcttcctttatggcttcagttatcactaggaagcatggacgtaaagtctctatgtttattggtggacttgctttcctcatcggtgcactttttaacgcatttgccgttaatgtttcaatgctcatcatcggtagactgttgcttggtgttggtgttggatttgctaatcaggtacgtgaggcatttgttgctttcttgtgtatcaatcatctatttctgtggtttaggttaatatctcaatctttttatgtgtagtctactccggtgtacctatctgaaatggctccagcgaagataagaggagctttaaacatcggttttcagatggctataaccattggaatcctagtggcgaatctgattaactatggaacatcaaagatggctcaacatggatggagggtttctttaggtttagcagctgttccagctgttgttatggtgattggatcatttattttgcccgatacaccaaactcgatgctcgagagaggcaaaaatgaggaagcaaaacaaatgttgaagaagatacgtggagctgacaatgttgatcatgagtttcaagatctcattgatgctgttgaagctgccaaaaaggtggaaaatccatggaagaacatcatggagagtaaatatagaccagctttaatcttctgctcggccattccctttttccaacagatcactggaatcaatgtcattatgttctacgctcctgttctcttcaagactcttggttttggtgatgatgctgctcttatgtctgctgttataaccggtgttgtcaacatgctttcaacctttgtctcaatttacgcggttgatagatatggtagaaggttgcttttcctcgaaggtggcattcaaatgttcatttgtcaggtaaaacaaaatgacttggtttacaaggaaccgcaaaataacaatcatgaccatagtcaaatgaaacaaaaccaattccatatatacctaatcaccaaaaagacttaatgatccgatgttctttatttattttcagcttcttgttggttctttcatcggtgcaagattcggaacctcaggaaccggaacattgacgccagcaacagcagactggattcttgctttcatatgtgtgtacgttgcaggatttgcatggtcatggggtccattgggatggttggtaccgagtgagatatgtccattggaaattagaccagcgggacaagccatcaacgtctcggtcaacatgttcttcacttttctcattggtcaattctttttgacaatgctttgtcacatgaagtttggtctattctacttctttgcaagcatggttgcgatcatgacggttttcatttactttttgttgccggagaccaaaggtgttcctattgaagagatgggaagagtttggaagcaacattggttctggaaaaagtatatcccagaagatgctattattggtggacatgatgacaacaataccaattaagaggagttggtatggttatatgtcgatatttgggttgttttcagggactaattacataaaaaattattgagacattttgtttacctgactcatcttatgaatatgtttaacttatttggggctatatatctttagtcttaacattcctcagtttttgttttgttcccatattcttggaaattcaaggacatacaaaaagaatgctaaactcacatttttataaatctatagtttctatcatataaattttaaattcaactttaatagtacacgttacaagttaaaacaaaaccacaagtttattggcaagaaaacaaaaaaacatctcatggtggatttagtgaactaaaaactcattatgaagttggagaacccaagttctctaaacgataaaagatttatcctatgcatgctttacaagaatatccaacacttacccaattttgttggtcttaaattattgaatatgttttaaaaaaaaaatagaatattaatatctaaaattttctattaggatataacattttcctatagttaaacttgataataaatgttttaattttttttttcaaatccatgaaaaatttataattttgatgtccacaaaaataaaatctattaaaactagattttaacccgcggtctaccgcggagacaatttatttttaaagttagtatatataaacatttgtaaattgtatctatctataaaatatttttattttataatttacaattgttattaaataacgtcatgccaaactcttcatgtcaaacccgtctcgtaaaaaaaacatttattttattaatgttgatcttatttatgatatgtttacgactcattgtctaaatattttagtcgatgcgggacgttgaacccacacatttttcgcaaattggttaatatatgttcatttttaaaatttcgaatcacaaaatataacggaaaaaaaattgaaaattttttaaactctatatattatataatgatgttaaaaaattgtgatatattaaaatttttataagtttaaatattgataatgttttattaagtttaaatatataaataattatatttaaaaaattaatattttttacctttaaggtattgacataataaatctaaaagtaaggatttagaagatttagatttttaattaaatattttcatttctaaataattaatgtcagtagcatgacattgtaaataagttcaaatacatgatttatttattttaaaaaaaaatttagtaagaataatatttatttaaacaaaaaactttgttttaaaatattgttaacaaatatgtttatgctaattttaagggattgatgtgaagtttgtttggattaaatttgattgataatttgattgataatttaaattaagaatgtaaagtaaaattaattagtttggaaaaaagatttaatgctaatgacattggattgtaaataagttcaagtctaagatttatttgctaaaatggctccaaaaatgtatatgtagattataacattcattcggttacttttgacaacaaagaaaaagagttacagtaaaacctatataaattaataatgttgggaccgcaaattctattaatttatagaggtattaatttatcgataaattaataaatattaatttatagagagatttttttaatttggtaagtttttaaaaaaacttttatgaaaatataagcttccattcattatttgagatatctttctagaactaattaagaataataacaattctcatgttttgaaaacaacacgaacagtttttgatataataaaaattattaaaattaaattaaaaataactaatgtgagtttaagcaaaaagaaacaaaactaaaattatatttcattaaagttattatacagtgaaacctctataaattaatactcgataaattaataatctttataaattaataaattcttccggtcccgagttgggaccagtgtaaaaaaatgatacaaatcgataaattaataagataataatttttttgaaaattctatgtaaacatatggtcccactaatattataaattaataattatataaaaatatcaactatatatatatattatacttatatataagaaacttcaatgaattataattttcatattgtttctttttacttaattttgcataagtttttttctttaattttaatatttttactatatcaaaaaaaattcttgttattttctagagatgataattatttctatttataattggttctaagaatatattttagataatgaaatgaatcttacattttcatagaaatttaaaaaaattaccatatttggaaaatctctttataaattaataaatattaatttatcgataaattaatatctttataaattaatagaattttgcggtcccaacattattaatttatagaggttttactatatataattataatatatatatatatatatatatagttgatatttttatataattattaatttatgatattaatgggaccatatgtttctataggattttcaaaaaaattattatcttattaatttatcgatttgtgtcactttttacactgatcccaattcggaaccggaagaatttattaatttatagagattattaatttatcgagtattaatttataaaagtttaactgtacttaagactatacatgggctttctatgggcttcagcccaaaatctgtaatcatcgtttctgagttggagtcggccacatatgacataactgagaattacttttctctctcctctgacggttcttttcttccttcgtcctctcgttttttttgtttcgtcgtctctctctcgcgctctgaaaaattcgcagaatccgtcatgtcttccggcgtaaattcaactggctccgccgcagcagcaccggaggttgacaagatgttcttctgctaccagtgcaatcaaacagtcacaatctcaatttcctcatccgctgatcctttttgtccaatttgtaaccaagggtttcttgaagaatacgaagaccctaaccctaatcaatccctcaatttcaaccctaactcttctgattcctttttccccatggccgatcctttctccaccttgctcccgctcatattcggctcttccgctgccgctccttccggcatggacttcatgagcttattcggtccttcgatgcaaccacaggctcgttccactcagcagaatcctcagtctgacgcgtttgatccgtttacgtttcttcagaatcatctccagactttgcgatctagcggtacgcactttgagttcgtgatcgagaatcatccttcggatccaggtaatcgtatgcctgggaatttcggtgattacttctttggtccaggtcttgagcagttgattcagcaactagctgagaatgatcctaatcgttacggaactcctcctgcttccaaatccgccattgatgctcttcctactgttaaggtaacgaaggatatgttgaaatcggagatgaaccaatgcgcggtgtgtatggatgagtttgaggatggtagcgatgttaagcagatgccttgtaagcacgtctttcatcaggactgtttgctcccttggctggagttgcataattcgtgtcctgtttgtcgattcgagttgcctacggatgatcctgattatgagaacaggagtcaaggaagtcaggggagtggtgatggacaaggatcggttgagggtcagcagacgccgaggtttagtatacaacttccttggccgttcaggagacaagatggctctggttcaggctcgggagcacctggtactggtggaggtaatcttgagaccaggggtgaagatttggattgaggtgtgtatcgtcttttctctctttttacccttttgtttgatttccgtgttgtctttatgccactggactatttgcggtttttagtgtggttgcgataacattgtgaatgtgtgggtatctactggagagttatactcgcgccattgcattgatgcctatatcttatagcttgaaattggagtttctagttaggcatttcttttgcaagagtgacctcaaaatgtggctgcttaatggaaaagttccataggcacaaacttgttggttccttcttgctcttgctgctccctctgttagcaacagatttccctgtttattagatattttcaggtttcttaggtagagtcagagatatgcgtgagataatttattgtgactcaacaggatgctgaaagtaaattagcttagattactttaacgccttgtagataagaaataaggcaactcttctctaggtcgtgcatatatgagttccttgattttgcgtggtggtttaatatcttgaattctcgaccttgtatttgtcatgtgatattctcagaaacttggtgattagcatttcttcgatgtgatatgagagtttcaatgtggataccaacatggggagaactagtttggttatcatatgaggtttctcactgtcattagcttagcgtgatgatgagaaataactgtgctgtgtagtgtaatagcatctcttgttttctatgcaaagatgttggagaggtagaactgtttagtagtcatcaggaatgcataagagtttcaactgcatatgttcacttgagcataactaaagaactagtttgctagttagataagagtccgagagtagcatatatagtggacttcagagacttttgggtcatcgataagttagttctggttgaatcttttgagaaatatttaattgatgcagttgatacacaaccacttataagcaacagagttgttatttgagtttcggattctggctaatacttatcacacttcaaggtttgggaagacctttgtggtcgggtttttggaaccagatgttgttggatccatgaggtttacatgacaatgcattgaagagaatgaaatcacttttcctttgtttaagacctttgctcgtcctaacgcttttcatttgtgttgcagaatgtgttggccagtcattgcttggaaactggatcagaaggatatctatcccaagttctccaacaaaaaatgaaaaaacagttttattagggaaacaaaagtgacattgaggtcttaccatattttgtacatttaaaaaaagttatttttttcgttgttattttgggattatataacgaatgtgaaagtttttaaaaatcgcaaattttcaattgagtgttgtttatttttctcataaacaaacaccttgctatggatggggtaagtgaaatcgagaccccaaaacccattttgattcagaagacattaaaaatcttagcatttgacataaaagaaaatgggacacaaaagaatgaaaatatgaagtggcagacaaaggagattgataattatgtaaaaagagagagagagatgaaataaacagtcccttgtggtatgtttctttgaccttttcatgaaaatgactttacagcttttagttttctaaacttatctattactacgactctatacacgtagtcgcaactcgcaagtttgcaacctctgatctcctcatcgcttcttccttcttaaatggatttacgatgcggaacggaatttgatttcgaaaggcacaaaaacttaatcaaatgcaatgtgtttagtaccgtttactcatgttcatgttcgacaattttatatatgtaaaagtgattgaaatatgtaattttgttttaggtgaacttgtacaattgaatgtgtattcttataacttataactttgataagttgatgatctgtttccataagcaagaggcacgtaaagatagttcaaagacacaaacataaatcagatgttaataagtgagaagttcaagaatcaagaggcaagactttaaaaataaaataaaatcaagaggcacttagaatagttcaaggacgtgcgatgttccttggctcccaaggaagcttctctaggtcaagaaataacttctcgctaaaaaaaggccgtagttgatccaaagttttttttgcttatatattcataatggttctaaattagtgaaaatactgtattcttttgagagaaaaaaaacatgatggctctcccaaagatattgagaacccggtttaatgtttggtttgttttataacacttagaaaaaaagattaatgattacccatgtattccttctttttttttttggttttatttccccttttggtatagctttaattttgaattgttgaatgggcatataattaatagaaactttatgataattctatttatttcgcttccctccaaatcttgttgatgggattgtgggattttgattgatagacgtcaattatgaatgcacgaataaagagtatttgcaagaaggtgaatccaagtcggtattgtctttttgttgttgttgttgaagtaagtaactagagagtatgatcgcatggtgttccatacatatgtgaatgggcattgtttaacaactttgcatgtcctataagcttttgctgctgctttcattgtgtgtttcagtgttataattttaaaaattatggaaacaatcataatcttcaacaacaacattgtttgtcccacgttccaccaaaggaaggggaccgataatgtaaggtttgcgacagatcattgatacctacaatagttattgtctaaatgccaagttattgtctagtcttaaatcttatatgtaaggaagacgcattggcgttaatttccacgtttcaatgcaacagtggccacaaagcatattggacagcactgagagattactcttttgttctgcgtcttgattcggacatgaaatctaaacatcgatagagatgggccacgacgaaacgtagaaagtggcgaacaaagctgataatatctaaaaggagatatatcagataaacaatctcttgcgataaattcttaaaccttttcatcatatgagttcaacttttatgtttacttttaatatttcgtggggcgagtgtgagaatctgaaaatgggtttaggatttatacacatagtaggaacttcgcaatcacgattttccacaccgctgctttttaagtgacattataatgtggtcgacataaaaaaaaaaaaatggtttcgaaagtcatacttaatcacatggtcgcaacatgttttcatatacgaaaagtaaattctgtgaaatatgtgtattaattgtttataggttcattatgaattaaatatgtataaaacttgtggtacttcgttacttacttattaaagaatcttacattagtactaatgttggaacatactttgaataataattgacatgcaaagtactaaacatatgcataacctcatttgatatgcatgagcttattttgtaacgttaaactatcatcttgaaatgtataagtcagtttctcaaaaataacattgctaaaaacgtaatctaatatgtaagtcaataattcaaatcattcaaccatacattgataaacgtcacagttgaagagaaaaaaaacagtcagaaatatattttgatttgtgaactatgcgtgcgttttgcattcactaacgattagtaactagggtaatcattcaacgattaaattgtgtttcataaactggcgagcgattaaaacacttttatctatggaaacatgtgtgtcagaaataattgcataaccaacgacgacaaaacgaataagaaatcatcgtgttatcaaacttgtaacagtaggtaacagtcatacatgaatataaacatgaaattaattaaatttgttttaaaagcttttataattgttttatgtatcccatcaaatcgctctctataataatgtgtgtgactttttgaaaggatgttttgtaccattttattaacgaatctaaaattaaaatattcacattttgttaattaatatgtggttgacttaattctagaaaaaatgaaatttagtactatactctatttcgcagaccgatttttattatttttcaaagcgctgacgaaaacatacggaccgattctaatctcttatttatgtactcgcacattaattagcttcttgatatttcgatggcggaagatagcaaattgttaatgatacagttggatttatttttatttaaattttctcaacgagagaatcattaaatatacaatcaattctatgtgttatgaaaaactgatattcattgatatatcatcagctaaaaaaacaatgctatatatcaaaaactaacaaaatttgaagttaactaattcatgttaaaaattacataaataagatgaaaagatc

SEQ ID NO: 443 - DNA, 83253 bp, Arabidopsis thaliana
gatccataccggaaacaatatcggacccaaaatcgttaacctcgtatctagaatcggaagaaggtataactttcccagaaatgcggcggagaatggcggagactctgtctgtgtctctgcgcatacgagcatggagacggtggtggtggttacggtaagtgactgaagggaatctgtcgcggtggagaagacggagagtgtacttagaactggattcatcggagaaatgggtgttgttgaaatcgggaagagttgcagtgacggtgagaggaggttgtaaaacgtcgatgatttgaaaatcagggaaggagattgaagaagaagaagagagatggagatggagatggagaaagaagaagaagagagggaggagcattgtttacaacgccagagccaaagccaaagccagtgtgagcgtgaagactctctctttctttcttcttggattttgggttttgatgtcagactaagtttttggtgtcttgcttctctctgaaagatgagatttttttgagatttatttattgagagagagagagagagagaccacttgagacttgtgatttgggaagtgatgggtcgatatctcttattgctattatttttgcttacgtggattttctttgtgtttttgtggggtcctccctctttgcacgtcgacatcctttctctacttcgcacactctcctctactcttgtttggtttgagatagttacatatctatgagaactaaaacatacgaggttatactctcattacatccacttaaaaaagtcgtctttgcttctcctaaacccaactctttagaagatatatattgaactttaactcaaatgctaggaacatggttctcatatccattatatgtgttcattgactccatcatgcaagatattccacgcgataacattcaagcattaaaaatgatgtgaaaaaagtatgttcggtcatgccaaaccacttttcaagtttactgaaatctacaaaaactgattcgcaaaaaaaaaacattctttccaattgactagtttggtagattctgaaaactcgtcccaaacaatatggataatgaatacaatttcacaaatcagaaatctctacatgattagtttaactttaggtttgatcttttcatattaatctgttgaattaacaactcaaataagatattttaaatcttagtatccaaaacttaccaaaaaaggtatcttgtgaacttgtataacatttttttttttgcggtgtggccttttgaagtgaataagtaagtcatgagggaagtatgctgaagcatttgtataaagacctttcggtgaagacatcatcttcgtttatctatctccaagaaactcgtgtcaaggatcttgtaagtttttggcaatgttctaactagttgggaacttggaaatcaacggtgcatataaatagagagatatatcttttctctattgcttgaaaaaatcagaaaaatgacatgttttctagtttagttacaaaatttgtcaatggaactttatatcagataatcaaatagtactaaatggtttctataaaacacagatatgacatgtatcattgtttccacaacatatttttgttttcttatgtgaacatctaatccatcatagagcgtacgtctaaacaaaactaaagtttacatctaaaattttgaaccataatattgataaattagatgttcacatcaaaaacaacatgttctagaaaaaaaacattcatagtttaacaaaatcaaaattgattacatgaaatacttattttaatttttgtcatttacctaatttgttattgtcaaactaaacaatcaaagatgatatatatttcactcattgattttgattggtttttttactctagaataaaatgaagaagctcgaagtacttaagatctacgaaatactcaaaaacattcatgacatgtgccagtaccttagatatatcactgttcaatgttcccaataataacgctattgacatattttctacttcaactaatttcaggtaaaataactttgagaacaataatagtatttagttatacatgtaatgaattatatatgccaactcatatttttcaaccaaacaaatattcatatagaaaaactatcgaaattagtaaacttttacgtggaaagaaaccccaaaccctatgtacatcgaattagacaaaatttattatagacaaagtattgattccatgtaatacaaagcacaaatacttgaaactgagttgatgatcggtaccggctactgcaagtacctaactaagcaaatcttgataaatctccatcaaaatataaccgaaagtgatttcgatcaacaaaaacgataaataaaagactcttatattcagtctccattgctaacgtcgaaattctatataatgaatataagaactacagttgtgtacttgtatgccaagactggctattggtatatgatgaaagccactactacatatttcataatcaaggacaaagttcgtcgtttgagccaaaaacatgattaaattgaaaatattatctttaagttttttagaactaacgccaaaataaaacatatttagattggacgtagtgcaagagtagttcgaaagcaaatgttggttgcaactattgattatatggtttcttagctcatcttttttggcatatttgtatcatcatccaatcttcttcaactataccaaaacaatatcttgctcatactggatatcaccggctatttgaaaagtatattgaatcaagaagaagtatatgtagccttggtggaattcatatggaaatattgttagtctttaagtaaaacttaaattcagcaaaaaaatagaaaaggatttgagatacaaaatgatctgaatcctaatcaatttaacgcacgatttgatatgtttttactaacatacaatctattgaataatatattataaatcgtggaaagaaaatattttacgaaaagaaatggtgctatgtgattcatacatttgtgggcgtgcccaaaagttttaaagatatggagattatagaaaattatattttcgatggctattgctatagcatgtaatacaagtacgacaacaccaactacaaataatttagcaaaaagagacggataataattttaattaaatggtcatgcattctcatgataaaaattagagttgggtattacataagacatgcaccacgtaccaataattgaacaattattacacctaaaagttgctcaaattttataatccaacgatatctagtataattcaattacccctagttccatacaccatgaatgagaaaagagtttcgagaattctagaatataatcattcaaatccgactatgtacataatatacatgtttacataacataagagactagttcagctcatgtgtctaaaattgtatctttataaatttccaagaggaaaggaaacctatgaactttcgatatagccgttttactttctgtcttctttgagagagaaagtaaattcctgaaaatactacaaaatctaggttcatagaagtttatgaagagcccctaaattatttattagtagccttagtacgcttttaagatccttcctaaatctaaaatttgtagtaaatgtatcccaaaaaaagtagtatacttcgaactaaaatttagtttttaacggtatttctcataatttctttttaatggtagttcttataatttctcaacccttttaattgaaaatcatattaaacactcttaataaattcaaaaatcaaaatttatttccaatagcaagtaaatgtagtttacttaattaaacaacataatgtgtattttaaaattatgtttataaataacataaccaataacactaggtgtgaagataaattttaaacttcataataaaatagcagaaaactatttgattttaaaacgctaaattgaataaattgatcatgatgaattttatacaaatcaccaataaaatatgcatgacatatataagcactcaaagagaagtgtctgctgagtggatggctagtaacaagcttataaatagcctcaagaacaatgtcctaaaattgcttccatctgatctaaaacctaaataatcttacaagaactggtgttttcgcagactaaaaatagcttgagtttgtcaatgtcctcaattgttggttctgcaatttctggactaataattgctttagcagaagagactacaccttacagggcttctaaaggtaaggatgaattgtcagagaatcgcctccttaacgcattactgactcttttacaaaggaacggccggccgagctgcaaaaatcacaatataagcattggtggaaatttaaaaaaaaattgaaaagggtgaaagagtgtggctactaacgaatattcgaggtggatgttcatgaatctcttgttctctttgctttgagaaagtgtcacggaaccttcaatgacttggtcttgctctacgtctatagggtcatagaaatatacaatcgtctgtccaaaaaagtggttgaacatcaaattgtcagagagtgtaaagctagtttttctcgataatataagcagaagcagaattcgatataatttcattgatcttcttaatataagaccaattccctctgatctttaccaatttagatgcttcattgaaaagtaaaattgatagaacgctgaagaaatcaggaagtatatgcaaaaacatggtcttacttgctgccaatgcgttggaggagactcgggagaggtggacaacacaagtgcatcactcggattagtccgcttcttctgatttacttctccagaaggacttatcgacgaagaaccactagcaatactggtttcactagtattcttggcaggtgaagaggccggtccgctgaattcaacgtcgaaccaaaatgcaaaaccatgcattggagctacaacaagaaaagaaaaagcctcaacacagaaaggaagcaatgctaacttctctctaaaatccacacaatacactaatagttgataaagagagtgatatacctctcatcattgagttgaatttatatcttgcagtaaccgagtctagctcttggatttttatagttttacagtctatatgtttaacctgcatatcaaatgctcttacataaatatagtggatgcgctggtttttgattatttacttagtaataaaaaggataatcttcactcagtatgtacagttaacatagctgagagctcaaagagattggaggtaaagagtattcagagaacgaggaaataccacttctggccatgttagaacgttctcgcctgatatggactccacgctgggttcttcaaaagcacactgtttagctaattgcatcatcgcagacactgcaaacaatatcaaatatcattactgaaaccttatcgtgaggtgtttgttttttcgctttacaaaactcgaatatttattggattcttgagaagaagtttctcaacgtgaaggtaactgagaaacgacatttcaattgacccttatgagttatgaatttttgtgactatgtaatgccacaagttcattccctgaagtcaaggaccaggactatcaaagcaataaatcctatcatattaacatgcttttgttatctgatctgtctaggaaatgaccaaactcccccgcctattatgtgggatatggcaagctcatatcttaaaaaatttaccagcttattagaaacatcaaatccacctaaaattgcaagaaatataactcagtttcaattctaccagtataccaatcaaatttaatgcaatgattgtcccaaagttcaagttgatataatacttactatcaattccataaacattgcgccaaaaatcaatactgtgactgtatctgtcagggtgagaaataggtgccatgtataactgtcaaaagaaggcaaacaacaacctatcaaatattgccttctttcccaaagtcatcatttgatcatactgtgatataatatttaaagggattataatcatactgttgcatgtgatgggagaattaaacctccaggcttcaaccagcgatctctagctgtgataacacttcccagcatgctctacatcacatcaaaaacataatacgggaatgagagaacaggtggatcaaggagcaataataatttggtaggttatcatttagacattaacataaaattatctatatacaagataaaacaataacctcatacaagagcatgtaacccatccactctgaaattataacatcaacctcctcgtcgatttcaacatcctgaagaacataacaacaaaagaagagttactacagaagaggagtgtttgcatacgaacttggatgtttcacccaaccaatctatctcaagagcggtgcagaagtaaagactatctcaaattctccattacgttcattttatatcagacctttctgaataacgacaccaattttcctttttgcaaatgatgtaaatatcaatttgaacaatgtgggatataacatggaggaccaacttcgcatttatcatagacaatatattacctccactctcccgtgcaagacaatgaccttatcggataaaccgttggctttcacaacttcctttgcctggtggtgttcacaaaaaaaaagagtgagtggaatcctttcaacaaactaagatttcacaaaccacttttatttttatagggaacaaaaaccaaatgaaaaccacatgcagagctaaagcaccagattcgttataaattctctcagcttcacaggaccaaaaatatcagaaacatttgcagggttttcttcattgatttaactgacgtcaaaggtaatcaaaccatgaagcaattcagagactaagattttagattaaaactaattgatataaacgaagcctgggtcaacttaactgtgaacatttcaatctagggcctcactttagacaataagaaaaacagtcatcataccctaaacatactcccaccaaagggaaaatgcaacacattatatcaaagaactccttctctattccaagtttcaattttacataagaaaacatgttctggtgaaattataaaatcccccgagccatttacagtttatgaattaaaaaaatggtcagcctcatcagttcacgaaaatgcagaagatagaagggtagcaatcctaatcttcaaattactggattaaaaaaaagaaaagaaacgaacagctggaataatacctggacagcaatatcacttgcatctacagcatatacctgtaagcataatgaagttttgtaagaaaacattaacagtgttggtttacccccgtggtcttatggaatatataaacaacagacacagagaaacaatcaacatcaatataaaaagtttgtgtacagaactacagatgtaactaactcatacccgttttgcacctgcttgagcacagaagattgaaaggatgccagttccacagccaacgtccaccacgacctgttacaagcattcaatgcagcattaggttttcaaacaaaacaataaactaccacgttatacacacaggctaagctaaaagtaaacaacagtcccaatttgaatcttgttcaaatatcaattgtgaagatttaagaccatagttgagaaattacagtaacgagagtattaccttgccttcgattaagctctgatgctgcattatggcttccctataagtttctgtccttgcccgatcctatatcaaccaagaacattccgcaaagaagtgaaaaatcctaaattgatgatataatagagcaacagagcaattacatacatacccaccctaaaccaaagagaaattcaaccctaaattacaagaagaatgcgaaagaaagtaccttgatcatctcttcgtgaatcccaacgtgagcataggaatgaaaataggcaacgtcgaagtcagtacaaggcggaggagaagattccgaagtctccaatgacttgtgctcgccaagctggtcagaaaccctaagcacattggcgagaccgcctcgagggtcacgagctccggcgtgactgcgcttcttggctcggccaaaagagctgagactggggccttgcttgtcttccaattcaagctcgcggtgatggtctccgtggaaaccgttgctgaaatcgccgccagattgcatttttttcagttagacacagagagagactttctctgacgccgcttgacgacgacgactgttgtaatacttgttcttccaaaggagcctccttttttctaactaattaaaacccctaaaaaaaaatcatttttttctttggtaattatgtaatttctcttcagaagaatcatactttttctttgactagcacacaatttaaaccgtgattaggcaggatgattaatttttattattttaataatccagcaacttgggcttggtaatgggccaatacagcttctagcgggttacaaaaaaagggaagcagaagccccggcaagacttagtcggagagaagatcggaaactgaacgggacgagtaattactctttacacttcaagtaaaataaacaatctttcaagtagcatgacactactgcatacatggaaaagaaggtttaaattctaagcgtattaattaagaaaagtcggaaagctaaagcaaggttagggatctacacatgaaattgtgaaagaataggcaaattaatagagtcaaaacttgctaaatgagctcctagatctagggttttgtttacacgacataagggagaattataaaccacatacaagtagcaacaatttgttcacatccgtgtttgacacctacatatacgtatatttgtgtgacaaatatacttgggtaacctaatttgtatgtctctctatatataaaagagagtgggcaagttagaaaaccctcatttctttctattcggaacaatgactacgatctctgatatttcgaattacttggtagagaagatactctctagggctcccataacttgtctcggagcggtgagaaccacatgcaaacgatggaacgctttatccaaagaaaatactttatgtaatggagaagcaagacatcagtttctggggtttatgacgaaaaagtataagctttgttcaatgaggttcagatctcaatggaaaatataacgaaggaggaggtgacgatttcgtggatccaactataaaggagttagatgattttctgaatcatgttaagatatctaatgtgtctttcaatgcgatgggttattgttatgcgtgaccaacgaggacaagactaggctcgccagctcgtggtatggaacccataaattagatatattaaatcctcataaaattgctgaaatcagaaactaagcctcagtttaacctaccgatcaactctaatgaaatgattgtaagctcaagttgatgatataatacttactactgattccacaataacatttctacgttgatcttacctactaactgaaaaaagaagttcaaaaacaatcatttatttgaaatcatcacatatttctaactagaaaatcaaattggaaatatataatataaagttttatatatatcatgacacatgtaacaatctaaaattataagcacgatgatatatgataaaatcttatataattcaaatatgaaagtaaaaatcaaaataaataatttagaaaaaaaaatgaaatagaaaattataaacatgatgatataaaaatctttgataacttaataaatttcacgatcatagagatcttggataattcaataaacactatataataagattttttacttaaaatataaaaaatttatattctattgccttttaataatatttttttgaaaatagtaatagtaattattttttatattttccctttatataaaatttattgtttaattgaattatactttaattatatactttaataaatatgtttttatgtaaacaaatttgtaagtttaatttttgtgtaaatatgtgtcaaaatataattgggggaagttttttacatgtatcaaaatctcattacgtgtatcaatatctcatcaaatgattgacacatataacaatcatgttaattagttactaatttttaaacatcaacaattatataataagattatatgctttcatcttttttgtatacttttatttttttaatactagatattttcaagattagttatttactatactatttaatttaaatgcctatttgttaattttataaacctttttaaagaaagtaattgcaatcattttatttttaggatttgtaatttattgtataattttcattttaatttaaatatatttatcttttacacatatcaaaatcttatgagttactaactttaaaaactaagcattatataataagaagatatgtaaaagttttatataataagaagacatagaaaagagtgtgcaagcaaaataagagaactctaatttatatttgaaacaatgacgatgatgagtgatctttcgcaggatttgttagaggagatattgtctagggttccgagaacttctctaggagcagtacgatccacttgcaaacggtggaacactttattcaaagatcgaattctatgtaaagcagaagaaacaagggatcagtttcggttcataatgaagaagtataagctttgttcaatgaggtttgatctcaacggaaccttaaacgaagatggaggtaccgaattcgtggatccatctataaaggagttaggtcatttttttaatcaagtcaagatatctaaagtttttcaatgcgacgggttattgttgtgcgtgaccaaagaggacaacattaggctcgtggtatggaatccttatttgggtcaaatcaggtggatcgaatccggtaacactaattaccgcctattcgacaggtatgctatcggatacgacaataaccgtaaacacaaaatcttgaggtttctggaatattacaactttaacatgaagcacagatttcttgagtacgaaatctacgattttagctctaattcatggagggttcttgatatcgctccccgttgggaaatagagtcttatcaacgtggagcgtctttgaaaggaaacacttactttattgccaaggaaaaaatagaatacgaagaggatggagagtttccagagccggcagataatttactctgttttgattttacgacggagagctttggacagtttcttcctctgccgtttcagcactatctttacgatgttggagctctctcttctcttggagatgagaaacttgcggcgttatttcagtgcggggataccgatttatcagaggtggagatttgggttacaactttgactgagaccaatacagtgtcatggaatcctttcttaaaagttgatatggaaccacactacggtcgtagttttatgtttgactattacggtggcagtttcttcattgacgaggagaagaaactcgctgttgtttttcagtttgacgaatctggaatgacccgctacgaggacgcaacttacatcattggagagaatggctacgttaaaaaagtgcgtcttggagaagctcctgcgaatcaaggaggatattgtttcccatctgtgtgttttagctcttatgttccaagtttagtacagatcaaccaaattgtaggattcaaaaaagaaagagaagaagagtaataagcacaaagaagaagacttaattataattgactagataaggctcgcttaaatagacgggtgtatgatataaatttatttaaatatttatcaataatatttaaactttatatagtaaatagtaatctacacactttttctaatatttaaagtagtaatttttgtattacataaaattttaatcatacacattcaattttacttatattttaactatctatttcatcataataaactattttgttatttataacataaaaactacattcggacactctgtggaaacgacatcccgtttgtatcctctaacaatgtcggacttacaactgttggacaaacatcaaataaatataaaccgagcagtaattaaaacgcatagtttgctaatccatttactatgcgattagctttactatacacatgagtaactcggactatgcagtccctatacactccatcttattaatgatatttgaattttaaatagtaacgtaactctcatactttttcagtatgtaatttagtatttctttaaaccaaattttaatcttacaaattcgattttgcaatacaatttaaatacctattttaccataataaaatatataatttaatgatatacactccatcttattgttagttttttttatataatttaattatatacactccatcttattgttagttttacattttagataagaaaattgtaagttaaatatttagatataaacatattaattagtatatataaatatctttgttttttagtttcctattttcttttaggaaaaagtaaaaaaaaaatcaaacacatgtcaaaatctaagatcgttcaaataaccacgtgtcatgatctcgtgagttagtaactttcaaaactgtactttatataataagattttaaatagtaacgtaactctcatactttttcagtatgtaatttagtatttctttaaaccaaatttcaatcttacaaattcgattttgcaatacaatttaaatacctattttaccataataaaatatataatttaatgatatacactccatcttattgttagttttttatataatttaattatatacactccatcttattgttagttttacattttagttaagaaaattgtaagttaaatatttagatataaacatattaattagtatatataaatatctttgttttttagtttcctattttcttttaggaaaaagtaaaaaaaaaatcaaacacatgtcaaaatctaagatcgttcaaataaccacgtgtcatgatctcgtgagttagtaactttcaaaactgtactttatataataagattttaaatagtaacgtaactctcatattttttcagtatgtaatttagtatttctttaaaccaaattttaatcttacaaattcgattttgcaatacaatttaaatatctattttatcataataaaatatataatttaataatatacactccatcttattgttagttttttatataatttaattatatacactccatcttattgttagttttacattttagttaagaaaattgtaaattaaatatttagatataaacatattaattagtatatataaatatttttgttttttagtttcctattttattttaggaaaaagtaaaaaaataaatcaaacacatgtcaaaatctaagatcgttcaaataaccacgtgtcatgatctcgtgagttagtaactttcaaaactgtattttatataataagatagctttttttttttttttttgcgtttcttttcattagtttggttttgtttttcttttgcaataatgtcctgtgaacaagaccaatcagttatcattattttgtttctatttattagtggatcaaaaaggatacaaatgtatccatcgtatatatatattccgacgactttgccaaattccatccgacattttgcagtcatttatctctcctagctagttgtatattcgtagatattgagatgtggaagcttttgatggcggtggtggcttgttcagtggtgacagtgttggtgcgaaggaagatgaaacggaggaggaagtggatgccatatagcactggacatattgcaagctggtttggtctctgaaggatatacaagcttaaaatgttgttcatgatctttccaatgggtatgatttcttacatatcccaatgcttgttgattaattagggctttttaaaatatattctttttagtttgtatgggatgttggttacatgatggagcaatatttggaagatcaaaggacataccaaggatttatttggttattacattttgtttgttctgtttttgcttgctattatagaaagttaattttgtgacattgaagtctcttttttttgttgcttgagtgtcacaatgtaagcatgttgctgtaatatacacgaactcttttatgtcagaagcgagagaaagaactatactacatcctttattcattatatatataatatatccaatcaaaaaatatatatatagatatatctatatatatatatatctatatatatatccaaataataaaactgtattcattggtgaacttactaaaatcgcttagtaaaagcgtgcaacacatataacaatgatttctaatgtaaaaagattactaaattttattgtgtaaaaatgatttcgcagactaagcaaagacattagccttggaaaaaaaaaaaaaagacattagccttgactcttgagcattagaatgtgactctgatcttggaaattgattagagtttgataatatctcgtgattgttaccttattagtttctcatacgtttttaatatggaccaaaattgaagtagttgtatcatccaccaattagaactacctaattatatgttttgatgaatgatgatgagaagttttttttttctttttctaaagtcatgaatatgaaaatgtgtcggatcatattatatatattgtgaatttgtcaattagggtgtgattgtttttttctagagttgtaaaaggtgttctctctgacaatattaaaaacagaaaaaatagcatgtctaattctaagtaaaataataaaattgccgacaaaaccgccggttctttcaataatcagctagttgaatatttgtatcattactctaaagattagtctaatcacatcttcttactatatagctcataaacgtcattgcttctcaaatgtgttgttgttaataaaaagaaaacgtcattttagtagttttgagtaatgggagttccctaataataatagttaattaaacaaagtgtacatgaataaacgagtcaaccaaataacaaataaaaacaagcgaatcgaaaccgtccatataactcaaaaagtacacgagggtataactgtcatttcataaatattcatgtattattcatcgattcgtttggcctttccagcgtccttcttctgactcttaccaaaattttatcaatctctccctcgccgcgccttttcgccggaaggacataacttttaccgggatttgttgtctacaagggaacctcgagcgcaaggctgtttaatcggaagaatctggagtcacggagaagcaaaaatgaacaaaaagagagaccctttatgctgagacggtttaattttgtatctgtggttatagaaaggaatcgtttgcgatgaaatggagccttatagggttattctgatcggtggttgaagcgttgtcatttgcatttcgtgtcattctggttatagactctgtttcaattgcttctcgtcgtaaaggcgtttgcttttgtgagtaatttatctcgattcttctgaaagacgtagaaagagagaaggttgtgtatagatattggaaatggggaaggttttggtgatgttgacggcagctgcggctgtggtggcttgttcagtggcgactgtgatggtgagaaggaggatgaaagggaggaggaaatggaggagggtggtgggtttacttaaggatttggaggaagcttgtgagacgcctttaggaaggttgaggcagatggttgatgccatagctgtggagatgcaagctggtttggtttctgaaggagggtcaaagcttaaaatgttgctcacttttgttgatgatcttcccaatgggtgagattttgagatatcccaatgcttgttgattatggtctttagaagagtttccctttagtttttatgggatttgatgacatgatggtgcaatgtctggaaacatttgcttgttagttgtgtgaaatcgaaggtttttgttccttgattgtcacaatggaagtctcttgttgtaatatatgaacctttctatttcaggagcgagacaggaacctattatgcacttcatcttggaggctcctactttaggataataaaggttcatctaggtggtcaaagatcatctcttgaagttcaagatgttgaacgacattccataccaacatctttgatgaatagcactagcgaggtgacaaggctttctccaacatttttctattcgaagctcaattcttatgatctgacagattaaatgctcagatgattcttgttacttgatttttcaggttctcttcgactttctcgcatcatccttgcagaggtttattgaaaaagaagggaacgatttcagtttgtcacaacctttaaaaagggaacttgcgtttactttttctttcccagtcaagcagacatccatctcatcaggagttctaattaaatggaccaaaggttttgcaattagtgaaatggttagttcaaattctctgcaaccttttttacctgtctgcctgatagtgtttactaatttcttagattaaatctaaggctgcattacactctttttttggattaatagttgggtcaactaaacgcagaatcatcaagttgtgtatttagttttacgtaacaatgtgattcatcttctagcatttggagtaaagtttggggaaatgtaatgttcatgacacattgatcttactaatataggctggggaagacattgctgaatgtctacaaggagcgttgaacaagagagggctagatattcgcgttgcagctcttgtaagtcctttactactgcaaaagaatcatattcttggggaactgctgtttcattgcaattcctttgatgattttcctagccgtcacaaaattctgatgccttaacagtttaagtatcggagaaatggctctctatctcttagaaacctcatgatatcatgtgtggtgctgatattagtttcaattgtttgagcaggtgaatgatactgttggggctttatcctttggacattttcatgacccagacacaattgctgctgttgtctttggaacaggtagtaatgcatgttaccttgaacgaactgatgccataatcaagtgtcaaaatccacgcacgacttctggaagcatggtaataactattaagaatcgttacatagttcatccttagaaaccagccatcaaagtttagattccacaggattcaatttaaaagacttgattttttcttctttatgatactttgttattttgtgttaggtggtcaatatggagtggggaaacttttggtcatctcgtctgccaagaacttcatatgaccttgagttggatgcagagagtatgaattcaaatgacatggtaatattttgcgaagtttcctttctcttgtttcgttttatcatgttttcaagttattttttatcaggtaatcaatttggtgggtattgttttatagggctttgagaagatgataggagggatgtatctgggcgacattgtccgcagagtaattcttcgaatgtcacaagagtccgacatctttggacctatctcatccattttatccacgcctttcgttctgaggtacatttccgttatgttttcttctgcttctgtttcaaatggaaaaaaaaactgccaaacgtatacttcgtttcctatataaacttttgcgaattctcaaaaagcacatagtagcttttacgtaacatgattttcgtgtttatctatacgtatatatttgtctgaataaatttttcctccaatttcagaacaaattctgtctcagcaatgcatgaagatgacacatccgagttacaagaagtagcacgaatcttgaaagatttaggggtaagcaaacaagtttgttgtgatgcaaagttttgttctgttcacttggctcattatcttggctctctctctctctatctttgattcataatcacaggtgtcagaggtaccaatgaaggtgaggaaacttgtagtgaagatctgcgatgtagtgacacgcagagcagctaggctagcagcagcaggaattgcaggaatcttgaagaaggtagggagagatgggagcggaggaggaaggagaagcgataagcagataatgagaagaacagtggtggcagttgaaggaggtctgtatttgaactacaggatgttcagagaatatatggacgaagctctgagagatatactgggagaagatgtggctcaacacgtagtggtgaaggccatggaagatggttccagcattggctctgcattgttgctggcttcgtcacaaagtgttcaaacaataccatccgtatgaataatttgtgtacatatttacaatgtatatagccaattgttttagaagcatgtaggtttgtgtaaatattgtaggcactttttagtttcttctactcatgattaagtaaattacagtttatttacaacaacaaaaaatgacttgttagtgcaacggaattaatacagaacagtgaaacctaatcttttggggataaatctttgtgtcattgtgtgagagaggacattcaaaaactacaccataaattcaaacagtaagagacgaaagcccaacttcattacatgcgttacccgacaaaaagcaaaaatttcttgaagtaaaaagtgagcaagaaacgagagagttgaaaaataaacagaaacagctctttcagaggctacattgttacagcgcaaaaaagaagctaaagaggagctgaaaatgcggacaaaaacacacactaaggatgataaggcggataaagaggagctgagctttgcttattcttcgccttggctctcatccttcaccagtttgatcatgtcgtcaattcgtagaatcgttatggctgcctctgttgcaaactggtcacaaaacaaagctcctttaaaatttaagagattacttgattttttaatattctagttcatgtaaagccaagtgccttttacctggataattttcactttgctcatagctggttcgatcactccagcttccaaattgttgcggatggttccgtttacgaggtcaagtcccatgctgcatttacgttttctcaacatgaagccaatgagcatataacattttcaaacagaacctcaaagggaaaagacacaaacagattgcttatcaccttgaatagtgcttcttatcagccttggtttgtgcagtgtggtggtacgctcttagtttagctaccaattcggttgcatccttagcagcgtttactgcaagcacctgataacaggatgataaacgttggattataagataagaacaaaagacagatttttattgatgaaataggtttgtaggtcgcacctttggtataatcaatagcgcatcagcaaattcagcgatggccaattgttcgcgagagcccaaggttgtagcaaggtgctccagatacacagacaatgctgattcaactgcacctccacccgcaaccacctgtttgacaaggaaacaagaaatgtaatgtttgttctttgctaaatgcaaggagtatgtctaacagaaagtaaaggaatgttaccgtgttggactcaagggtcctcttgacaatacataaagcgtcatgcagtgctctctccatctcatcaagcatgtagtcatttgcacctcttaagatcaacgagacctaacaggaaaaaaacacttataaacatgaaaaacctagacaaaactctgtgtgatatgttaaacaactttaaaagaaatatacttaagattgattttgtgtgatatagtactgtcagcaatcaagtaagattcattgctgagagaatggcataccgcactacttgttttggttccctttatcaatataacatcatcatctgcgattctctcttcaacaacctcatcagcagatccaaggtgagctggatcaaatgtttcttcgccctccatgtcagcaaaagtggtgacctaaaataaaggataaatatattagttgaaattttagtttgacaacatgggtattgaaaaagcctagcgcaggaagtaccagagtcgctcctgtcgccttggcaacatgacgcatgtcttctttgcgcacacgcctaacagcaatagctcctgcctctacaaagtactgaaataaaaacaagagaaatgagaatccattacggtgaaccaaacataaacgcaactaaacttgaatacttcaaaaactaagttatgtgtaaacgatagagaaaatcattggttttcattctcactttaagtgccatgtcgtcaatcccctttgtggtcagaattacattggccccagctttgagaagtttctctatccgctcttttgtcatgtcagcttctctgtggaaacaaatattcagcaacatattaaaaaactctgtatggaacacagataacatgagctacaagtgtacagtaaagcaaatttattaagctttccatatcgcatacacccggaaattggagaatgcaaatacttcttcacccaaggatcaagagaacaaaccgaatgacatttggtaggaaaaaagcaagcactctgaatgtaaggaattcagggaaaagtgtataactgcgaaaactacctttgacggatcttttcaagttctcgtgggtcattaacaacaacttggacacccagctgcatttttgtcttctgcagattgaagtcaaggcaagcaatctttgctggggacactcgtaatggcatcccttgggcagcacgaccagtattgagtgcatatccatttaacaaatagctgtctcttgcactttgtccatgagctttcagaatattaatgccctacaatgcggtaagaataagcgtttaagcataaaaatatcatcctcactacagatctttatgtttgaaactttgacagagaagcattaacagaccttgatagggtattttatctctccccgctgatttgtcatctttactgaaagaacggcttccacaacctttaaaagaaatgtgattataacagttcagccacatgcaatgactagggtattattgcaagataaaccagatttaagtagaaaagagtcccccaagaaaaaaccaagaataaacataggttttaataacactaatgttttaatgaatttccacgttattgcttagtaaggagaactggaagcgtaccaaattggcaaagaagtcgctgtcaccagatatcagtttggaggacatgctggttttggcacagtttatcaatggaactttcccaagcttttcgacctataaaacgcaaaaaaaaaagtaattaactaaaggggaagagacagacagtacagtgagctttcccaattatactgacacaaaaaaattgtatgaagagaggaaaatttcctctaagaggcaagactatagaccatcacacgaggactaaccttggtcaccaacttctcttctatgtatttgcaagattctctcattgctagctgtcaacagtaaaaaagataatgaacacactggaaacacttctgcagtgcaggttacaacatatgaaattaaagtcgcagcttaccctatatccactgataattgatgttggatgtattttgttcctgaccaaatcatttgccctctgcaaatatatacataagacccattaatcatcaagcaatagttaccatgtgaaaaatctcccaactctaggaaaaccaaaaccaaagaaaacagtaatcaaactaaccttcaacaactcagcagctacaataacaacagatgtagtcccatcaccgacttctctatcttgaagttcagctaactcgacaagaacctgtcacaacaaaagtagacagattagagaactgagtaactaataattcataaccagtgttttgaaatgatgataagaaaatacgtataacaatcacatttgcataaattaccttagcagcagggtgctcgacctccaacatcctaagaatagtagcaccatcatttgtaatagtcacatcaccaatatcatccaccaacatctgaaacacaagccaacataacatgaaacacgattggaggaactaggaacgaaaatacaaaggacaatatcgagcagatttagaataaaactagaaatggttaggtctaaaagtaacctaaaactaaacacaactgttgccaagatgcatctaagatataaaaaagaaagctagcagaatatatatacacagatgcaaatcagaaaccaaaccttgtcgaggccgacgggaccaagtgaggtcttaacaatattagaaacagcttgacaagccatcactgcaaatagagtatataaaatacgagtcaataaccacaaaacatctaaaagaatagattcaaaacaaaccctagctagagatcgaaacaaatttgcgatgaaaacaaagtgaacagtttagtaatgagaagagataggaaatagacgtaagaggaagcgatggagagtagtagtaccgttctgagtacgaacatcttggccggattgtctatcgccggaaatatccggattttgggcggagatcgacattattcagttgttatatgaacagaagaggagaagcgaaaggctctagatcggagatctgagctctcgagataaagtgcagtgagagatttttcgccttttattgaattgaagcgaaaatgcttctcaaaagtttgtgagagtgagagactccggcgggtttttaactttcaaggtttctgggatgtacggccagggtatgaatgaagcggcgacgtttttatattgggccgaaataatatataccctcaaagcccatttgtaataaagagttaagcacgaattatgggcttggggatttaaaaagaaggccataaatgtcaatttcaaaacatttcattagtcttcagtactttgtccggtgccaacgtttcacatgtttgagtcttacttctctcgtggggaactttggtttctggatttttcaatagttcagaaacttttttttgtattatactttcagatacttactacaacatttcagagttactattatgaacttctcaaatctcagttacggaagagatataggtggtgattgtggaactgtaataaaggtagagtttgattgctaatattggctcaaattgagattataaaagtaaaagagatatgatccaatacagttgagattttaaaatcagttacagtgatttttgagaatcatgcgtttaaaggcttgtagagcttctcaaccatcttcctgtactctgtataacattacaagttcaagaagacgaatatcattatgaatcgaaaaatggagacgtccagagatgtgtaatctgataactattgcaattttaccttcttgattgctccaaagctgagccgcttgattgttcaatggtgagctgatgttcggttctgatcaattaaaacaaaacaggaaaaatcagatactggatcaaaccaacagagaaattcttcataagtaacctcaacagttatatcagccatagagtttacctccgagaaggctttgaattgagagtaatatcgtcctcacatcataagcagatgaccatttatcctacaaaagatgtgaaaacagattctgttttaagtactgcttctctgatatgtgattccatgggatttacagtaacacaagtagaaagagcaagtgattgttatgtacctgaagaatgtccaagcaaatattgccatagagatccacattggggtggaagcagcatgtctcaaacttaactttgggagacttaaaaggataatcgttagagaaagtgagtgagagtctgtactcagttccttcgaacacagtatctttgcttcctgtaattgttcctttccagcaaaatatgttgtcttcctctggaaacgcagatatccccggatcagctcccatctgcaatacataaacccaaaggcctctatataagcatccaaccatatcaacaggttcagttatgcagagaaaagatagcttaccatcaatcccattagttcagattgcagcctgcaattaaggaaaaacaatgaattagcaaaaccatgaatttgtttgctttgatcaagaaagggtacataaaagaaagtacttgagatctgtagtacatacaaagtttgatgtatcattctcttagagacattataacaaacagttggtagacaaagagagaacccatcatttcagaagagaacaagagaagtcacaatcagttttggatccatcgttttctctaaaaatgatctagaaagcatgtagaccacaagaaatggatatgggtagagccaaaacctaatctaatctacctaaagaaacatgaacaactctataaacaatcgcagcgattctaatcattaagaggctaaagactaattcctttaaatggacgcgagaatattccaagatcggaaaaatgtaaaaaagaaataacctttttagaacggagtggctatcgacggtcttagtcggaggagcagattgctttgatccggtggctgccggtgtagtcgccgccggagtattccctgtgtacccattaaccgtcgccatcctttttcgcctcttctaattgaacaaagcaacaatcgtagtcgaaatttctgaaattgaaacgcttttttctcgagaagaatcagattcaagaatgatcgaaactgaagaagaaggagaagagagatagagatagagatagagagagagttcttcttctcttctttgagagagagagacgtgggtctgggttataaaacgtgtacgacacaagaaacgtcgtcgttttcaaaagcaataaaaaggaattatcctaaagcattttccgaacgttatcacttaggttatagcggctattttgatgcatttgaattgaaaattcacctaccttatgtaacggctatttaatctttccaatgataaaatttgttacaaaaatatgtaaaatgttgaatcatgtaaaatgctcaatagatcagagatttatgaggtctacaagaggagagggtatcgagagcaaaggataaatcaagatcttgttacaatatgattcatcacaaggacacactatctttgaaactaattccaaagttaaagagagacacatttctatagatacaatgataacttccctagcttttcaaacctattgagaaacatcacactaagaagccatcagagatgactacacaagataaggggagggagatgtacatacggtaccgatcaacaattgagcttaatgactcgagagactctttcaaagaagatgggacacatacttgtgctgaactttataacttctctcatccattccggtgccactctttgaaatgttccgagtgatgcaggcttgtaaagcagctcagattcttcaccatttgggttatttataaaagttaggctgaaggataaacctgttatggtaaaataatcagggaaacaaaatcagcattggtgcttttctggtggctgatgatctcaaaagatcttttgaatcaaagtaaatagatcatgcaggaaaaacaaattaccggttgttgggtgtgaggctacaatgcaggcgcgtttgcccttattattagttgataatttcattcctagcaagtgtttgccaagagcttgaaatgtacaactagcagaactacttgatccatcgtaggttgttctgcagcattgtggctgagaaaccaagagaggctccttgaaacaaaagcaagaaaaagtatcagtaaggctaattttatgatccactgggtttgtgaagcaagatgcacaacattcagctcagaactgaaaggttaagaggtgatctgttttacctttgctttatgatgtttgctaatgtcaggtgataccatatccgtttccaccaaatcttctgacagtctgctacgttttatcatgcttctcgttgtaactcgagcactttcaggagtctttctcttttgtttttttccactttgatcttcatagttgcgaggatgttcctcttggaccagctcttttagcttgacaacttcttcagaaagtgatttgtctgtaagaaaaacaacaaagattttatcctagacagtattataaccaagtcctcatcactctccatgaagcagttcacattatctcagctaaattcctaactaaactacatatcatgtccaattataaggctacattccatgacacatgaaaatagagcagcaactatcatcaattaacatagtttcttactctttagttcttcttccatgagaagcttttgacactccagaaacttgtcgtccctgccagatctgtggatcaagattgttatagttacattagcaaggctccaacttctctaaataaaaaagaatgtctgggaaaatcaagacggtaaggtgaagtacatgcctgattgaaatgatttcattcctcaacttctcaaccatctccagagaactctgattttcacctctcaaatgttccatcaactcctctgaggctgcaaatagcaaaagagagaaaagacagacacactaagaacgtattcacagacttaaaaggtctcttgttataattctcgattccaagtgtttgtaattgcaatgtgaaatcaaacctaactagagatatctaaaattcaagtatggaacaaaggaactcaaactcaaagaacgaatctttcgaaattggtacctgaaacaaaggtaaggaatttctcttcttgttccttattaatctcatcgtattcggaatatttcttcttctgaaaaaaaaggagatcgaaatcaaaatcgaacccagaaaagcgaaattccggagaaaccctcagaaattgacaagaaaattaaacggaagatgttgcagaaaacctggagtttggtgtatttgtcgtagagcttggcgtagagagcttccattttctgctcactgtagaagagtgaagaatcaaatcaaattgattacccgacccggaaagaagcaaaatcgacgagcttacaaattcgattcaagagagcaaaacacactcgctttggtttccagatttgaaggagaatgacgaaactgatgaattcaaaagagaccaactttataaaattcccaaaccgacgacgcctatgacactgagaagtggattttaattctagggcaacggtttttttcttcttctcaaagcactatttttcttctatctttttatttaattttaagttcttaattataagaatatgaaaaccaagttatccattggattcacacatttttttttttgatgaaaagatctattttggtccacacttgtgaccataattgtacatgccatgaaggtcacgagagtttcgctgggaacttagtacaaatttcctctgttataaacaatcctgattgattattgactacggattcctcttgtttcatcaacctaccaaaaaaaacaatgatatcaccgttgacgctcaaaactccttcatcttcatcctcttatgtctcttctcacttctctgttgctatctcttcttcaagaaacctaaggatggctttatagcgaataagataatgagatttttggggaacacggagaagaggagccaaaggacatcaagatggagacatgatggacgtattgttaatgcttatgatgatagatcctgaatcttggtgatgtcctaatgagtttaagccagagaggtttttagcttcttttggatcagggcaagacgatgcacttcagtacattcttttcggaagcggaaggagatgctgtctgggagtaaatctgagttacatctttgtaggaactgcgattggaatgatgttgcaatgctttgactggaaaaccaaaggagacaaggttgacatggaagaggccattcgaggattgaacctgaccatggctcatccccttaagtgcattcctgttgctagaaacctaaaccctttggcttgctcgaaccttaaaccctgtaactttgaatttgcaaaaaagttgttggtgagaggaagctctgctccgctttgtatgttcccgtgtccaagtctcccggtttaagtggctaccttttggtttagtttggtttattgtgtgaaattgtaaataattgtgtagtgttcttcggtttaaggcatatatcggtttcattgttcactgacttcactgacttcattcacttcaaatcttgtgtttatgatcttaaaaatgcagcggtttttaaggttgattttgttttctccgattcgattctctgtataatgcgatcccactcatatgtgactaattgggtttttgcccatataaaggaagcaaaattcaggtgatgaaggaaaaagatgaagatgtcggctttgaagtgaagaaattggagatttaacaaattcagaagtttgagggaaatttacagcattggaatccctctagacactgctggttaggattgggaatggaggaattaacagctgcaagatcaagaaatcccctaagcagctgaatcgtgtgaccagaaaggggctgattgttgtgaattgtgatcgtctgcttttcttttacttgagattcttgaatctgatttctgatagcgttcgagcgagagagagattttcatgtctcggaagctgatttctacaagagtttatggtcaagacatggacttcccaacatcacttattttgcttggccggacacaagaaggtgggttgggatttagagttagaccactttgacatgtttacttctttgagattgagctaccctattttggtatgtcttgcaactcctccattattcttgtttgttccaatgttttggtctcttaatcctatcctaggaatttgctgtacttgctctggagtcaaccataaatccagtagggaatgattgaatcacatccagtaacatgtttttagtcaaaacatctatctgagattcttagtagatataagaagtttgacaaaaatgaaatgcttatttatagaagagtgatgaactatcttggtcccacactagtaaccacgatgaaaaatacattatttgtatctaatatatacagaggatggtcgattcttgattaacgaatctcatgtctcatcttcctctttcactttgagcaattatggcagcaatgaacatcgttgactttcaaaactgcttcttttttgtcctcttaagcctcttctcacttctctgttactctctcttcttcaggaaaccaaaggaacctcgacttcactatgatttacctccgagccctccgactcttcccatcattggtcatcttcaccttcttctctctgttctagtccacagatctttacagacactctccaccaagtatgggtctattctctatcttcgcgtcttcagtttccctgtagccctcgtctcctcagcatctattgcttatgagatcttcagggaacacgacgtgaacatctcgtctcgtggtttccctcctaccgatgattccctttttgctggatctttcagcttcacctctgctccctatggagattactggaagttcatgaagaagctcctggtcacgaacttgcttggaccccaggcactcgagcggtcacgaggattccgtgcagatgagctagatctgttttacgagaacctgttggataaagcgatgaagaaggagagcgtggatatctgtgtggaggcgttgaagctcagtaacaacagcatctgcaagatgatcatggggaggagttgttcagaggagaatggtgaggcagagagagttagggctttggctacccagttagatggcttgacgaagaagatcttattggcgaacatgttgcgtgcggggtttaaaaagcttgttgtctcactgtttagaaaggaaatgatggatgtttccagcagatttgatgagctgctcgaaaggatccttgtggaacatgaagataaactggacatgcatcatcaaggtacagacttagtggacgcgttgttggcagcttgtcgggacaaaaatgcagagtataagatctctaggaaccatatcaagtcgtttttcgcggtaaatgttcctcccataaggtggtttcattgagaatgcataacttttttgcctaagaaaaaacgttttgcaactgcaggatctcttatttgcaagcactgacacctttgtgcaaacaacacagtggacagtggcggagatcattaataaccctaatgttcttgagagattgagaggagaaatcgattccgtggtcgggaaagcaaggttgattcaagaaactgatttgccaaacctcccttatttgcaagcggtggtcaaggaagggctaagactgcatccgccggggcctctctttgcaaggttctcccaagaagggtgtaggatcggagggttctatgtaccggagaaaacaacattaatgattaatgcttatgctgtgatgagagattctgattcttgggaagatcctgatgagtttaaaccagagaggtttctagcttcgtcaagatcagagcaggaaaaggagagaagagagcaagcaattaagtacattgctttcggaagcggacgaagaagctgtcctggagaaaatctagcatatatctttttaggaactgcaattggagtgatggtacagggatttgagtggagaatcaaagaagagaaagttaacatggaagaggctaatgtaggactgagcttgaccatggcttatcctcttaaggtcactcctgttcctcgaaccctagtccccttaactcagaatccactgaaccggagttcatgaatctttggtaagtaattaggtagccttgtttttacgttaccgtgtctgagtttactggtttagtttggctaatgtgtgaaaccgtaaacaattgtgttgttattcggatttatttgtggattggttcatatatggggttatcttgaaagcagcaaactttagcttcttcatgttacttggttcaatggatttgaaggatgccagttggagtagcatagaaataaacattatattgcaatcacatgagtttcttttgcgaaccattcatgtttcagggaagggagggaaaacttaagatcttgcagtagatttgagaaatgttttggtctttatatttgtcctctccacctatgatatgctactcatgtgtggtttctgtgactttgattgaatttatgacccgaaaggaagaaaatttcagttgtgtagggtttttgtaatttagatattaaagctctttacggagatttctgcagtaattattcttcttttaatgcgctttcaagtagtgatgtttgcggcttcttggctccctggatttacaacgttttcctggcaaactcatcaaatttcttcaaaccaatgctcgcatattcatcagaacaagctcctcgacatcaacgcactctcacaactcacaagctccaagctagccttcaatatcttcattcaaccataatctcacttggtaaatatctctctttcagtaattcctctttctttttcatgggtactacattacaaaaatcagacaaaactttcacggattcctctttctttttcatgggaactacattacaaaaatctgacaaaactgatagaatattaaattcacttgtcgtaagatgtgagttattagcaaaatttcacggagttccaataaagaaaaacatttcttgatctagtaaacaaaacatggccatacattagattcattgattcttgataagagaaattgtatctaatggcaaagatatcttgatgattttaaatgctattttcttaagaaaattttcaaatatgatatgaaaccaaagatcacatacaatctaattttagtggttaaaaaaacaaaatcaaattaaccaatttaaacaacaatttataatgattgtggtcctcagtttacaaacttttccaaattgagtaaggctattacattttggtaacaaagggggcacggcacctcaactttccaagaaatttgtatttttatgtgctattcaaacactacattacggattcctctttctttttcatgggaactacattacaaaaatccgacaaaactgatagaattattaaattcacttgtcgtaagatgtgagttattaccaaaatttcacggagttccaataaagaaaaacatttcttgatctagtaaacaaaacatggccatacattagattcattgattcttggtaagagaaattgtacatttatatgtcatttgcctcgtcttcactttgagtaacaatggcagcaatgatcaacgttgaatttcaaaactgtttcatcttcatgctcttatgtctcttctcactcctctgttactctctgctcttcaggaaaccaagctcaagacaaaactcctatgactgtgatctgcctccaagccctccttctatgccaatcatcggccatcttcaccttatcctctcttctcttgtccacaagtcttttcaaaaaatctcctccaagtacggacctctcctccatctccgcatcttcaacgtccccatagtcctcgtctcctctgcgtcagtggcctacgatatcttcagggtgcacgatgtaaacgtctcttctcgcggtccccctccattcgaggagtcactcttgttcggatcttccagcttcatcagcgctcccctccctatggagattactggaagttcatgaagaagctaatggtcacaaagctgcttggaccgcatgcactcgagaggtcacgaaaaatccgtgcagatgaactataccggttatacacaaacctgcttgacaaggcgatgaagaaggagagtgttgagatcggtaaggaaacaatgaagctcactaacaataccatttgcaagatgatcatggggaggagttgttcggaagagaacggtgaggcaaaaatagtcaggggtttgattgccgagtcatttactttgtcgaagaaatttttcttggcagcaactttgcgcaggttgctggaaaagctcgggatctcgttgttccagaaggagataatgggtgtttcccgtggattcgacgagctactagagaggattctgagggagcatgaagagaaaccggacgagcatcatgatacagacatgatggacgcattgttggctgcttataatgacgaaaaagccgagtataagatcactagaaaccagatcaaggcgtttatagtggtatatcattctatgatcacttttggttctttgagattaaccacacctaacagttcacaccaatacttgtccttgaataataagatacgttatacaattgcaggatatgttcatagcgggcactgacatctcagcgctaacgacacaggggacaatggctgagatcattaacaaccctaacgttcttgtgagaattagagaaaaaatcgattctgttgtagggaaatcaaggttgattcaagaaacggatctaccaaagctcccttactcacaagcggtagtcaaagaagggctgagattgcacccgcctacgcctctcatggtaagggagttccaagaagggtgtaaggtcaaaggtttctacataccagcgagcacaacccttgttgttaatggttatgctgtgatgagagatccaaatgtctgggaagagcctgaggagtttaagccggagaggtttctagcttcttcaagattaagggaagaagaagagataagagagcaagccctcaagtacattgcatttggtagcggaaggagaggatgtcctggaacaaatatagcgtatatctttgtaggaacggcgattggaatgatggtgcaatgctttgactggaaaatcaaaggagacaaggttgacatgaaagaggccattggaggactgaacctgacattggctcatccccttaagtgcactcctgttgctcgatccccaaaacctttttaagttcaaattattaaaaccgatgttcgatgtttgatgttggtgactggactatagtgttgtaagatgaatgaagttataataataacgaagcttgctttttgttgttctgttagtactcgttcattcattctctattaagacactcaaaatctcataccactctttatttttctcaaacctcacactctctattattttctacgttgcttgatattgtaacttcttactcttgtattgtatgttatggggatgattgctctcgtttattctctctcaatctatgttctacagagagtctgcagcccacttttgttgacaaaaggagaaaccaacacatcttattttcaataataaacactatttaatttttcaacaaaaaaacactcctttgactaagaattagtgaattaccacatgtgatgcaattctagaatacgtggtaacagagattatttacactatgttttatctacctttccggctttgagcaacaattgcaacaacgatgatgaccgttgagttccaaaactggttccttttcatatattaaggagagaatcatatctttgattattttattcgaaatcttatacaagctggtgcactacgtgtctctcatgtctcaacccatgatcagttagcagacgcattgacgaaaccactaccacgtaccagttttcaagctgcatgttccaagattggagtgacaagagtccctccatcttgagggagcgtattaaggagagaatcatatctttgattattccaatcatacctttgatttctcatatcattcgattactacaatcatggacttatttatgtatagtacatattctgatttatgtctattgtaataccctagctagcatctcctctgtatataagttctcactctgttttaataaaaagatatcacttctacaaactcttatatcatactcctctgcttcttgtcactcttttgttactctctcttcttcaagaaacaaaaggactcacaagtgcttccgagccctccggctcttccgatcattggccatctccaccatgtactcttttcttcagcttacaagtctttacaaaaactctcatccaagtacggacctctcctatatctccgtatcttcaacttccctgtagtcctcgtctcctcggcctcagtggcatatgagatcttcaaggcccatgacctgagcatctcctctcgcgagaaccctccaatcgacgagtccctcttgcttggatcttccgtctttgtcagggccccttatggagatcattttaggtttatgaagaagctcttggttacaaagcttttaggaccacatgcactcgagaggtcacgaggcatccgtgcagatgagctagagcggctttacagaagtctttttgataaagctgtgaagaaggagagtgttgagattggtaaggaagcaacgaagctcagtatcaacagcatatctgcaagatgagcatggggaggagtttttcagaggagagtggtgaggctgagagactaaggggattggttactgatttagatggcttgacaaagaattttttgttggcaaacatattccgctggccgcttgagaagctcggaatctcactgttcaaaaaggagatagtgtgtgtttcaaatatctttgacaagttgctggagaagattcttgtggaacatgaagagcatcgaggaatccacttgacaatggctcatcctcttaagtgcactccagttgctcgatccttaaaccctttaatatcttatctgtaaaatcgatgtttgaatcaaagttggtgtctggactaataataaggacgattgcgctctgttgttctgtaacttactagttcattcatcttattcaggttcccggtttattagctttatatttggtttactgtggtatgattttttctctcgtttatatttgttgaattgtgttaaccaatggactcccgaagctttggtttagtttcccgattaagcattttaggtttggttttccttaagaaaccgtaaacactgtttattgtgttttgtcttgtttaggaattagaacggttgaatttcagatttcgagattcaaatgcgattattgaaggtgatgtccagaaagcaaacaaatttcgtcggtgtagggtttggtttgtagaagttttgtgtcaaaatgtattttttttttttttttttttttaccaatttcgagtgacggaggaggaaaataagatttgggcttcgaagttcagtgaactaagtgtgattttgggagaaaatggagtaaattatccctgcaagaaatccatcggtgagtaaactactatgttgatgaatcgcattgtgttagtgatgattgcatctcttgagtcaatcaagattgattatttattgagatatgttcgtcttttctttgccttttttttgactttatatggcttctcatcaaaattacttaaacatgtctttgtaaccaaatcgttgccaatataactactttcaggtgctaatgatttttctctggaatttcattgactcttcaaactttgaaaatggttagggaatcctcaaatttgtgggagaaatataatacaatcgttgcaaagaatcatatagcaagattctttatttctctacatattttgtagtttacactttacataaccacacagacttacctggtttaggaagaatatacttctttttgaggttttgcttcgctgattagattgtttatcatgttgtgtagtaaacaggttttcaaagaggaaaaagaagaaggttatgaggaacattacttatactgtgagtcaatcttgaatccttctgtttagttgcattattagcttgagaggttatgaactctatatttattattattatcgcttagatcacgagtgtctcttatctgagtttatcttatttcaaaaacaaggttctagttctccaatatttcaccttttttccaaagaaaagcattttttaaaacggatccctgattatgtttcatacttcttcttcactttggagcaacaatggcaacacttatcagcgttgactttcagcactgtttcatgtacataatcctcctatgcctcttctcacttctctgttactctctcttcttcaggaaaccaaagggcacacgagttggctgtgatctgcctccgagccctccgtctcttcctatcattggtcatcttcaccatctcctctcttctctaactcacaagtctttacaaaaactctcctccaagtatggacctttcctccatctccggatctttagtgttcccatcatccttgtctcatctgcttcagtggcatatgagatctttaaggcccacgatgtgaacgtctcatctcgtggtgctgctgcgatcgatgagtccctcttgtttggatcttctagcttcatttacgctccctatggagattactggaagttcatgaagaagatcttcgccactaagctgctccgaccacaggtgctggagaattcacgtggtgttcgtgctgaagagttaaagcggttttacaggagaattctcgataaggcgaggaagaatgagaacatcgagatcagtaaggaatcggcgatgctcatgaacaacatcttatgcaggatgagcatgggaaggagtttttcagaggaaaatggtgaggcagagagagtcaggggcctggtgggtgaatcatatgccttggtgaagaagattttcttcgcagctacattgcgcagactgcttgagaagcttcggatcccactattcaggaaggagataatgggtgtgtccgacagatttgatgagctgctagagaggattattgtggaacacaaagacaaacttgaaaaggagcatcaagttatggatatgatggatgtgttgttggcagcttatcgagacaaaaacgcagagtataagatcactaggaatcatatcaagtcgttttttgtggtaaattttcctcattttaccgatttcgtttgagtatccatatgaaaattacttaaaaatgttccatgtcttcgcctgcaggaccttttcgttgggggcactgatacctcggtccaaacaacacaatggactatggctgagatcattaataaccctaacattcttcagacactgagaaaagaaatcgattcagttgtagggaaatcaaggttgattcacgaaacggatataccaaaccttccttatttgcaagcagtggttaaggaaggactaagattgcatcctccagggcccctcttgataaggacttttcaagaaagatgtgagatgaaagggttctacataccggagaagacaacactcgttatcaacgcttatgctgtgatgagagatcccgactcttgggaagatcctgacgagtttaagccagagaggtttctaagttattcaagatcagggcaagaagacgagaaagagcaaacacttaagtacctttcttttggtggcggaaggagaggatgtcctggagtaaatctaggttatatatttgttggaactgcaataggaatgatggtgcagtgctttgactggaaaatcgaaggagataaggtcaacatggaagagacttatggaggaatgaacctaaccatggttaacccgcttaagtgcactccagttcctcgaacccaacctttttcttttacttctaatctcgagattcttagttcctgacactcagcttgggaacacatatgaagtttgttttcttctgtactatacatattcatcaaagacggttaattacatttggtgtctttatgatttcctgcccttttcacaaaatttacgtacctttgttctttcgttttatatgtcgttgatcaaattctctaggttgattgtttccctatccgaatccatttcgtccctagagctgcttggttctagtatctgctttgtattgttttcaggctaaagttagtgtcaacaaaagctggattcctctgacgagcttggtcgctgcaaaaacgttttcaggtggcgtagctactgaattagtgaattctctcagccttgcaagctcacaagccccaagccaagtatccttcaaattctttattcattcataatctcacatggtaaatttctatgttcttgtcagtagttcagacttgtctttctttgacagctgttctcttggaccttttttctctatttttaggatccgaagaaagtgattgaaatctatgtcccacttactgtacttgcaaaccatgttatctttgcttatacatgtcttagtatatttgacgtgtcgcaagatctgagtatattaacaaaaacatttcaattattaataggtaatcaaagcataaccatacattagatttcccttattgataagagagtattatatgtgtcatttgcctctttttcatttgagcatcactggcagcaatgaccaccactgagtttcaaagctgcttcatcttcctcctcttatgtctcttctcactcgtctgttactctctctttttcaggaaaccaagctcaagacgggacgcccatggctgtgatctgcctccgagccctccttctttgccagtcatcggccatcttcaccttatcctctcttcccttgtccacaagtcttttcaaaagatctcctccaactacggacctctcctccatctccgcatcttcaacgttcccatagtcctcgtctcctctgcgtcagtggcctacgatatcttcagggtgcatgacttgaacgtctcttctcgcggctcccctccgtttgaggagtcactgttgttcggatctaccggcttcattagtgctccctatggagattatttcaagttcatgaagaaacacctggtcacaaagctccttggaccacaggcactcgagcgctcacgcctcatccggacaaatgaactagaacggttttacataaacctgcttgataaggcgacgaagaaggagagcgttgaaattggtaaggaagcgatgaagctcagtaacaacagcatctgcaagatgatcatggggaggagttgtttagaggaaaagggtgaggcagagagagtcaggggtttgattatcgagtcgttttacttgacgaagaaatttttcttggcattcactttgcgcgggctgctcgagaagcttggaatctcgctgttcaaaaaagaaataatgggagtttcccgcagatttgatgatttgctcgaaaggtatcttagggaacatgaagagaaaccagataatgagcatcaagatacggacatgattgatgcactattggcagcttatcgagacgaaaaggccgagtataagatcactaggaaccagatcaaggcgtttttagtggtaaatgtttccatcatcagttttgatttattatgataaaccatacttaaacaccattgatcttccttgactaagataagttttacaaatgcaggatattttcattgcgggcactgacatctcggcgctaacaacgcagggaacaatggctgagatcattaacaaccctaacatatttgtgagaattagagaagaaatcgattctgttgtagggaaatcaaggctgattcaagaaacggatctaccaaagctcccttacttgcaagcggtagtcaaagaagggcttagattgcacccgcctacgcctctcatggtaagggagttccaagaagggtgtaaggtcaaaggtttctacataccagcgagcacaacccttgttgttaatggttatgctgtgatgagagatccaaatgtctgggaagaccctgaggagttcaagccggagaggtttttagcttcttcaagattaatgcaagaggacgagataagagagcaagccctcaagtacatcgctttcggtagtggaaggagaggctgcccaggagcaaatgtagcttatatctttgtaggaaccgcgattggaatgatggtgcaatgctttgactggagaatcaatggagaaaaggttgacatgaaagaggccattggaggactgaacctgaccttggctcatccccttaagtgcactcctgttgctcgattcccaaaacctttttaagttcaaattattaaaaccgatgttccatgtttgatgttggtgactggactagtgttgtaagatggttgaagtaaaataataaggaagcttgctttctgttgttctgtaactactggtttattcattctctattcaggtttccaggcttatcagcttatgtttggtttcttttatcacccggattgctgtatgaaccaaagctacgttgttttgtttttcatttttgttttcaaaatgaaatggcattagagcaaacaaccaaatcctagaattgttgaattttaagcccatctctttccagatttccatctcaagaagggaagggactaataagtaaccaattttaacactacttctttcttagtttttccttcattttcagatttacttatcaactaaaaggaacaacttcttgcgacttgcgagaaaaccattcaaaaagactgtcattgcgtcatcaatctcgaacttgtctattcctcacaacacacaatgagtcatctttttgtcaccttcgactatttaattatcagtttgatcaccagtgtcaaacttattgatctgagcgtatattattgagatctctatattattattaataaacaaagttctagttgtccactatctcaaattcttcaaaagagaagcattttataaagcaataaaacaaagcatggtgatggtagttatactttctattaatggactgttgattatgtttcatctgcctcttcacttaaagaaacaatggtagtcatacttcacatacgttatacagtatactctgagatgtgttaatactctgttttatcttaccttttacactttgagcaacaattgcagcaatgttgaccgttgactctcaacactgtttcagtttcatactcctctgcttcttctcactcctctgttactctctcttgttcaagaaactaaaggactcacatgttggccgtgatttgcttcagagccctccatctcttccgatcataggccatcttcatcatctcctctcttctctagcacacaaatctttgcagcaactctcatccaagtatggacctctcctacatctcagcatcttcaacttccctgtagtcctcgtctcctcggcctctgtggcttacgagatcttcaaggctcatgacttgaacatctcgtctcgcgacaatcctccaatcaatgagtccctcttggtcggttcttctgtgttcgtcggcgccccctatggagattattggaagttcatgaagaagctcttggttacaaagctgctgggaccacaggcactcgagcggtcaagaagcatccgtgcagatgagctagagcggttttacagaagcttgctcgataaggcgatgaagaaggagagtgttgagattggtaaggaagcaacgaagctaagtatcaacagcatatgcaggatgagcatggggaggagtttttcagaagagagtggtgaggctgagagagttagaggtttggttaccgagttagatggcttgacgaagaaggttttgttggtaaacatattgcgctggccgcttgagaagctcagaatctctctgttcaaaaaagagataatgtatgtttcgaacagctttgatgagctgctggagaggattattgtggaacgtgaaaagaaaccgaatgaacatcagggtacatacttgatggacgtgttgttggaagcttatgaagacgaaaaagcagagcataagatcactaggaaccatatcaagtcgttgttcgtggtaatcaaaatttcttctcattaagtgtggattcattaagaatggggaaaaacaaagtctgactaagaaacgtttgaaacttgcaggagcttttacttggaggcactgatacctcggcgcaaacaatacagtggacaatggccgagctcatcaacaaccgtaacgttcttaagagattgagagaagaaattgattcggttgtaggagaaacaaggttgattcaagaaaaggatctaccaaagctaccttatttacaatctgtagtcaaagaagggctaagattgcacccgccattgcctctcatggtaaggacgttccaaagaagttgtgagatgaaagggttctacatagcggaaaagacaacacttgtagttaatgcttatgctgtgatgagagatcctactacttgggaagatcctgatgagtttaagccagagaggtttctaaggcaagaggaggagagaagagcactgaagcacattgcttttggaagtggaaggagaggctgtccaggatcaaacctagctactattttcataggaactgcaattggaacaatggtgcagtgttttgacttgagcatcaaaggagacaaggtcaaaatggatgaggttggaggactcaacttgaccatggctcatccccttgagtgcattcttgttcctcgaacccaacctttcatttctaaccagcagattccaagtttgtaatttccatgaatcctaattattgtttttattattgtaattccaacctttcatgaccaaacggttcaagtttggtttttattttattttcacggtttacaatacgaaaccgtaattattgtggtctactgttggatttgtcctgaaataagaaaaagttaaaagtgtccttgtcttgtcgtctctttctctcttcagtgtgaatctttttttgtgagaaaattgttcttgtatcctctgagagcaaagaaacccaccagtttctcgtttgctttcttccggtaaagtcgttgatcgattcattatcgttaattcttttttcttccgttggccatccttgaaattggtaaattttcaggttttattggttcaattccgtatcgtttcttatgtctgctttaatgtaggctgttcttcgtcaatgggttatcagaaactgcgaattgaactagaaagttttggtcttttgtaaattattaggagcttgtcaattaggggcatattagttttctcatggatttgcttattgatagcttctgaaagagtatgatgtcttcttgggatgctgatttctccatgagttattgttaaagaagttattttatgcaatgttactctccatgaatttcccaatattagaccacttgataaaagtttgttatctttcttaggcttaagcagtatggatcacattttcaataaaacttgtgatcctcttcttcgaatgcactttcagtcgtgatatttgcagcttcttagctctctgcctgatttctttggacgagtgtctccttctataatcatgataattcttttatctgctactgctttgaaagcagcttaggactctggtcgagatataatcacaagtgtccaacgatagtcaatttatagttaaaataagacttgattcccttctttttacgttcttcgagaagatatattatattttaagtaaaaaactaaacaatattatagatcatacatcatgatcatattcgcagattcttgagacaataatactctggtttcatttaccttcccactttgagtaacaatggcagcaatcatcggtgactgcttcatatttatcctcttatgcctcttctcactccttttctactatctcatcttcaggaaacctaagaactcacggcttgtcgcttatggctgtgatctgcctccgagccctccatctcttccgattataggccatgttcaccttctcctctcttccctagctcataaatctttacagaaactctcatccaagtatggacctcttctctatctccgcgtcttcaacttccctgtagtcctcgtctcctcggcgtctgtggcctacgagatctttaaggctcatgacttgaacatctcatctcgtgacaacccttcaatcgatgattccctcttgattggatcttctgtctttggtagtgctccttatggagattactttaagttcatgaagaagctcctggttactaagctgcttggaccacaggcacttgagcggtcaagaggcatccgtgcagatgagcttgagcggtttcactcaagcctgcttgataaggcggtaaagaaggagatcgttgagattgggaaggaagcaacgaagcttagtaataacagcctctggaggatgagcattgggagaagtttttcagagaagaatggtgaggctgagagagtcaggggactggttactgagttagatggcttgacaaagaaggtcttgtttgcaactttgctgcacaggccccttgagaagcttggaatctctctgttcaaaaaggagatcatgtgtgtttctgacagcttcgatgaggtccttgagagggttcttgtggaacatgaacagaaactggacgatcatcaagatagggacatgatggacgtgttgttggcagcttatggagatgaaaacgcagagcataaaatcagcaggaaccacatcaaagcatttttcgtggtaaatgttcctctcattaagctgaatttatttgaggatcaaaagtgctcttactaagaaacgttttgtaactgcaggagcttttctttgcgggtactgatacctcggcgcaatcaatacagtggacaatggcagagatcattaacaaccccaacattcttaaaagattgagagaagaaatcgattctgtggtagggaaaacaaggttgattcaagaaactgatctaccaaagctcccctatttgcaagctgtggttaaggaaggacttagattgcacccgccattgcctctctttgtaaggacgttccaagaagggtgtaagattggaggtttctatgtaccagaaaagacaacacttattggtaatgcttatgttatgatgagagatccgagtgtctgggaagaccctgaggagtttaaacctgagaggtttctatcttcttcaagatcaacgcaagaagaggaaagaagagagcaagcacttaagtacattcctttcggtagtggacggagaggctgtcctggatcaagtctgggttatatctttgttggcaccgcagttggaatgatggtgcaatgctttgactggagtatcaaaggagacaaggtccaaatggatgaggctggaggactaaacttgagtatggctcattccctgaagtgcactcctgttcctcgaaaccggcctttacttgctgatcagtagatgccaagtttgtaattttcagatgtcactgaactcgcaaacatagaaaagtgctgaattcagatgtttactactggtatgttttaattccgtttactgtatgaatataaataaaatagaaaattgtcccactatttctggcctgtttctctttacagttccctgagtccttttaccgtaggattggtatcaaatcaaagaaataatcagctctcaaatttgatctttggctattatcgttgattggttcatataatctgatttcatcttccgtttccttcttctggttggttcagttttctgttttctttcactcttaagctcatcttgaaattggtgagtgtttgatgtttttctaatctgattcaatttggtgacatagagctattcagttctatagtctttcctgattcaaacgtccccgggggagttatatcttttagcaaaaaaaatatctgtgtagaacgtgctttgatcattgtgtgttacatgtacaaatcatcaattatagaggagaatatactctgtttgtcccagctcttaacattgcgcaacaatgatcatcgttgactctcaaaacgacttcaccttttgtaccctatgcgttttcactcccctgttgctccttcttcaagaagtcaaaggatcaagtgactaaagcactgtaagttctcagaaaatgtgtctcttctttatgtgtgtattagactagaaaatgattcgtctatggtagttattgagtctttatatgcattagactagtttttgtaataataagagcttgtttaaattggtgtttttttttgtttttttttttggtaagaagcttgttttgattgttgattaggtgaagatttgctaacttacaagttgtatcagtaataataatatatatcgacttgtttaacaattgattcatctttgtattctcaggtggcagattctttgtgtcttgctatttatgtatacctttctatattattatttaagtcataagctcttatgatgcatgtgaaaccttagttgtcactttggaattgggggtgcagacaagacttgtttttaaagttaataagtagatgataacgagtctcgcagaacttgtgattgtttaataataagtagaagtatagaaaatcagataccttccattattccagatagtaaacaaattctttcactttgagcaacaatggaggcagtgatcagctttgactttcagaactgcttcatcttcatcctcatatttctcttaacgttcctatgcttctttttcttcttcaagaaaccaaaggattcacgagttaacttcgatttgcctccgagccctccttctctaccaatcattggtcatgttcaccttctcctctctactctaacccacaagtcattacagaaactctcctccaggtatggacctctcctctatctccggatttttaatgtccccatcatcctcgtttcctcggcctcagtggcctacgagatcttcaggacacaagacgtgaacatctcctctcgcggtgtcaccgcggttgatgagtccctcgtgtttggatcttccagtttcgtcactgctccttacggagattactggaagttcatgaagaagcttactgtcatgaagcttctcggaccgcaggcacaagagcagtcacgagacatccgtgcagatgacataaagcggttttgcaggaatctgctcgataaagcaaggaagaaggagagcgttgagattggtaaagaagcaatgaatctcatgaacaacattttgtgcaagatgagcatgggaaggagtttttcagaggagaatggtgagacagagaaactaaggggattagttaccgagtcgattggcttgatgaaaaagatgttcttggcagttttgttgcgcagacagcttcagaaacttggaatctcactattcaagaaggatatcatgggcgtttccaacaaatttgatgtgctgctagagaaagttcttgtggaacatagagagaaaccggagaaggatcaaggtacggttatgttggacgtgttgttggcagcttatggagacgaaaatgcagagtacaagatcactaagaatcacatcaaggcttttttcgtggtaaatgttcctctcatattatgtgaatttttgtcgagaaatgatatagagttgtatgacatataattgtttgttcaatcataggaccttttcattggagccactgatacctctgtgcaaacaatacagtggacaatggccgagatcatgaacaatactcacattcttgagagaatgagagaagaaattgattctgtcgtagggaaatcaaggttgattcaagaaacggatttaccgaacctcccttacttgcacgctgtcattaaggaagcactaagactgcacccaccggggcctctcttgccaagggaatttcaacaagggtgtaagatcggagggttctacataccggagaagacaacacttttgattaatgcctatgttgtgatgagagatccgaatgtctgggaagaccctgaggagtttaaaccagagagatttctagcttcttcaaggtcagggcaagaggacgagagaagagagcaagctcttaagtttcttcctttcggcagtggaaggagaggatgtcctggatcaaatctagcttatatgattgtaggaagtgcaataggaatgatggtgcagtgctttgactggagaatcgaaggagagaaggtcaacatgaaagaggctgttaaagggaccatccttaccatggctcatcctcttaagttaactcctgtcactcgacaaccacccttgacttggatatgacactgaatttgcagacaataaaaatagatttctctctattttttgtttatgggtttcccggtattagtctggtttggcatttgtagaggaggatgttggggcaatgatgttgatcttgtttctcgaacagaccctctgtcgtttttacatttaaatggttaaattattttgtaattcagacttgagtgcacttcccaatagacttgctaattgagcgtttctatcttgtgtcacatatgtcatatgtcagagactttaaaacattacatctgttgttgtaaaatctgtttttttttatcttcacatgcacatttcttagttacaagactcattaagatccacgtgtggaaccttaggtgtcggtacgtggggaattttttgatttttgaagattctttttcacttactgaatgattattatgatcacgaatgtcaaggaacagttttgacccgaaacgtttcttgttgaaaaaatagttatatactttcttctttccattttttcatagattattgataagaggatactctgtttcatctgcctcattagtttgagcaacaatggcagcaatgttgactgttgagtttcaaaactgcttgatctttatcctcctctgcatccttttactcctatgttaccctctctttttcaagaaaccaaaggtctcacaagatggatttggtttgcctccaagccctctatctctgccaatcattggtcatcttcacctgcttttctctaatctaactcacaagtccttacagaaactctcctccaagtatggacctctcctctatctccgcatcttcaatgtcccgataatctttgtttcctcggcctcagtggcatatgagatcttcaggggacatgatgtgaacatctcttttcgagggaaccctcctatcgaggagtcccttttggtcggatcttttggatttttcaccgctccttatggagactattggaaattcatgaagaaggtcatggtcacgaaactgctcggaccgcaggcactacaaaggtctcgaggcatccgtgcagatgcgctagaacggttttacatgaacctgcttgataaggcgatgaagaaggaaagtgttgagattggtaaggaaacaatgaagctcatttacgacagcatctgcaagatgattatggggaggaatttttctgaggagaatggtgaggcggagagagtcagaggcttggtgaccgaatcgactgccttgacgaagaagatttttatggcaaacgtgttgcacaagccccttaagaagctcggaatctcattgttcaaaaaggagataatggatgtttccaacagtttcgatgaactgctagaaagatttcttgtggaacacgaagagaaacttaacgaagatcaagatatggacatgatgggcgtgttgttggcagcttgccgagacaaaaatgcagagtgtaaaatcactaggaaccacattaagtcgttgttcgtggtaattgtgtcttttagtaggcagattcgtccataatccaaaatatattgtcctgtctaagaaactttttccaactgcaggatcttgttgttgcaggcaccgacacttcgagacatgcaacacagtggacaatggcagagataattaacaagcctaaggttcttgaaaaggtaagagaagaaatttattcagttgtaggaagaacaaggttggttcaagaaacagatttaccgagcctaccttatttgcaagctactgtcaaggaaggactgagattgcaccctcccgggcctctctttgcaaggacagcccgagaagggtttagtgtcggaggattttatgtaccagagaacacaccacttgttgttaatgcttatgctatgatgagagatcctggttcttgggaagatcccaatgagtttaagccagagaggtttctaggttcaggaaaagaagacgagagagagcacggacttaagtacattccttttggtagcggaaggagaggctgtcctggaataaatctagcttacattcttgttggaaccgcgattggagtgatggtacagtgctttgactggaaaatcaaaggaaataaggttaacatggaagaagctcgtggatcactggtattaaccatggctcatccacttaagtgcattccggttgctcgaacccagattcccagttgctaacactaagctcgggaaacgtaaaccaagtagtttgctttcttctgttagtcatgtttatcgtatcttttaatctgcagagtccgatttggtgacttattgttatctggaagatgggaatttgctttcctatgatgtgttcaacttcatttgttatgtttgaaagtctcacactttcaaataaaatagcagtagaaaatgacatgacacgatttgggactaatcaataaaagtctcctaattgtatcatttatcaccaaatcatgaacagtttgaaaataattattaaattgttcatgatgactaacctacatttaaatagtaatcaacaacaacattaaacttttttgagaatttttctataattgttttttcttgaactgcatcaactattatctctcacctaataacaataattgtttttaaaaaatacagaagaaaaaatcctataacggtcgtgtgaagtagatccgaatccaatgatcaatttgaaactttgaatagaaagaaagacaaaaggaaaggcaaacgaattttataattactctttttccctctctttcaaattttgaatctttcgtcgtctcccattttctcgatctcgcaagctgtgtcatttgagaagccatggcagacaatcgcatcgccggaagcttaccgacttcctccaaatggagttttcttcccaaatccgtatcctcacacttcaaaccaagctcaaaccctcgatcttccaatcccgacatcgaaaacgctcctcctcaaaatccaaacatccataatccgcgaaatcaatctgtttctagtaaatcaacggcttacaagaatcagatggattctcccaattgccgaagccaagtttcagcttctcgggtacttgaaagatcctactcttaaaattttcccattactctcatttgactgaattgtgatgtgaaattcatcttttttgtttggcgaattaaatatcagccaagggcaatatcggcattgaaaactcgaaatgaagtagaagaagaaggagcctcgaatccacatgtaaaggttggttgtttccatttttgtttgctcggatttaatgaaattaagagcctttgctttctttcctttttaaaatttggttacttggcctctctctggtctaattcatttttataggttgtggtgaggattaaaccaacaaaggagtattgctggaaagtgaagaaagtttccaaagtttcatattctgttagagatcgccattttacatttgattctgttcttgactcaaatctaaatcaggttcatctctctctctcacaaataatttggataagtttctattagggtgaagagaactaagttatcttctctttggttgtgttgttgccaggacgatgtatttcagcaaattggtgttcctttggttagggatgctttatcaggttacaacactagtgtgctatcatatggacaggtactgaataattatgtttttggagcttttgaaaccaaattttatagtcaccagacgatgttgaagttatgttctttaattggatcctttagaatggaagtgggaagacctacacaatgtggggtcctgctggttcgatgcttgaggatccatctcctaaaggcgagcaaggactcgcgcctcgaatctttcagatgctgttttctgaaatccagagagtaagttatgcttttgaatatataactcaagctttttgtttgattatgagagctatgatggatggttcatctaataagcatcaaacatttgccaattatttaggagaagatcaagtctggaggaaaagaagtaaattatcagtgccgttgttcttttcttgaggtgcctttgccaaaccatatgaaggattttatagacaaatcatgcttctaaaatttcctgagttagattgcttaatcttttcctgcagatatacaatggacaaatcagtgatttgatcgatcaaacccagagaaaccttaaggttaacttcactaatcaacagttttcttcccatatgttaatttttgttgagtgtaaacttatttgattgcttattgtgtcatatggcagataaaggatgacgcaaagaatggtatctatgtcgagaacttgactgaggaatacgtagatagctacgaggatgtagctcagatactgatgaaggtagcatgccatcttcatattattaaagtattaagtattctaagttacggatactatgtatattgtttcaataggtcttgaaaccgctagatgcttctgcataatgcacattcagcatcgttaatgaagtgtgcactctgttcatttcgtgactgattccaagtctatatctcatgctttggtatgcgttatgttctgcttttcagggcctttcaagcagaaaagttggagcaactagcacaagttttcaaagttctcgatcacacgtcatactttctttcattgtcgagtcttggaataaggtatagttattttttcgtctttcttgcatctttaacactgatgaacaactgatcaatatattctgtgcatagggagcctcgtcaagatgtttcaatactaccagaacaagtaggatcaaccttgttgatcttgctggagcgggaacaaatgaacgtgatgctactaaacactgcgtggaggaagagaagttcttgaagaagtctctgtcggagctcgggtataactttatgaactccctgtgttactttcatgtgtctcaactaagaaagtagcatccaaaatagggaacaaaaaaatcaacaacttcatgagtgattcgctaacactgtcatttttactattggtgcagccatgttgtaaattctctggcggaaaacgttcaccctggaatatccgaccgcagtcttcataaaacatcatgcttgacgcatttattgcaagaatctcttggtggaaattcaaaactcactatcctgtgcaacatttttccgagcgacaagtaattttcttcatcttgttatcatttattagttaaatataaacataacagcctgatggtaccaagtattaatattcaatcaatataatttgtatagagagataaggagtgcaaatctcaggtcttgctgagagaacaaagctcataacacttgagcatcttaatgacaggatgcccactatatgtactgatagagtttgtttgtgtaacacagagacacaaaaagaacaatgagcacccttagatttggtgaacgggctaaagccatgggaaacaaaccaatgataaatgagatctcagaagaagatgtgaatgatttgagtgaccagattcgtctgctaaaggtctcttcttccaccacaccgttcccattttttgtcttttggttgtcgaatttggatgtcatttaaatatcatttaccacttttttgcaggaagaactttcaaaagtcaaagccgatgcttgtcattctgttggaagtaaaaatgattatttcggagcaaagaatgcacgtgaaagtttgaatcaactaagagttagtcttaaccgctctttgatgctgccaaaaattgataatgacgaggaagagataacggttgatgaggatgattttaaggaactgcatctgcagatcaagtccttgcgtggttcatttaaccagaaactaaagaagttccctgtcaacagagactcggtcaactcatcctttgtaacagcattcggtgaatcagagctaatggatgatgatgagatatgttcagaagaagtagaagttgaggagaatgattttggtgaatctttggaagaacatgacagtgctgcaacagtatgtaaatcaagtgagaaatccaggatagaggaatttgtatcggaaaacagcatatcaatcagtccctgccgtcaatccttaatcttgcaagaacccatccagtcagagtcacctaaattcagagattctctacggaagagcatagctctttcttcgtcatgtctcaggaatcagaatagcttggcgaagagcataaaatccacgtgttttgcagagagccaacatatcagatcatctttacgcggaagcaagatattcacaggttctacagaatctctagctgcaagtctgcggagaggcttggatattattgacaatcccatgaaccctgcatcaaaccgatgctcagtttctttgtcttctgataacttgaccatgcaacctcccacagatgatcgattacctctgtcgccactctgtccaacctgcagaatttgcagctctaagttaccaagtgtagttgagggagtaagtatatgatatagcagatacaatatgttttaatagatttagtttttacagttatcctgaagctaacgttgctggatttattgttaatcaggatggatatcatatggaaggggttcttgagaagcagcaagagcttgaaaaattgtgctcagagcaagcagccaagattgaacagctaacgcgcctggtaacccaatttctatgtcttatgcctactgaaacttggatcagtacatatggttaagcagtctggttatatcatatcttcttaaggtagggcaacacaaacttcaaactgaggatgaaacagaaaaacttatgggagcaagtaatggagaacgacttccttctgcaaatgaaaaccaggttggttcttactttaatttactatgtgactactatagtgaagaaaatatgatagattgtaacataaatcccaactccatggttctgtagcttctcagctgtataactgaaacatatgacgtaaaacaaatctcggatgatgactccaagaagacagactttgatattggcgagaaggaggcattactcaaagaaattgaggatctgaaaaaaaaattgcagacgcctgtaaccatgtccaccaatgaactgagatcatctctgttggctcgttcgtttcaactccgtagcaagaatgctgaaaaagatatcgaggaagaaagacttaggtgcacagaaatggaaagcgagtggatatcattgactgacgaattcagagtagagattgaaactcaacgtacacgcgcagagaaagctgaagcccagcttaaacaagagaaactatcttctgaggagctagaagatgcacttcgcagagctgttcttggtcatgccaggtttgttgaacactacacagagctacaagagaagtacaacgacttatgctcaaagcataaagcaacagtggaatggataacagagttgaagaaggcagtagcaaaggctggtaaaaagggttgcggttctcgttttgctaaatcacttgcttctgagctctcagcacttagagtagaaagagaacgagaaagagatctgttgaagaaggaaaacataagcctcaagattcaactaaggaatactgctgaagctgttcatactgctggagaagttcttgttagactcagagaagccgaacaatcagcatcagctgctgaggtaaacaaatttttcatgttttaatcgatgaactgttggattgagactgtgacattgttttctgagtgactgtttggttgcaggaaaagttcaatgaagtagaagaagaaaacgagaagctaaagaagaaaatggaaaagttgaagaggagacacaagttggaagtggtaacaatcaaaaagagtctaaagcaaaacacgttgccagaatctgcattgcagccactgcatcagaggaactcggctattgaggaagaaggaatgtagaaacatcattataccaaagtgcataacttgaagacccttcttggatctgattggtatattatacacatctttattctgcttatttttcactttattgcttctaataaaattcaaatgtccttattccacaaggcatttttagttttttcccaattgaattatttgttctgctgtatttgatttgaatctcgtgtttgtggcgtgcaaactggtctctgtataactttaactttggtatttcattttaattttcttacatttaaaattgttatctttctttccaaactcaaattcttcttacaagatatatatattgttgatcatgtaatacaagagaaattctaatcaaaatagagtagactttaattatgggaatcctattttgccaaatcgacaatcttactctgtttttttttttttgtcaaggatcttactctgtttaaagttaactttttgttgtatatgtcaatttagttcaccaaaaaaaaaaaaaaaaactcatgttttgttatgcagtggtaaaagttttggaaagtttatgtgtttatatatagaatatttcttgtttatgaataattttctataattaagaaaataaatctctacattatcgaaagcaaaatatacggacatataagaaaggaaactagaatcataataccgaattataatcgaagttgttccattgtgtcatcgaagttgtgcttttagggaaaaacaagaatacagacagctctagaaaccaagaacaatgaagggtccttcagtggtaagaaattttctgtgttttctaatacttgtttctcgagatgttatctatatttttcttgatagccctctgattttgtaactttattaacagacatgtgtgtttggtgtgaacattggactcaaaggttatcaaaagatgttgaataaaatatatgaaggcattgaaggtaaaagaattttgagtctttaagatcttattattaattatctacacaagaattgagaagactaattaactctgtatacatattctgaaacacgagaggtttaaagctcgatgtgtcaaactggttggtgtatttacggggcgagattgatccaataaccttcattaggaagatgtataaagcaagaagttacgttgagctcttccgaatagattatggatatgaagaaaatccacaaggaacccggagaccaaattctcacttcatggttttatatctcacaacttttcactacttatacttattatcagtggtttttaaatctaaatatgtgtgtgtttggcttctgcagagatgttgctttgaactaaacacattagatataagttggtataagagaatcataggagccttgaaaaccatccaaggttcagaatttttctctaggtcatcaattaatctttggaaaaatgttatttttgttttgttttgattggtgggtttggtttcaggtgtatcatttaccatagatgcacaaccggttatgggaaatccgatggtatatttatgtgggaacatagaaattggagtgctcatgaagatgcttgtgaagacaggcattgaattgtcagcaatggaatatggagtcgagtataaagatgcaaacttgaacccacctcctcccaagaaagttgaggctccttcaattggaacagctgagacaaaggacgtgaaagacacggtgcctcctcctcttcctgaggttgttaaacaccaagtcgtatacaagaagtctcgcggtttaagaaggttcttttgttaatgaatcatgtcgtcattagcaccatattatcattttcttgcaaaaccaaataatggaccatgagaagaagaaccgttcgaaagaaaataaaaaatgaaaacaacgtcctactcctcatatatgtcatatgtgtgtgttattaatcaagtacctagttggtaaaccttcaagagtttttcaagaatgagataacaaatttgtgtgcattagtgttttcatattgttttttttttttcatactactgctctagttgttgatgctattatatgctaaacataaaaggcagagtgcatttaaagaaaagcatagaagcttatcgttacgttttacatatttgcctttataaatttatagatagtgtttaattgataagaacataatgttttttttatttatatataattaagcatcacatgttgagaagtaattacagaaacgtaaaacatttgacttcaatcacatgggatttgttcataaaactagatgaggagaattatgttttcttacaaaaattgttatcccgcaagccagctttcaaaaagctcccaacgttatcgaatcaattcatattacttacaacgagaaagaagctgttttgcttcgtattttacgtaattgaatatcttcaagaaatcaataaacgtgattattttgttaaataaaccctaaactcttcaactataaagatggtatatcagtgttccaaggtaaaaggatcaaaccaaacccaaagatggaaaatcgagaagtttttgtttacattgtcatctccatcttccgctctctccaattcttgttttggagattccgtccacgttacaatgatgttacgtctgcgttgacccgccctctgacttcggccgcaagctatgattttaagttcatgtcgtatatggtcaataaggctaagtccgtcaataaagcactagaagaggctgttcctctccgcgagccagaactcaagatccgtgaggccatgaggtacacgcttctctccgatgggaagcgtgtaagaccaatgctttgcttagctgcatgcgagctcgtggggggacaagagtcaaccgcaatgtccgctgcatgtgcgattgagatgctccacgcgtcgtctctcatcctagacgacctcccttgtatggacaacgacagcctccgacgtggaaaacccactaaccatatagtctttggcgagagtatagccatattagcttctcaagcgctcatagctttggctgtccaaaagaccacgtcatccacctttgcggacgttcccccagagaggattctcaagaccgttcaggagatggttaaagcagtggaagggcttgttgcaggtcaacaggcggatttggctggagaaggtatgagatttgatagtgacactggattagagcatcttgagtttatacatattcataaaacggcggcgttgcttgaagccgcagctgttatgggagctataatgggaggtgggtctgatgaagagattgagaggcttcggagttacgcaagatgtattgggttaatgtttcaggttgtggacgatgtgcttgatgtgaccaaatcgtcggaagagctcgggaaaaccgccggtaaagatttgatcgccggaaaactgacgtatccgagactgatgggagtggagaaatcgaaagaatatgctgagagattgaacatagaagcgcgggaacatcttctagggtttgatatagacaaggtggctcctttggtgtctctcgctgattacattgtcaacagacaaaactgacactattgctcaaaagcttaataacaaaatttgtgtctactgtctagtgacaatattaaaacttggatatgtaaacaaaacacaggaggcccatacacaaatttaggcctggttctacttaacggctcaacggccttcacttgttttcctttggataaataaaagttggggtttccataaatttgtcttattcatttggcatgcaattctaaaaatagtacattagtaatgatacaaaagtactgcttgagttgttttgatacaaatagtaatgatacaaaaactaattagtctcatgtttgataagaaaaattgagataattaatttagtggttttatgaaggtaaagctcacatgttaagtagtaaatgcatcggtaaacattttttttttttttttataaccaggaggttcggggccgagacccttaatcccttcaggatccgggccgggaatactaggtgaaagcccctgaccaaatagaaataactagtaatttcacgcctaaggggaatcgatccctgacctggaccaacagggcaattcttcctcaagtggaaaccattagactaccaccacttggttcatccgtaaacatttgcttagactagtttaaacaagagactaatgagatttgtttttccgttattataataatgttagcgtgtcatggccaaaggcttcgtaaacgctcccaacgtgccgcgcgttatactataaatgactccacatgatagtaatatagtataacaacttacaacgagagtaagttgttttcattgtgtgttacgtaattcgattgcttcaaaaattaataaatgtcaagtatttatatcattttctaagttttttgacaggagttacaagaaaataagtagcggaaaaataaatttacaaaaaacacagacataaataaatagtaatggaggaaaacgttaaccaaaagcggaaataagagaagaaacaccgattccgaaaagctaaacttggaaatttgcatgatttccacaactcgaagataccaaaaagttagagtctcatcctatttgctacgagcaaacctttgcagaagcccgtcttcaaaacttctcgataaaatgtgtacagcttctttgcaaactaacgcaaaaacgcaaaaacaactatagggctaacacacaaattcgacagttacagaagcatctacgggtaaccaaagaaaccaccttcggccaccattcgtatcacaacaataggaaccatctctcatagataagcgatgcctcgaaaaccaacatgccgcctctattattccgtaaagactccactccaacatgacgcacaacatcactgttgtctaagcacaaaacaaccacatcaaaagaaaccacaaactccaacttcaagcaaaacggatgaagaaaggaggtggcttcacgaagagcagaaaaaaaaaaacagaactccgactgacgaaactcacaccatcactagcccaaaaacagaggggagtccctgaccacccaaaaacctagtcaccacccaaagatacaatttgagtcgagttaattcggtacattaaaatccttataaaccgggtaaccgaaaatcgtctccttcagtgtctagggctggtcaaatctgacgtggcatatttcaatatttcattctgttgtgcttgtagatgttgaatctccattttcgtcttcttttcgagtatttcgtgctactactctcttgataattcgaagctttttcgttatctccagaaatgggttcttcagaaacggaaagtgaaagcagaggttttcaaaacccagattgggaaacagagtttaaccgattcgaaaacgcgatttcgtctggttctgcttcaattcgtgtaagatccgttttaaagttatcagatttgacgaatcgagtacctgagagctatatatcccgtgcaattccgattctcgccggtcttcttcgtgtctcagacgactccaatcgttccgttcaagctgccgccgctcattgcttgaaatgtattacctgttgcggcggtgaagaaagtggatttgcggtgacgatggggaggtgtggtgtgattgctagcttattagggttgttacttgaagcgaatacggatggtaatgtgtttcgaaggatttgggtgaaatgtttgtggagcttagttacttttggatcttcgattcgagttggtttggctaggttaggtggtttagagattgtgattcgtgagttgaataattgggaagatgatggaagtagatggtacttgttagagatccttagtgctttgacgacgattagagagagcagacgcgttcttgttcattcaggtgggcttaagtttcttgtagaagctgctaaagttgggaacttggcctcaagagagagagcttgtcatgctatcggactgatcggtgttactagacgagctcggcgaatactggttgaagcaggagtgattccagcacttgtggatctgtatcgagatggggatgataaggcaaagcttttagctggtaatgccttagggatcatatctgctcagactgagtacattaggcctgtcactgaagctggttccattcctttgtatgtcgagcttctctcgggacaagatcccatggggaaagatattgcagaggatgtgttctgtatattagctgtagctgaaggtaatgctgttttgatagcggaacaactggtgaggatcttgagagcaggggataacgaagccaagcttgcagcttctgatgtgttatgggatcttgcgggttataggcattctgtatctgttattagagggtctggcgcaattcctttgcttattgagcttctgagagatgggtcacttgagttcagagagaggatttctggagctatttctcagttgagttacaatgagaacgaccgtgaggccttttctgattccggtatgataccgattctgattgaatggttgggggatgagtcggaagagctcagggataacgcagctgaggcacttattaatttttctgaagaccaagagcattatgctagagtgcgtgaggcaataggccatcctgtgtttcagagtatgcagagcagactggctagaatccgagcttcccatgaactgatggttcgatcaatgcgaagggttacaatccaacatcttgcccatgaccatgatcttccatgatctgaagggcaaattaagcttcccatctgttttgatgtatgtttataatctgacttggaaaaagaaaagactcaattgctgtttgatttctgcaatttgtatttgatacgtttgtatacatgtactaaaagatttctgactttgaatggaaatggtatctacatggttagtcttcttttacataactaagcacccagtggttggaccataagaatcatgcactattctataaacctcaggccttggctgctcattgctaaccacaggacattgagctatgcagcaatgcggtgtaatagacttctcttcgacctgtggcttcttcacttcttcaagagtctcaagagtgacatgacatgctttcttccttaaggccataatcaaagaagctgaatccactccatctccaacaaccacaagctcatcctgaaattctccttccatggccactgaagttacacctgcgttgccagatacagatgtattaaagtttcattttttttaaccataagaaaaccactctcgatcggttcaaaacattaaatctgttttaacactaaccatctgcagcaactgctacttgcattgccttcttcctgcatttttcactattcactgacagtttgatacgcatcttttgctgcaaattgctccaacaaagaccaatgattcgaaaaaagaaacagatcgagaaacaagacatccatgattatcgaaataaaaatgaagagcctttaagcaacaagaaaaattagcaccttcattgtcctgacgaagctttgtctctctataaagaagttgctttttaagaatcgaagccaaacttcctcagatatgagttaagagaaccaaaccctaattattctccgttttgtacggatttcaaaagcgaagaagcttctacacactgagtttcagaactgtaaacttcgccagaaaaagacagagagagagaaatttcttcttgaccgaatcagacaccaactgagactccaatttcttgtcttttgtgctcggtccttttgattcactcaaacaagaagaagaaaaacaaatgggaagagaagaagaaattaagttgttctgtgaatgggtttcactgttacatgctttttaacttgatacacaaggtcgcccatttccctgacagatttgccaatgtttcccagtgtttaattaccactgtgccattgagtttttgtcttctttgaaaaatctgtcccattgtgtatcatatgctgtcccccgtacaagacttataaccagttttccactcttacgtcaatattagtagtagtagttttacatatatttttgttatggaaatgcatcttaattactaacttaattaggcttatttttccacaatttaatttagtttaatttttataataaggattgtgtgttaggccaagatttagttagaacaaatgggaagtaaatgaaaagacaaatcacaacaacaaggattgtataactaaaaaaccataaaagaatggaatggccaccctaagatctctctaaaatctaaacaatttgtagacaacacataggcaaacaaaaaccaaatcttgcatattgacacattgttgggttttgtctattcttggtgggttttgttctctctctttctgttcatacgttttttttttctcttctctggaaggcaggaaagagaaaaagaaaagttatttagcgaaaaaaaaaaaagaaaaagaaaagttcattgggatcgaaaagaggtaagattgttcttgaagaatcgattctatagagcgtgttagcttcaatgctaacttgggagaccccagttatgcttgcaagcaacaccgcctcaaccaaaaagctagccttcattaccacctttctcatcattgtgttatgtccggtcacaatggtcatgtctcagccgcaggcggatgttttgccactgccagcctcagacgcagattgcctcttgagatttaaagatactttggttaatgcatcgttcattagcagttgggatccttccatctccccgtgtaagcgaaactcagagaattggttcggtgttctctgtgttaccggtaatgtttggggcctacaactcgaaggaatgggcttaaccgggaagcttgaccttgaaccattagctgcaatcaagaatctacgaaccttgagcttcatgaacaacaaatttaacggttcaatgccatctgtcaagaattttggtgcgttgaaatcattgtacttgtctaacaaccggtttacaggggagatacccgcggatgcgtttgatggtatgcatcatttgaagaagcttctgttggctaacaacgcgtttcgagggagtatcccttcttctttagcttatttgccaatgcttttagagttgaggctaaatgggaatcagtttcatggggaaataccttattttaaacaaaaggaccttaagttggctagcttcgaaaacaatgacctcgagggacctataccggaaagccttagcaacatggatcctgtctccttttcaggtaattaaacaaacagttcaagtacatctgcaaatgtttggtaaactataggagttcttatgtaaaaacagaatctttcttgctttgttgacattgcagggaacaagaacttgtgtggtcctccactaagcccatgttcgagtgattcaggatcttctccggatctcccttctagtcccacggaaaagaacaagaaccaatctttcttcatcattgcaattgttctgattgtcattgggataatactgatgatcatttcgcttgtggtctgtatccttcataccagaagacgcaagagtttgtcggcttatccatccgcgggtcaggacaggacagagaaatacaactacgatcaatctacggacaaggataaagctgcagattctgtaacgagttacactagtagaagaggagcagtaccggatcagaataaactcttgtttttgcaagatgacattcaaagatttgaccttcaagatcttcttagagcctctgctgaagttcttgggagcggaagctttggctcttcttataaaactgggataaatagcggacagatgctggtcgtgaagaggtataaacatatgaacaatgttggaagagatgagtttcatgagcatatgagacggttagggagattgaaacatccgaatctgttgcctattgtggcttactattaccgcagagaagagaagctcttgatcgctgagttcatgccaaatcgtagcttggcaagccatcttcacggtatgtaacattcaacttttttggtcgattaaaattgtaactttatcagttttgactaaaaaaatgctctgtttcagcgaatcattctgtggatcaaccgggattggattggccaacaaggctaaagattatacaaggagtggctaagggtttaggttacttgttcaacgagctaacaaccctaacaatccctcacggtcatctcaagtcatcgaacgttgtattggacgaatcatttgagccactcctaaccgattatgcactaagaccagtgatgaactcagagcagtctcacaatctaatgatctcttataaatcaccagagtatagcttaaagggacatctaactaaaaagacagatgtttggtgcctgggggtattgatcttggagcttttaacaggtaggtttccggagaattatctaagccaagggtacgatgctaacatgagcctcgtaacttgggtgagcaacatggttaaggagaagaaaacaggtgacgtgtttgacaaggaaatgactgggaagaaaaactgcaaagcagagatgctaaaccttttgaaaatcgggttgagttgttgcgaagaagatgaagaaaggaggatggagatgagagatgctgtggagaagatagagaggttaaaagaaggagagtttgacaatgatttcgcatcgacgacacataatgtctttgcttctcggttgatagacgacgatgactttggtttcgccatgaatcgatgatgaaactgatcagtcttctccagaacaatggaaaaagctaaacaatttgtaatctttgatgccaaataaaaagaagaactttctttttcttctttgttatgtaactttttccattcttataaatcattctcttcgtgtaattgtaaatccattttgcagagttttgaaaattttactcatttcttattttcaagtacaagaatcaaatccatgcaaaaagtaatgaatccatgcgtagtgacaacatagcttgagatcgaaatactcaaattgcattgtatgtggatgaaaagtttccaacttcaaaaaaagtttggaacttttttctcgagaattgtattttagggctaaaaattgaatttttggggataaactaattactatggcggagaattcgcggctacgagagctacggagacacagatgatgaaagagagaaagagagagagagagagagagaatgtgaggttaaaattatccattgttgttcttcagtgcaccactgaatcgaagttttctaatttggagaaagaggatttctcaaaacccctaatttaggaagaccgcagatttctttagtattgagaatgagattctccgagaagatggattagtgaatcgagaggttgatatcgttaaatgcggggattttgcaatctagggttcttaagcattgtaatcgatgaaggctcaaaagggaagctcgaagaagaaaggtacgaattctgggttagtcgctgtagcagtggataacaataaaggaagccaacatgctctcaaatgggctgctgatcatcttgtctctaaaggacaaaccattatcctcctccatgttatccttaggtcatcctctgattcaggtctgagcttatgacaaaacctgtttttgttctttttgttgttttgattttttggattctggatatacttaaatgttgtggtgttatgggtttgcttgcaggtgagattactgcagagaaacataagcaagctgaaaatctttttgtgacatttcattgctactgcagtcgaaaagaggtaatatctcttgtcctcgcttgctttgtttctaaagtgaatctatgttatagcatagcttttggtaattgaatgcattgttctttactctctgttgctagatacaatgccttgatgtcacgcttgaggatgacaacattgtcaagtcccttgcggaatatgtttcctctggtgtgattgagaatttgattcttggtgctccttcgaggcatggattcatgaggtagtaatatgaatctcttctctcctataagtttgaatcctcttccttgttttatccttatgtgtttctttgattcaatctgttgacaggaaatttaagatttctgatacaccgagcaatgtagcgaaagcagcacctgatttctgtacagtttacgttatttcaaaagggaagatatcatctgtccgccatgcctcacgagctgctccatatcggtctccgcttatgggtcagattgaaaaccactctgaaatcataaactacgaaaagttcagaaacaccatgagctttagaggtaaaatcattaactagtttttttaggctaaaccatgtgacaccacacacatcttgaatttttttctttcgttggtacaaacagatagggctcctcccaggtcttcgactgctagctccattgaagattatggaaagtaatgtttcatgaggatatttttcgtctttgacaaaaaactgattcgttttgaaggaagatacttatcgctctttctttcgcggtaatatcgtcaacaggtcacctatggcaaggacgtcaaattacgcaaactcattctttgatttggaagattccgaaaacgacatatcatttgtttgctcaggcaggccaagtaccgcaagctcaggccggccaagtacaagtaccggaaggtctgacatatcttttgtgagctcaggcaggccgagtacaagcaccactggaagcccttccttcatctacgattttcctgattctggtttaactccgagagagtcgacgagctctggacactctatgcgtctaggaatcaggttcaatgacacaaatatccaacatgatttctcattcgtctcacaagatagcggtcggtcatcttgttcttgttcaccacaaaacttggtaagatgcgtttgattggttatagatagcaatacatatgttttcgggaatggtttactatatatttttcttgaaaaatgtataggaagaagtggaagctgagatgcggagattgaagcaggaactgaaacacgcaattgacatgtatggatcagcttgcagagaagcactagctgcaaagcaagaggtaaaacgatataagacgaaaccgtccctgtgtatatatattcttgtacagtgctgactgaaagaaattttacttatggatcaaaggcgaaggagctccaacgtcagaaaattgaagaggaagggtgggtgcaagaaggacagttatcagagaaatctacaaagtccatagtggaaaaagagagagcacataaagctgcgaaggatgcttctgaaacagcaggcaagatagcagagctcgaaacacaaagaagagctatagaagctgcaggttctttctctgattccagtttaaggtatcgaaggtatgtcattggtgagattgaagaagccacaaactcattcgacaaggctaataaaataggcgaaggcgggtatggtcctgtctataagggttatcttgatcatacccctgttgctattaaggctttgaaagcagatgcagttcaaggaagatctcaatttcaaagagaggtaagttcacttaaaaatcctatacttctcaaatctaaatagaaatcagactttaacttaggtgtggactgactattgagtattgagcattgttataggtagaagttcttagctgcataagacacccacacatggtactactaattggagcatgtccagagtatggagtgcttgtatatgagtatatggccaaagggagtttagctgataggctctataagtatggaaacacaccaccactctcgtgggagctcaggttccgaattgcagccgaagttgcgacgggtctgctcttcctacaccagacgaaacccgagcctatagtgcaccgtgatcttaaacccggaaacattttgattgaccagaactacgtaagcaaaataggggacgttggattagccaaactagtgcctgcagttgctgaaaacgtcacgcagtgccacgtgtcatcaaccgctgggactttctgttacattgaccctgagtaccaacaaactggaatgctaggtgtgaaatctgatgtctactcttttggtatcttgcttctcgaactgctcacagcgaaaaggccgacgggtttggcttataccgttgagcaagcaatggagcaagggaaattcaaggatatgttagacccagcagtgcctaactggccggtggaagaagctatgtctttggcaaagattgctcttaaatgtgcacagctgagaaggaaagaccgaccagacctcggaaaagaggttttaccagagctcaataaattgagagctcgtgcagatacgaatatggaatggatgatgttcaacttaagtagaggtcgtctaacaccaaatcatagccaagtgtccttgccaccagttgtaagtaatgaaaaagctctttgcaattctagtctttaagttaaaatctttgaaatgctttggttgcaggatgaactaagtgtatgctcggataagtcttatacacattcaagcactgtatccgacacagagaagaactcaggtgcattagagaaccatattttttccatcttctttaacatttttacaatgtgtttgatccatcaaatcttacagtttactctgtttcttttccagaccaaaacgaagaggattagcatattttgtgtgttgaaggaaatggagtgagaccattgttaaagcttatgtaattgtgaatattgttgtatgtatgtatgtatataattcgtaaaggaagaaaataactgaaggaaaaagttgagtaggtttgttataatatctctgcaaagacgcaaactctttttttgatatgtaagacaaaatatatagaccacataattcgcaccctaattctaagaaacttctaaattgagaaattggttcatcgatttcagtggaaagtggtacttagctaaattgagaaaggtgcctcaatttcagtagaacctgacgcaaaatttcgcgatcatgcatgactcaaattggtttattcacttaaataaaaaagttgtttccctatctagttgaagttctcaattcaaacgcaacttcttactttttctttttatttatactggaatgaatttttcgtcaatgctagacctcaatatttggtgattaagtccaaaaaattatagcaatattcattagttaaatcataataatatttgttatttctgctaaatatattagttttaaattggtaaatatatcagtcatcatactttatatatgtgcacaagaaaaagaggaaaaaaaactaacttttaataaattgaacgctatcctctatatctcgtcctggtccaaatgtaaacttcaatatccttttgattttattgctgattgctttaaaaaatttcacaaacacttttatcattcttttattccaccaaaatctacagacataatactttgtaattttatgtaaaaatcttcaaaatttgggaaaagaaaaatcatttaaaatcaatttgcattaactggatttatttccaaaggtgtggtattgtgtttatatatgtggagttgttggctagtaatataataaggaaaagagtgaaacatatgtagtataacgtatttctagtttttttctctgtattaatgaatcactaattaagtagtatgcattaattgaattatcagaagctggtcacaaaagtctaccaaaaaaaacaaaaaaattggtcagaagaaaatgaaaataatgagaataaaaaagggaaaaaaaataagaagctagcaaacaaagcaattaacatttcaaggcagttaattcatcatgcaaggtgcttatgtgtgacaacgtcatgcgttactttttgcgtctacactcatctctctaacgcaatccactaattctggtaatggattctgctatttagaccagccagtttcttcgtctctcaatcatcatccaaaaacattcttctcacaagaatcagattcaagatagaagtttttcaaacaatgtctagtcctcttggtcactttcagattcttgtttttcttcatgctttgcttatcttctcagctgagtcccgcaaaacccaattgctgaacgataatgatgttgaatctagcgacaagagtgcaaaaggcacacgatgggctgttttagttgctggatcaaatgaatattataactacaggcatcaggttgttaaattatgtttgaacgtttaacataacaaaaaaaaaaaaggtccaagcgagatttgtatgaactaaatcgaccgacgttttatttcacaggctgacatatgccacgcgtatcagatactccgaaaaggcggtttaaaagatgaaaacatcattgtgtttatgtatgatgatatcgcgttttcctcggagaatcctaggcctggagttatcattaataaaccagatggagaagatgtttataaaggagttcctaaggttcttatttctacttcttttgtgcgttatttctacgttgaattcaattacatatatatattcaagttttgttgttattggttgggtaggactacactaaagaagctgttaatgttcaaaacttctacaatgtgttacttggaaatgaaagtggcgtcacaggaggaaatggcaaagttgtgaaaagtggtcctaatgataatatcttcatctattatgctgaccatggagctcctggcttaataggttttcttaattttatgaaattattacgtaccatcaatccatatctataataaaagattttctcttgatactacgaaaccgcgattttctcagcgatgcccactggtgatgaagttatggcaaaagatttcaatgaagtcttggagaagatgcataagagaaaaaaatacaacaagatggtatataactcaaccattcgttacctagctttatacatatgtgttctgtttttgaatctctatggtgtgtttttttggatgtttaggtgatctatgttgaagcatgtgaatcaggaagtatgtttgaagggattttaaagaaaaatctcaacatatacgcagtgactgctgctaattctaaagagagcagctggggagtttactgtcctgagtcatatcctcctcctccttctgagattggaacttgtctcggcgatacatttagcatctcttggcttgaggacaggtactgcaaacaaaaaagattcaatccttatggactattcgaatgatttgatttgttcttgaagaatatttgttcatttgttctatgttttgtgtgtgtttggggacagtgaccttcatgacatgagcaaagagactttggagcaacaataccacgttgtaaagagaagagtaggatctgatgtaccagagacttctcatgtatgccgtttcggaacagagaagatgcttaaagattatctttcctcttacattggaagaaatcctgaaaacgataacttcactttcacggaatccttttcctcaccaatctctaattctggcttggtcaatccgcgcgatattcctctgctatacctccagagaaaggtgagcttttttcgggttttttgatcattttaaacgaaagagttttcagcatgttttaatgtttattcatctcttagattcaaaaagctccaatgggatcacttgaaagcaaagaagctcagaagaaattgcttgacgaaaagaatcataggaaacaaatcgatcagagcattacagacattctgcggctttcagttaaacaaaccaatgtcttaaatctcttaacttccacaagaacaacaggacagcctcttgtagacgattgggattgcttcaagactctagtaacaaaccacatctcaaaccttgttacttgtgttctacgcaacaaccattgcattattactaaaccagtgtatatcgaatgaaaatcgcaggttaatagcttcaagaatcactgcggtgcaacggtgcattacggattgaagtatacaggagcgcttgccaatatctgcaatatgggagtggatgtgaagcaaactgtttcagccattgaacaagcttgttcgatgtaatgatttgcaaaacaatgtgatattcgactttaaaaatatcaaagttaatttcaataaaactcgatgtagagatggttggttcatgatactacttttacatgaaaagctttttaatcgatgataacgcgaaagtcttggtctaaatttgtgaattggattcatggaacaataacctcgtaccaactgtacggtacggacggctgtactttggttgagttacccaataatagtcttcttccaataacttgttgaccacgaaaacaatagacatataaaaggcagacagatcatttaaatcaaacaaggaaaaataagaaacaagaacaactagggtttgattaacctagcttgttttttatttaaagttctatgaagataacaactttcatcataagatctttatcgttgttatctatgatctatcaaatgcaaagtcttttgacattgatagatatataaatgattccttttgaacttttctcaagacaccattccgcttgatttttttgatatctttctttctattcaacaaaaatgatttcgctaagtttcatcgtgcgtctagcaaaccaggagaacagacgaaacagaaggtacgaaactaacattaaggatcgtcttgtctcgggggagttatcggacggtagcagaccagccagagatcaaaacggtgtcccgagaggacatcttgcggtctatgtggggcgcgaagagaggcaaaggtttgtgataccgaccaagtatcttcaatatcctgaatttaggagtttgatggatgaagtagcggacgagtttgggtacgatcatgaaggagggattcatattccttgtgaagaaagtgtttttgaagagattttgattagatacatgtcttgtgacaagaagaaataagtgtacatacaatacaaatatatataagcatttttaaaatatttctactccttcgtattctttctccccattggcatttcatggaacacctagtaagcaactctgtcttcttgaaccattctctaccaacgatttctcctctgctctgcataggtatcaaaacaagatacagagcttcttggtaatgaaaatgctaagtcatttattctaagagagaatgaatcaaggaacaaaaataatgccatgttccttaatagtatcgattacaatccctagcttcccttcaattctttctccctttcttggctcataagagacagcatagacgtctgcttccattgaacgctcagctatgagcttaccgatgagtctacacgcttcgttatcaacaagagacggtatattagtccttatatctctagcatttgtggtggcaactgaaatgactttgcttgttggcctatgcatcactttagcgtgtatgaatttcctggagaagaacacattcagaaggaaaggcctcatgtacatgtccgttctctgtttccatgacttcctgttgggtcttttcgctgcttcacctcgtgatcttcgagtccacgcagcttgcacaaaagaatcctacagcaatccatcaaccaaaacttttctatagcaaaaataactcttattaacggtgactggaatactaagacaagactcaagagtgtattctgaatcattaggtgctatttagaagaaaaaatcgaatcttgaaatacccaaccgataaagagataagctttgaagataatcactcgcaagcctaaatggcaaattgaacttccgtgagaagaaacacaaatcatgaaaaaagaaaaccacatttttattcacattaagagtttctagtttcatgttcataaagattcactagaagaagcctagatttttactttaaaccacaaattacaattgcctaaatctgaacaacgagctcaaacatataagaacacactaagctaaaaaaaatcagacaagcacaatactatacgcgcaagagaaagtacgaaacaacctcagagattgtgcatggactacgaaagtagacggctttaccttcttgacaatgggggatgagataacagagccgatttcgatggagagtttaggaaaggaagattgccatgaaactgcagaacccagtttggtgaaacgattcgaacgagtcagattcgagtcgaaggggacgagtgagcaagttgatgaaatcaagcaagacatcttcgtcgagcttgaagagtgagaaagaaagctctcggagtgggagaaagtaaactaatcggatagggctcggccgctaacccaggaccggctgattggaccagttaaaatcggttatttaaaaacctgagaaaattggtgaaccggatcgaatcgtcaaccccaaacgcccggttacgagttataaagatattttggagaaataaagggccaaaaacgagcgttttgattccataagtggggttgtaaataaattactagaaaattgttaaaataaaataaaaattgggagaaacacataaaccctaaaaagcttaaatctttcttcccataaattattagtttatactcttctaggtctctctgttcacaatctgatggaagtttgtttttttctttgttttctaattatgttttaattgaatattctctgttgcccttttttgaatctcttgttctgtctctctgataaaatctttgaaagaacaaacggagacagagagtgagagaaaatggcaatggttgttccaaaagaagggcttgtggttatggacaaggaatctgtttcttcagcttcatcggattctcatcttcgtctccaacctcactttcctgacttcactattcctgttaaagtcagttccttttctttttgttctttctggtccagtctctctctgcttttatgagtatatttgaatttgtggagttttaacattctggattatgttttggtaatggtattatgttgtttggatatgcatgagataagggtctgctacttgattgaatgattttatagaaccattgtgtgatattttctctctgttatgtttgattcaggatttcttcaagtctagggaagcccgtgagtttcttagtggggctttagctggagctatgaccaaagctgttcttgctccacttgagactataaggtctgtatagtcccttgtgatctcctcaataatacactttgatgtctaaaatttaactaaaaattgcattgtgcggtgtgaaatctggcaggacaagaatgattgttggtgttggatcgagaagcattccaggtagttttctggaagttgtacagaagcaagggtggcaaggtctttgggctggcaatgaaatcaatatgattcgaatcattccaacgcaagcaattgagttagggacattcgagtgggtaaaacgtgcaatgacatcagctcaagtgaagttgaagaagattgaggacgccaagattgaaatcggtgattttagtttcagtccgtccatatcgtggatctctcctgttgctgtggctggtgcatctgctggtattgccagtacacttgtttgccatcctctcgaagtcctcaaggtaatgtcttagtcaatcaaagtctgttttataacgctattgaatttttttagtctagagttgaaagagagtgatgttctctgatctttaccaggatagattgactgtgagccctgagatttatccaagcttaagccttgcaattccaagaatttttagagccgatggaatccgtggattttacgctggcttaggaccaacattggtcgggatgcttccttacagcacatgttattacttcatgtatgacaaaatgaagacctcatactgcaaatccaagaacaaaaaggctttaagccgtccagagatgcttgttcttggagctttagctggtaagtaattgaagaaaccactccctttacagtatttccttacttaaatcatgtttaagactcattgagttgtgactggggtcaggtctaacggcgagcaccataagcttccccttggaagtagcgcggaagcggttgatggttggagctctgaagggagaatgcccaccaaacatggctgcagcaatagcagaagtagtgaagaaagaaggagtgatgggactctacagaggatggggagcaagttgtttgaaagtcatgccatcttcaggcattacttgggtcttctatgaagcctggaaagatattttgcttgccgccaacaccaaaccactcatataatgacgaaattgtaacctaagttattattgtttctttaaagctaaagcctgtcatcacatttctaagttatgatttagggaatgtggtggcttggacatgagatgtttttttggcacctgggagtgttatgattcccatgagaagtagaagatgagttttttttaattcttgaggctaattctctgtgttcttctcgtcaaaacaaagaagtaagaagcaaatcaaattattaatcacagatcatgtccacaccatatacatattgtaataccatcacacttccattcatagatacaagcatatatacataagcattttcaaatacatatttgtctaagtcaaacattgtacaaatctgcaacccaaaagaaaatcttctgtctaaccttctgttccctcttctgagacttcactctctgtaacaataacatattagaacgttcagatttctttagcagagtcatattgacaactcaagttttagttttagagaaaagtaccttcaccaaacagttgttcgaatcgggctactatgtgtttcccgtatgtgtatttccgcaaactttggagatgaattttcatcctctgcaccagaatctccctttgctgatctttactgatctccaagactttctggaccacgtaatttgcaaactgatccttcatcatcgcctgcagaacaaaagagtgttaaaataagtccaggaggattcaaagagctatctttaggattttgttcttactagcaagtgattgtcttcctcggatttgcccattatctcttcaatcaggaactctctttcggtactatcagcgtgttccaaacacttctctacaacgttagatgcgtatttgtgctgactcatctgaacaacattccctgtcaacttctcaatgatctgtctcctttcatcgggcttccctctctccaggacatgctacaagaaaaacataagccaaagcacaatattaagaacaaaaagatttcaagacaattccaagagggacaatggatccgagattaaccagacctgagtgacataattcccatactgatcatgagcaagagcaaacgcagattccaatatttcatctattatacaatgagtctcctcatcatctgagcaatgctccaagattctctataacaaagcagacaggaaaataatgaatatttcaagttcagagtacaagaggagacagagctcgctcttttccaattacctggataactcggcatccataaggatgagtagaaagagtggcgacttgaccacggaaagcagcaattacgaatccaatcctaccagcaggcatactctcgatacatttttggataacatgatttccgttttgatctctaacacacttcagcacattcccatcgagctcacgaattagttctgtcttttggtcaacatctatcacttcaagggcctataaatatcataaggtacaaacaagcacatggaaacttaactacaatttacttcaagatactgacattgatataaggaaagtaaaattaataaatttaccttttgtatcacacggcatccatacatttgtaagcttagtgaaaccatctgaccagcaagttgcttcacaagttcttctctctgtgccggagttccatgttctatgaactgattcaaaaatcacaatgtattttatggacaagatcttttcagcttagaaaaaaagaagaagaaaaagtggctcactttttggatgacataatttccaaaaacgtcagtcatcaattttgaagcttgtggaagaacctcactgaaaacagatgccttctcctcatcggagcagtgctccaacttctgttgaataaaccggctgccatgctgatcgacgctgaagttcagaaaaatgagtagtaaattaagattactatgacatcatttcttttgaacctttcaaaacactacttcagaattaaagaaaatgatagattcggagcagaaacactgcctgaattcaacaacacgccctgcaatatcagaaagctcgagtttccgagcatttggagacttaagttcatcaagaaaagaatgtctttttagatcatcaacgatgctgctggctccccctctgttcccttgccatccaccagggtagatcccagtgtttctacttggcccttgttgatgataccttgtttcacttcgtcttccaaagtggctcatcattccaccaaccggtgaggatggcatcaccggactagcaagaggtgatcctggatactgcggcattactcttacaccaggcggcactgcaaaatagtttcccatgtgccgcggactttgcaacccgtaacccggactcaatggactgttgagaggttcatgatttgccatatagccaacagcttgttggtctttctgcccaaaagaatcagtgctgctctgaaacggaggagcatacgcgtccacttgagcctgttgaaaatattgcaactgaaaaggatccacaagagaaggaatgttttgtccactcgatgatactccaggcaggagccgagggttgttgtagcccgaagaagtagatgagatatcatatggcataggaacagtcgcttcatgagatgggtatccactcatatattgagggacaataccagaagcaggagggtaaccaccataattatattgcgggacgaacatacccgaggactgaaagttttgatggtaaaatggactcagagatgtcatatatgctgctgttgatgtatacataggaggcggtgccaaaccgtgaggagattggaaagtcgaatgtacctcgccagttgcaatctttggtaagctctgcatcatgtcctgtgtaccacctatcctcggatagctcatttgctgtggcgaactagcttgaacctgatacgatgaaggtgtgtattgtggaggcattctccttccctgagattgttggtcttcttggttcctcctcattcttgaagcaacagaggatggaggagaagcaccaaaaacagatagattgttgtcctcatggctcgcttgcctcgcgttcaatctctctgtctgtgcattagtaaaactttgtgaggccaaatcagtggtaaagggatcttcactagcaatagcatcgctggagagagaatctgtctccctcagcagattaaccgaatttatatcggactccggtaatcttcttgcgtgttctgaagatgtatcagaggaaatggcatggatgtcttgtgctattggacgatttcctgccgaatgaggccgcttgaacacagaagaaagtgtaagagggaaatcttcctttatgtaaaatgaattaatattttagtaataaaataaggaaccatgtacctgaatcatatcagctatgctcttacgacgaccagccaaagaagcataagattgttgttcacccgatgatgcctcatcctcgggctcctctctatgagttgaaagagcagttctagaagaatgcaaagatgatcttatccccatattatcccaagaagttgttggactctgattattatcaccaaaatgacgcaacaagtgctgattctcccgtgagattaacggaggagggagtctcggattcaagttgatgttcgacaaatagtaagctacataagcaggatcactacgtatctcttcttccgagtcataattctcaatagccctacttaaaacttcagagctactaccttcttgttgtttcaagagattcctaagagctgcaaaggaaccttccatgctaggcggcgcgctttcgcttctactagggaatttaccggtttgatcaccactatccaacctatttcttttcataaggaatcctaaatcttcaacagccatatcaagtgaaccaaagatcccactatcactagaagcctgccaattttttatatgatcaccctcaaccattctcatagcgctctgcgtagtcgtcatacttctattataatcaagtttctatatatcatacaaagtaaatttcacaacacctgacacatagagcaaaaccttagtccataagagaacaaaaagctaagaactttaagatatggtcccaaatttcattaatcacaagaacaaaaaaacaagtaatcgacaagacatgaacgaaatctacatatcaaggatcgaaatttcagactaagatttttaccatttcctgaagctaaaaaattcagtcaactcaataatcaggaaaaacaacaacaagatcatcaaaagacgccatctttataaaagcacacgaaaccgttgaactcattcattaacctcttcacaaacagagaatcatatcctgaagctataatcaga

SEQ ID NO: 444 - DNA, 87799 bp, Arabidopsis thaliana
gatcaaaattaaacaaaagacttaaactttatcattttctattcataaactagttccttgcatgacttgtagaagaaaaaaaagtagatacagagaggaagagggaagaagaggcagagttaagtacctgatggtgatattcaagcttccatgaaagtgttttctcaaagagcttgaaataaaatgtttgaagagagaagagacccagagaaaaagagagatagagaaattaaaactaaaccctttgaaaagtttgcttcaaggggcttcgtcgagtcaccaagtcaagactaatcttaacacttttttgtttctcggcaattattgtaaggttttagtctttaatttaatacacaaaattttatttaaagagtttttcgatatcgcatttttaacaacattacaatattcagcatcacgacggattcgcacacgaagaggtcgtcgtctccttataatgactaaactacccctcagcatgttctttaacggtggtggtgaagcaagccctttttggtcattcaagctttggctccaaattggtgactaggtttgccacgtgttgacacttctagttgaaagagatacgttcacgtggcattgtctctgttgcctgttactacgccaccaccaaaacacactttaagttttttgtttttgtttcttcttctttttggattaagaaattctaattgtttgttttaagaacctgaacactgttcaacagttttatagttatagttcttaggatttttgttaaataggaaagtgtggaaaagaaataaaaagactttggccaaaaacaatgaaagtgatagaagaataagacttttctatcaccatcatgatcatgatcatggatttagtttcccatcaacaagacaacattggattctttcatatgtgctaaatccaaacgacaacaatgaaaatggtcccttaatagtgaatctatgaccaaaccaagtgtgttcttggaattggactcttattgccaagagaatgaatgaaagcaaatggaacaacacacacaatttcttctttgatttgtctgcaaaagaaaaatccccaaaccggatcttaaagatcgtataaaaagggaacagttgatgctacagtatttgaaatcattgtgtgttcatcactttattatatcaacaagggaaaagaattggagatgggtgtctttgaagcttcccagctgaaaagttgagctttttcatcttttcttcacaccatagaagttgctctttactgattttcgacatcctcaaaacccgtgttgcgagtttgatgtcaatggctgcaaacaagagttgaacaccttcccatgtttgaggccatgatttctttctcagcccttttgtcttctttgaaagctcctttgctttcacccttttctgcaaaagttcctctcttatgagacaccaaagaagcatacgatagtaataacatttgagtacagagaaatcgtaccttatcaatggatgactgaaccagtagtaaaggagttgtagaattcacatggttgttgttgtggttcccaaacaagtgaatacccccatttggtttcttcttatccattttcaagaagacgttgaaagtaaggatcgagctctctatgactttgatgagatcatcagcgaggaccatgaagcctgtatctttctccatctcctttttatctgaccctgatatgttttgaacataaccaacttcaagtgttactactacacataaggttttaagtcgcgcaatgtatgagagctgagaaatcaccttgaatcttaggagcttgaagtagcttaggcattgcatttctagcacgagcataaagttccgatcttgagccttgctcaaacggttcattctctatatacctctgcaacaagactaggaattgctgaaacagttgggcagtatggttgtagcaagtcggggtttcgggttggcatgagattaagtggctcagctgcgtgtattgacagtgaagtgcctcccaagtgaggcagagttgagcaacataggccgtctctagatcttgataagggtcgtcaacttctgtcggctgcaaatgctcgatatcttcctccggaacatcaaactttttgagagaaagacatcggaaaggcgatgacagcttcttagatgcagatcttggcgatggagttgaaggacttggagcaattccaatgcctaagagattgaaaagtaaccaacaaatccatgatcagtccaatctatcacaatgaaaaacagttcaaagcaagaagcttttaccagtttccttgagctgctgagagcttaaacgatcaaagaagagcatacgctcgcaatacttttcatagacagcatcaaaacctccccaccattgaagtccttcagcaaccacatctctccactcacttgaacacttgtcttctccgtcatcatcatcttcatctagatacgattcctcttcttcttcttcttcttcctcaggtatcaacaccatgaaactgtttctcctcaactccttgagccttctcttaacctcattggtaatgaaatcatcatcgtcatcttcgatctcatctcctttccccgaatctatcacaccagcttcagtgttctcactccttgcctgttcttgctgagccaatatcttgtcttctttctccttttcaaggtttggcttccgagactttcgaaattttctaactttcaagaaatccattgcctcctcaaacacacttaggagagtgagtgttttttgttaaatcataagatctaaactgagactagtctctttgcatgagtaaaagcgtttctcttctgccacaacgaacttaatcaaagaatcaaccaaaccagagaatgaggaaaatgcatgaatctagtaagatctcagagaatcatgagcaaaccctagagaattaggaacaccgacagaagattaagaatgcataagtagatcagtagcaacaacagcatttgtctgaaactttagattcgattcactaatctctagctgataagaacactagcattccctgataaatcaacactccactgaaactactactacactgagcaaagagtgtgagaaaaaaaacaaaaagaaagaaaaagattcaaaatttaagaaagaaagagaaacccaaataaaagcaaaacaaaatcgaaagacaaagacaggaggaggaggagattaaagaaggagaaatgtttctaaccacttgcaagagagagagagagaaagcaaagtataataatgtctcaattcaagttttttcagtaaatggacagagagagcacaatataaatgtgagagaggaaaggagagcaagtattattgattcttaaacagatgtcattaaattcaataattaaactttgtgatttcaaattccaaaaaaaaactagaaattttcttcctttcttaaaaccctttcctcaaaaatttccatttgcagtcaaaaccctcacaaagaggtttctgagtcaatttgactttttgtttatttcctaatgggtcgaaattgtcttttactgtttggtttcttactttactttttctgatacttcattttctattggttaatttttggttttgttttggtgtttgattagagaaggagagagatgtatgaatgaatgaaaaggagaagaagcagtaacaagtaacaactggtaggtaggtcagtggggggagagatagaaagaaaagcatcgtacagagaatattgtcagaaaagccgcgctatctgttctccttccatttgctcacttctctcttttaaaattacatctttaccctcctccgtctcatacatctacgggtcttatctttgtttctgatgacaatttgggcttctcttaaaatgggctttttctttaccaaatttatgtatactgctatgaaacgacgtcgtcttttactttggttatattggtatggtttttgaatttactttggttacgattccggtctagtggattggatgaaaccgaattggagagcttgaggttatgatccatggcttcatttggcatgtctctcacaccagttcttcttctcagggattacttactacctcttgtaagttctcattcgattctatttttgcttgaattctgtttcagctgatgaaacgcttgttatcatcttagccgtttcgttttctactctttctagttataaaattttgacttcttcaagagaattttttttgggttccaatcaatcagattgctatgatcctctgaatagaattttcttgttgatatagggacttgtgttgttgagtttgagcctatagtgatcaaatgggattctcatatgaattttactcaaattttgttacttttttaatcttataactgtagacaaaagcttatccttttattggttacaaatcgtatgaacatttgattctatgctttttgctttgccattaagcaattgattttttttagtttgcttgtttccggattatgggaatgaagcttcactgggattaagaatctgtaagtaatatgtttttgtttaataagctttaggcttatagatatgtttttttaaagttctaagttagtgttgtgtttgttactcttaaacatacttaaaaagctactaaatgagtgctattcaataatgttctgtttgatttcgatggaataatttagtgtgactgatgttgcttttatgtcgcttatgtattattggtgatctatgtgtaaaacatgtgttgcaggatagtaatgaaccgaagtaaagaagagaacgttgctccgacaatgaaagatgatagtccatttggaaagcttacagaggatctcttgatagagatatttatcagaattccaataacaaattgggaacaagtatcgtgtgttagaaagcagtgggctaatttattccgcggagaatgcttatggctggctgctcttaatcgggcgtatccacttgctagcaaaactaagagctggattggaccaattcgtcaaggattaagcaaacggtgactggaaacacacttgatttctatgaaaaaagctagcttaataatgtcttagttagattcaaggaacttaacagccttttagctgcaggagatatgtggctttatacatcagcagaaacatattaggtgtggatgatacagacatagatgagatgcttggacatatttacgtgttcttgaatgatcagcttcaactttccactatgcctgcttcaggcattttgcatggaacccttatcggtaagctagtttggtatatgcatttgactctgcttaatgaatcattgctaatgacggcattcatcttatattctggtggcagaccaattgattgtttgtggccaatcgaaagaagaagctggtgagcttgcaacaaagatttggctggctcttcttgacaatttagaggacacaaaacatacatttaccgtgctgaaatcaatcgcacaagaatatgatgtaagaaaggataacagtgtccataaagttttcaaattcttttctagtagaaactaactatctaagagatgcagggctttcttccatatccatattcaagaccaatcaaagtgcagtggaaggtgttcgagaaactgtttgtagatttccgtgacttgcttgatcattcagagtactgcgacttaataggaattgccaaaaataagtttcaaaccataccttatgtttggttaggctactaaacttagcctgcttcttccagtttccacagccctgtaaagtaatttgaggtccaattctacaacatacttgtacataagacattcaaagtctgcatcttgtaagaaagaaagacgtgtaaaatgcagattcttggccatgtataattcgtggttcgttttaaagcaaaagtcaaacattttgttgactattttaacttcttcgttacttgctaagttcagttatccatccactttattcttcttcttggaaatggctctcatgaaagtaatgacgattctggttctcttcgtctcggtgtcatcgaccttggcgcaatccaacaatggcggtcacatttcgataatcgtctcggaaacaggtcttgaatttgctaaagattacctcatcaagaaagtgatcactacgacgcttccacttcagctaccagacattgagaataaggttaagatccctctaatcgggaaagttcgaatgggtctatcgaatattcagattgatgcagttcatgtccagtcttcgaagatggagactcgaaaagatggaatcattttgagtgttttaggtgctacagcaaatttgagtatggactggtcttatacttacagagcttccttctttgagatttctgatcatggagatgcttctgttgaggtaaaactctgaaattatcgaaaaccaaattgggtctttttagttttgttgtttgtgttcagaacattgtttcatcatcagaagaaaaagcttaacaggtgaatgattatgacgatgaaggttaaaggaatgaatgtgagaatcactgccactttggttaatgataatggaagtctaaagattgcctcacgggaaaatgattgtacagtaaagaacattgatattcatatcaatggtggtgcttcttggctatatcaagggtattattaaatgttccataagttttcgtatctctaaaatctcttattccaagattataatatttgttttcctttttgcagggtggttgatgcatttcaaaaaatgattatatctactgttgaaaaaactgtctctactaaaattgtagaaaaaatgaagaagcttgattctttcttgcaatcacttccaaaacagagaaagattgatgactctgctgcagtgaatctcacttttacaggcaaccctgtcttagggaattcgtcggttgaagttgacatcaatggtttattcatgccaaagggtgatgatattaaagttgcagggtctcgttcttcttccttctttggtggggttaataagagaatggtgacaatttcagtagaagaaggagttttcaactctgcaacacttgtctacttcaacgtaagttctcaaatcttgattagagtatggtggaacaaaacaatttgtaagcttattggattggttttgattcaggctaaggtgatgcatttagttatggaggaaacaaagaacgggtccattctaagcacatctgactggaaactcatccttccagagctgtacaaacattatccagataataaaatggtgcttaacatgtcagtaacatctcctcctgctgttaaaatcacagagaatggaattgatgcgacgattcagctagatatagcgttcgatgttcaagactctggagaaaatctatctgtagcacgcctatcaacagtaagactaatagtaatccaccaaacaatctaacttaagaagcatcttttgatcactaaagttagaatcttgttcttgtttgcagattctgagtgttgcgtgttctacagaaatcgtaaagaataatctaatcggtagcctcagattaaatgatttcaatgcaacaatgaagtggagtaaaattggagagtttcaaacaaactatgttcaggtaagtcaagttaattatcttgagtttaagatttatcttgattagcatcaaactggtggatatgtgttcttgttgttaggctgctacgtctaggattcttgaagccttgtttttgccgtacgtaaacacacgtctcaagagaggattccctttgccgattcccggcgatttcacgatcaaaaacataaagattgtttatgttaatagtggcattttggtatgtaccgatatcggcactagcacaaaccagtaagcaagtattatatagcttcttagattgcatgtacgtaagcctgaagaaatataatgacaaccataattgtgatttgaaccgtttggaacttcccctctaagaagcgttttgacgagatctctttatttctttggctacttgcattatatctggaacttccccccctaagaccaatgcatctttctgagaggttaaggaaaacttccattaggcaattgcaagacacggcccaatgatttatattacaggcctgttaaatatgggcccaacttcgtaaacaatcaaaatattattcatatgtacgcaaaacaacaatagaaaaggataaaattgttattctattatatctctctaggacaaaaaaaagtaaagtcaaaagatcctctctcatcgatctctctctaacatctccgtcttctgcttcgtgtaatttgggtattgttggctccctactctgattcctcaaattccttatttttattaacccgcgaaaataaattataaagagggctttcaaaattttgaacctttctctaacaatggagatctccctccttccctttttcttctttcgcgtttaaggtttctcctcgtctcttctcttttcaatggatatagcgaccagtaatgctccaatgaatcttgaatccgtcgcaatggttgatggcaacggagcagaaccggtgtctccgcctgcgaaaaagccacgttttgacgaggagatgaatagagtggcggagattgttctggttctatcggcgttagggaggatgcgtggtggggaaactccgacggcgttggaactcgagctgatgtttgaagctaggtccaaattagctgggatgtgtctggaatttgaccctaaggatattattcgtaaggatgatgttaaatctgtgattgaggatttgggtttcaatggtaagcttaaagaccagagattaggttttcgagctcctacggtgactatctctgagaagctttctcttggtaaacgaaaggtaatgccttttgtttctcagatcacaattgtgttttctctttgatattgctcacttcaattgggtatagttttgtcagcattttgagagatgcaattttctctgtggcgttttcatcattgttttgattttgtccagatggaagaagcagaaaagtatcctaccacttcgacagtatccactggatatacattgtcacagccaaacggtagtcttgcatctcctggtggtcttggtaaggctacacattttgacaaaccatcaaagctttatcttcaggcttcctgacagtttcttcacccttttgtttctgcagcgaataaagcttctgtggctcatcagtggcctagtagtgaagttgctactgctaacactagtggaagccatttcaaattggacagacctcagatggtacttaacggtgcttctcaagggactcgtaagtcctcatatccccctttgttttgtatagatgcagttgtagtgataagattcttttagtctttgatttggaaattacaacacttttagtatgggtagggtattctggttggtttgctgttttgctttatacgataggacttgtaaattttagtgaaggtaatcataacagccaaatacagataattggctaatcactaggcttgtagctgagtaactagccctcatgcttagaataagtataccttttgtgaatactatcgttttcttttgcaaatcttactggtcatggtagcctttctttttggttaggtttctatcctgagttgctaaatttatatgttatgtttctagttctttaatagctttttcatagttgattttgagtttgtttcatatattacttgtttcagcagtttcttccgcgaattattatgctgaaccctggtctgcccaacttccatccaccatatctttcagtactgcaccagataagaaggttccaattcaaagttctgtcaggacagcagatccaagctttaggccattcaggcacggtacattcactggcacaaatcagccaatgcattacagtcaaacttcttcgttcggaggcaaccatactgaaattgctaagataatccataaatttctgcaaccacgggttaaacaatatcctttgtggaatccaccttcaagagagtatatgagcagggcaatggcatgccagatatgtgaagttaccatcaatgaaatggacactctactgatttgtgatgcctgtgaaaaagcataccacttgaaatgtctgcaaggaaacaatatgaaaggggttccaaaatctgaatggcattgctcaagatgtgtgcaagcattcaatgggaagccatttcctcctacatatgggcgtgcgactcgtgccgtagcgacgactacagcaaaaatgccttttagggcagccggagttctatcatcctcagcaaagaagattggaccgatggatataaaggctaatcaacaaaaaccaattgtatctacgttttcaagattgcaaaatactggcttggtttctggagcagcaactacatctcagtttgagtctgctagtgtaaatgcaaagacaactgcaagcgcagcaaagactactaacattggatcacagggctctaaggaaaatgttgcctgtggtgctaattctccagcaccggtatcgcttaccgagactccaaatcgtacaggaatcgcaagtacaatttctgtgataaacaatggcctcatttcaaaacctttaacaccagttggtactatgagcagcacttctccattgcctgttgttaaccaacttcccgtgaatgcaacctcaaacgcaagtccgagtacaccaataactgctagccttgtagcacaagccccgacagttacccaaaatggagatggcagctcaacggcctctgggactgctgaccattctatattgaatgctgacattaccactcaagttcatacattgactgttacttccagtagtaattctcaacaggcagtgtcacattctgaggttgcaaaagcaactgaagatgcagctcctttggaaaatgtttccgagtgtgagaaaccatcagaatctacatctcacccagactctctgaatgataaaacaatatcagagaacgttcaagaatcaagtaaggatgctaaagttgattctgaagcttgccagaaccacccaacagcatccccagccactgttgtaccagatcaagactcgacgatcactgctgcaccatccgtgacacaagaggattcagctttcaatacagagaaaacaccacctcagccactttcggtgtcatctaactatgattcacaaaccgagaaggaaacaccaaatgtccaagattctgtacataatgttccgggagattcagagaagggtaaagggttaaatggtttagatgatagacatcaggaacagccttctgagccggagttctataagtcagattcggtaaaggaagaaaatgctgcctaaaatttttgagtaatcacctgggattacttcaccagcaattatcgtcttctctcccctttggctctcaaaggtttatatatctcagttgttaacagaaaccaggaatattcaaaacattgaagctgtggatgaacttgtcaaagcaattagaataatgtgagttgagacgctgacggtttgatataacatgggtttaaggcatctttgatctaactctgtgatagccgaagggaactgtaatagaatcttgattcaggttttgcaacttatgaaatataatgatttttctcattgagtttaaactgttttggatcctacaaaatgattcaatgaaacgattgaaatgttacatagcacttgaatcattttgttccttttccttataacaaatcctatagatcggagattaattcaagggttatacccaacaccataaaccaaacaagcaaagaaatattaatttgatgcttacaattatagaaacagattattatatcgaaaagttatcatgttagacttgatattaacagtaatacttttggtttgtgatataagccaattatcaagtcagcactctttatgtttgtctctattgtctacaaggcttgtaagatacaaatatgcattaacgctcacaagtcacaagggctaggccaaaagtgaatgtatagttttggattatacagcaaccgcagaagataagagggatagaaatattaatcataagggtttttgaaatttttcaagagctctgggatgtcataccccaacatatcatcaacagtctgcaacattttcggctttagcttctcaaacttgtcgatgttgtaaccacttagcacctccctgaaatgatccacatttgggaaatctcctttaggtaagtgatgctctctttgtacctgttttcatgtcccccacaacattgaaacacatattagcatgaaatatgatcggaatcagaaccggcgtattgaaaagatccgcagaatcaaaccaattaccaacctttccaaactcgtcttccaagttatctatcagtttctgttgagctttggctttccccattatcgctggcatctccttcttcaaatggctgatgatgtacgcatgtatctttgctgctcttgcccgtttcacaaactcatttatctattagacagaaaacaaatatggttaaatccaatgagaggagggagtgaaagaagaaatgtgcacactcactcgacgatcacaagctttcttaggaatgtctttcaaatcagcaagaaggtcatcttgctccttttcaaacaactctctcccaattggaccagttgcagcttcgtttatgggtttatcactgaaggaactgttcaaagcaagtaaacaaggacatcaaaacatacattttagtttcaaaccgcttttatataagcaaaacactgtcactagttgaagaaacaggtatgtttacccaatgtagacacgagagacctcaggagtattgagaactttcccaagtgaccacatgagagctccatataccctcattagctatacaagataaggagaaagacggtgtaaaaatgtataagaacatgtaaaacaatgaaagaagtgtgaaagaaggaacgaaataagaatcgataaccgatcagggcgtcaatggtcaacctgctgagtgtccacttggtcagccttattcagaacaacgcggatcttgtcatcatgaccgcgtaaagatgaaattacacgcttgaactcatcacttacatccagcttgtgtgggtcaaataggaggaggataagatcacacttagaggcaaaccatgatgtaacaccagtgaaatcatatgctcgctgtgttctttgtttttcccctgataaaactccaggggtgtcgacaaatgttacatgctccagcagcttaaacaaagatgaatggatcaacaattatcagcaaatcaatacaggcaaaagtaatgaacgatctcctgtcagaagcatgaggttgttaaacatacagggtgaggcatctgagagcattcaaactttgacaaaaaggcagtcccaaaagttgtaagaccactgaatggcatatctgcttgaactgctactgtgttccccggaatgcttctttcatcaggtccagactgtgaaacacattgaacatatagaagtcaccttcaagagaggtgcaaatgaagtaatctagctaccattgtcaactaaataattgacacttaaaatatgtattccattatccaacaaaacaagcaaatgaatagcagtacatgatggatcaacgttttgaaggactaatgcattctcacaaaaatgaaaccttagaaaattacaaactaacataccatgacaacaacaaatctgtcagtagtcggctctggtccaatatgagctcctgaaaaaatatgacaattgaagttatataaagctgttttacggttaatcattgacctgttcccatactttttaaaatatcgaaactagttaggtcacagaaggagaagaagataggataagatggataacttgcctggataagtagatttaagcaaatgcttaatgaatgttgtttttcctgtggagtattgacccagaagcattaccataggttttgcatcgaaatcactgttagtctaagaaaaaaaacaagtaactagttcaatggtcaaatatagtttagaattcaatagtatttggaacttaaataacgccataggagcaccaataagcaatgcccaactcaccaacaaaggggatacaaaatcgttaaaccgatatgctacttcaagtggcttcagcttctgaatgtacaacctcttcaggccatccactatagatgttacggaggacagagaaatctgagaacaagagtcttagttttcagaaacgatagatgtaaactagctatatcttagcagctgagaaaatcttgacagaaacaatgccaatgaactttgtggatacataatagagatattggtaagaacgaccaaaaaggaatctttacttaaaatgacaatatatggttggtggttaaatagactgcttgaggcaaaacaaaccttttttgaagattttgaagagaaccagtgagctgtaagtgaggtgtctgcggcagggctacctgaataattgaatcaaatgagatatataattaaaaaggtaaaccattggctctagagtatgaagagattctttgtaccattcatattaggatcactcgactttgatgaatgcttctttttctgtgataaatgaacagttgtaagtaatatttctttgaactcgaaagatataaatcaaaattacaggcccaatactaaccgccattaatacacccagaccttccatggtaggaggattgatatttttgaaatcaactgcagtcagccataaatgttgcagaaagaagaacaatacattaacaggtattatttatacagtgggcatattaagatgaagacagcccttaagcaaaagatggaagactaaaagaacacggattcaagatttattcaccataccatcgctaataagaacttcatgcgatatttcatgtccagtttgagccaacgaaacaagctataatgttggaaaataacaacacattagattcacagcgagacatggacatataaatgtgagatataaactggatctaaacctgcatggcaacaataaactctttgaaaccaagatacccttgtctctttgaatctgcaatagcccagatctatcaacaaaccagaagagaaacagcataagcttctcacagttagcacctcttagacaacttaaatgaatcaacaaaaggcttcaaatgctttgccaagtgagcaattaagcatgatcgcaagggcttgttatttgtaactccattaaacctagaactcaaaaccattcaagcattcacctatgtgtttcctcttaactcattaatacaactccatccccaaatgaacttggtcaatcattataatggccattaataaaggttccacaagtaagcaacgtaataaatttcaacacaaaatccttacctgcttcaattccggacgaggcaaattcgacatagtgaagaacttgatcgcatcgttaccagtaatacggccatcgccgtctgctcatttacaccaaacagagaataagcttttagcgcatatagtgaagacgagaatcgaagactgaagaacacaagacaacaaaatgaacatgaaacgagacctgaatcggagaattcgaaccattccttgtagatcatttgattctccttggaacaagaaccagctgcgacggattcgatctccatctccgattgcaaaaatctagagatgtaccgattaacaaacttctcaggtgtgaatccagatttgtggattcgcagatattgaacttatacggagaagaacaaaaggtaagctaaacaacaacaattacaaaaaaaaaaaaaaaaaaaaaaaaagttggttgatgtatacgtgagattacggtttcagagaaagcgggttcttcgtctcgacggcaagggagaggaaaaagaattaccaatgcaagaaattgccctttattttcaaaatcttacacatatgccccagaactgttgagttgttgaagtaacccctattaaaaatctatgtgatagattttgctgcgtcgtctcaattattggtagaagattttgatagctacttgtcaaggagcattaaagaggtttgaataacagattggtttcttggataagtgatgaacttattttttgtgaaatttggtaaatgtacttttatgtctcaacatggtaaaaaaattttttgtcaacaaggtaaaagactttagattttaataactttagattttaataatttgattgatagattctacattaaaatgaaatctgttgacaaaaaaaggttagactaattaagtaaggctatggacaaaaaagggaaaaaaaaacagatgaatggcaaaaagcaaattataactagtatggacgattgtttttagtaatatgttttttttttttttgtatcttgactgggatgtcctaggaatagcggtaagtgtaacggaaaaacattcatcccttatattggactttgggaaccatatttaaatagaatagcttttgcaagtttgaactgtcggctgccaaaagttacaaaccagagttatcatgaatttctgttggggaaaattcaactataacaactgcaaaatcacaacacaaagatggaacaagagtggaaatctcaaagacagtaggagattttacaaggccaatctaatttactgtaagatcatttgttgaacacatgaattctattacaaatcgacatgttaaagaaaaaataagatgatttacagtgataaaaaaacgagaaaacgttattttacatagagcctctgtgtatacatacatgcatataccaacatcatccaacaagggagccaaaactttgagaactttaatgatccaaagaatgattcaagaaattccaatggtcttaccaagtaaccagagaacaagcgacatttcgataccgaagattgtatggagagtgcttctatcaagtgtaaacccaaacaccgtgattcctgatctattgttctcaaagtaattcactacaaaacaaaaaatgtgaagatgaataaacataactaaagatgtgaaggtatgagatttagtgtggatgcagaggaatatattttacatacctagagcttgccgtttttggaatgatatggtgctataagcataagcaggaatgagattgttgttatcgaaatcatcttcttcgtctccataatcttcactatctgattctccattatcatcatctgttggatagtatccgtgtccgcttgctctatcaactaaccttggagtctctccatccacagtctcaaaggattctatcgtcgcacatacatgccacttggctgcaagacaagtcaccgcctgagccttgtgtgtgatctttgatgcacttcgtagtaaaatgagcagtgcagtgaccagcgtcattgaacatagctgagataatcacaagaaaaaacaaagactaagcaaaatatttcatcaagaaccaatagtatgtagaaacagaacttactgctagttctccagctctgtagatattcaattcagcgtaggccttagtggtaataagcagagagtaaaactgacttccagtgactaatatcaaggacaacaatataaaggttcggtatcggtggctgatgattctcagatgacgtctgatacggagatgttcagacaagatagaaccaacatctgaatccatctggaaaacctgggcaaagtcttgcagcctaagaatctggagatggcagatgagacggaagaggacacaaaccagaaagatcacggtagtacggtacaaccacgagcagagctccatcaaacaagcaactgtatcactcaagataacattaccaaggaaaggaatctgagaagctcctgaagcataccaccatatcttataagagctcatcgctaagaaacaaggagacacgaagtaggagagaatcttaagcgatctctgcataacaaaaagttgtgatttcaaatcattgttatgcttgtgtagcaagtaagaagacgattgtcaagattataagtacttcatcgttaacaccaccacctaatatttatgtaaaccctaagatttttcttgcttctggattgagattcaatggtgggcttttaagttcttaagtttcatattgttaatttgatctactcataatgcgacaagatctggaatgatccaaaatttcgacagaacacgacagattcaaatactgtattgtcggaaaaagccaaagtcatttcaatcaaaggccctcaaaatccccaaaatctaaggattccaccgaaaaatcgagaacccaaaattcatattggaaacgacaaacgaagcaagagtaaaccaaattaagaatgcgaaattcgaaacggaattaggaaaagaaaaacaaaaactcacattgagctgattggtgtagcctagacgaacggtctcgctctcatcccaaagcttatcaaagaataggaaccgtcggagaccatacttgctaacgaatctggagagacaaagaaacgaaagagcagcgaaactgctaagagaaagctgaacaacggaatcgtacggcctagagtgatggctatcgcagtcagagcaagcgagcatgaagtgagacgtggcaggaacaacgagcgtgaaaacaacgaacatagaccatgatagaaccgccgtccaaggactcgactgatctacgcacatccatcggagatatttccggaaactgtggagctcgtcttgtgcgtgagatacgctacgtgtgaacttgttttctcggtttattagacgttctcgtgtgcctcctcttccttcgtttcctcctgttgttgctgcggttccgatgtcgatgtccgccatggacgatcgctcgggaaaatgagaaattaccggagaggctctggctttttttttttttgttgtctaaatataaattgatgacgcggttggaagaaggagaagacagaatcaggaatggctaaaattgtcttatggttatttataaaggatcgatgtttaggtggatttgacaaccgtatttaaattgtaatttagtatcgtaaaacaaattactacaatatttcgtattaagatgtacatgttttgtatcttattggctctgttttattcgaatatttacattttcaataatactagtgacttggggtttttctgctctatgattcatgaggggatatttgaacaaacagtttagaatttggggattaagtagagacgaaattgtgcacttccattgtaagaaagattttttctgattcacgataaaaacgaaaaaggaaagtagattttgtgttcatgcgacaaccatgatttcacaatcacggggtctatctacttgctaataaagtattatcatcattagatcatagatttttatttctgtttatataccttagtactgtaacatgtaaattagtgtatctcggatgaatttttttttttagtttgaaattcatggaatttatctattaaaaaggttttactaagtatattacagattaaatacactaaatactaattattcttttctttaaaaaaacaaaatttgcatattgatatatttccatatttcggcggaaataggtttacgtggcagtgacaaaatattatactgtaaacactgaaagaggcaaaaataaaaacaaatgaaaagatgctggtgaagtgaacacaggctgtagaatgggtcccacgttgacatgtgatgtgtaaaatttaggccgtagattacgcatatctccgtacttacggcgccacgtatgttgctaatataattataagtaccattattttgattttgatgtcttcttataaaaaaacaaaaacataagatattatttagatcagctaaactagtaaaggattacttagaattttaaatacccggcggcatgtcttgagtttattggaaggatgagtatataaagtttaaaggttttgaagattaatcgaattatcaaaatgaggaatatcatatactttatagtataaagtatattaattgtcaattattcgaatgaatcatgggtttggttttattacttgtgatcttatgagtggctgtctatgcattcgtttttatatgccctcatgactttgagaatatttcattattccaattactatacgataaatgttgttacatctcttaatcaaatgttgagtcgtttgattatttttttattttattttattttttgtttgtttgtttgttgaagaatcgaaaccgcagaccaaaaatattttctgttgtttgctgtatttaaatttacacgcaactatacttttgatttaaaccttctttcttgtgatttaatactccttcttttagttttttgaagattttcaatctctatgttatacaaatacgtgaaaaatatgcattttacccttagaaagttagaagtagaaacgaacatctcacaatgcttgattttctttgctaaagagtatagaccacataagataaagaaaaaaaaatatcatttaaagagcaacattatgtttaatcgtgttaaaagtttcatagtaaaatggtattcaggattcatcatagttgatagtagtaattggtttgcaacatttgattgattttgcttatttctaatgtatgtagcctttgaatttagtagtagtacataaaaagtgattcacgtctttacacgtttaagtatcagcaacgtgtattcacccagtttgaaattcaagattttgatcattctttattagcccccacatatataaagagtttcaagaactatagaaccacagctttcctgatttggtcaaacctggaaatatattctttcgttatctttctttttcttaactttttatttaaatcccatatgtaaaatgtaaattagattgctataattaacttgatggatcagaaattttgaaaagctgtgataaaataatagagaatgtataatgagataacaaatcaaaaactttaacgattacatttcaaataatctctaaaaataaacaatatagtaaattttagaataaattcactcggcgtacgtgtctccaaatctcaaaacgtttatagacacacaagattcataacttatactctataaagaaaaacaaaatgcaaagtgaggggtttggttgaagtggttgtcttgtgaatattgaattgttgtattaaattcgtagaaaattagtaaccagtacaagcttttgtgggctgataaagataaacacgttgagttagtaatacgcaaaccggtaatctacttctaatcaattaatttaaatgagttttccaggcgtctattataacttcaaagtctcgttttccgacaattaatatattgtgtgattaagatgaaaataagacaactacgacgacaagctagccaaactcttttggaagcgaataaaacaagactagctatttgtgaacttattattttcttcttagactgatgattttacaattgtaacaatgcactcctatttagaccagtgattggctgatggccaggttattttgtataatactctctaacctttctccatttgtctagttaacctttagccatttgccttgttaattgctcatacacttctttttctccttagttcaagtgtaatgtccaagccattcattatccattgtcttgttaatgaatccatttgtctcaacagttttttatattaattttctccttaattctagaattatcttcaataactaaagattagaccaagttgttctcatttaatagcaatgtagaatcatttggagagaaactatcatttcaaagccgaacaaccgaattctcgaaaggttgtaaaagtaaaaagtaacattgtggattaatctcaactccagaataatagaagattattaagagtacgaaccgaaacaggaaaagcgacttgagatcagttgtcttaaatcgttacagtgaaaataacaagacattgcttttgacttccactttaagttaagaagaagcctaccccaaaacggtaaaaaaatactcggtttttgcttcagacacaaagattcactgtctgaatccgtggcatagaagcaaagtagataccaaaattgggaaaactctctaccagcaaattcaaatcaaaaaggtcaaacacacaacgaattctgccacctcaacccacagctcttaaagatcaaaacaatcatctcagccaccaaactttaacctaaagatttggcctgtgctcattgagctttatcgatcacaacaaaaccactcaccgcccattgaccatgcccttaatctctatgttcttcaccatccaaaatattcattgggtacacaaaagggaaagcctttcttgtctcctcgctgatgaatgaaaacttgaggcttaacaatgacaatgagtattctaacttcctcttcgaatcacccaattagatagcaaaggagcttcaccgtctttcttcctttcatctttttattgcttccatctcagagaaccactaagctttacttgttgaatagaagaaaccctgaattgatcaagatcaagccaagagacaaaacacaaacaaatacttgtgccctgtgtggttctgttacatactatgtaaatgcagcttcctacttacatcaggggacactctatgaataagtagaaatctaaagataatggatttgaatcattcagaaatcatcaccagcttcagaatgttatatatatgtaacaaagggttgttggatcttttataagaagaaacagataaaaatgaaacccagatctggttcttacagtaacagatcttaacacaatctctctctctttttaatcgtcatcatcttcgttgatgataaaatcatcacgctcaatcttttttttttgttcttcctttttttctctttcaatatgatatcaaaggaaaatggaaaaacaaaagagcataaagttatcattttgtaaaatttgagaattttttttgtgtgtaatcaacggattttttttgtaaagcagcaaatcagagacgtagatcggtacagtggagatcatctatcccgccagcgaataagtcaacgccatccaacggcgggaaattaagatcaaactgaaacggcgttttccggcgggaagacgaagatgcgatatcatctccgtcgtcaataacagacgacgaagaatcgcagtcgctatgacaatcctccggagctaccggtggagttctcggatatctcttaatcgcatgtaacggtttcgccaccgacgaagacgccgccgcggcttccatcggtctcggtccgctacaagatttaacggtgctgctcatgctgctactcgccggccgactaataatctgctgctgctgctgctcctggaaattacctccgccgtataaccgatggtccataaacggatcgatctggttctgaatcaccggaggagaacagaggttttgattgtggaggtaggtgagaggttggagaggagaagaaggagaacaatcgatcgggaaattggtcttggcctttggaccacggaggttacgtgcggcggtatcgtaagcgcgtgcagcatctacggcggaatcgaaagtaccgagccagacacgagatttttttaatggatcacggatctcagctgcgaatcgaccccaaggtctcttcctaacgcctctatacctcggctccttcacagatccaccggcggttactggaagggcgggtccaacgacggaagagcctctccctttcctcatggagaagaaaaaagatgtaaagccagaagtaatgtgatgaagaagagatctgtgtgtgtttgtgtgaagaagagaagaaaatgttgaagagagaagaaagatgaggaagaagatgaaggaacaaagggtagagattggaaattattattataattctctttttttttttctaaataatttactcaaagaattttcatttaataaattaattaaaataataatttatggttggaatagctttttcttttctttttttttttggttgttaatttcgattttttctctaccttcacgcccgacccacaagaccgaccaattcgtttctttaaaaatttaattatggagtaacatttttcctaacttggattctttttttcttttgctttaaactttttattcgatatattgtgtggagaaaaaaaaacaaaaaattaaaaaagagttcacaagagatgtctcgaaatgcgaagaaagtaaaagagggtaagcacttgcactctctgtcctgaccctgaccacaatctatataataaaatcttatgtcttactgtttgtttgttatcaaattgatgcacctagagaccaaatagtccacttgtaatgaccaaaaacaccctccagattttattttattttatttaataatacacccctcttcgaaattattattagtttcttctccttcctttgggaccctacaagagacgagacgcgcttatcggcatcgtcgtcgtctcccgtgttaaaagtaaatgccgtgttgaggatacgcattaatgtggagaaacaaacatttttgttcttataaaaactgaattatgtctctccattaaaccccaatctcagaacacaaaacgaaaacaaaaataactctaaagaagaaacaacacatttttcgaatttttaaaacttgcttaccataaaattctggattttatttatccagtctaaaatctacaggctgatcatagtagcctgcttagggatttgatgagtagtttaaggttttttcttgtggcttcatctcctgtgaatcccagaatatctgagcttatactctacaatcaagaaaatcaaaaaccaagtctttgttaacattgtttcttccaacttgtcaaagctggtattgatagaataagaagaaaaaaaagtttacctcgacgttcttcaaagtataaaccagagtgtagattgacttctgtatgagttctgtattctcaggagtcataattgacgaattaacctttctgcaatgtaaccaaaatgaaaattatatttttgctgtctactgcaagaatataggttctcataatcacagttatcactcagttgatcatacgtatgtaagtaaacgagcttttgcatatatgtggtccaggaacatacattaagtgacagaaacagtaggctagcagaagataagtagaggcaacacaagataaattattgaaattttaagacaatagaggaaagattgaaaagcactgatgagcaaagcagttaatttaacatggaacccataagataagacacatttatgcatagatatgtatgtgttttaactttttaaccatcatctcttgttcagaaacttaatccacaaatagagtgttgaagccacatacgagaaattgaagctagtgtgcttatatctatcgtaaggtctgctttcatcatgatgcagaaagagttttgcatttgcactatggaattcaaaatattcataatgatatacagtcgatatgccaagattgttccactaagagctattacctcaaatcgtcagaagcttgggtaaggcttcgagtaagacactcaacttccttgagcaagccgctatcacgaaactcagagagcaaaggttgagcatcttcagccatggcttgaatctgtgacatcactacatcaaaacccaacgcataagcaggagaatacatttttttccaatcttgaaattcacctatcgattctttttgaatactgtaaacaagatctaaacaaagaccaccaaaattactcatatcacctttttgagcaatggccttgcttcctcaataaccgaagcagctctctcagcaagcgaatacgtattggcaacaccaatggcctcaacttcgcgtccaatacgagtgaaaattccaactaattcatctaaactaactccttgcactccttttattgtctgcctatcacaaacgatcagaccttccttaccacattcaggatgcagaggtcctactgaaggttctggtatcggattcctaggcataatgtcgatcatagtttccattagaagaccagactgattcacctcaaccaatgaattcctcgggataataatcttatcatcttctatctgcaaaacataacacacgaccctcatttcaaaaacaaatgtactatcaaaaccagattcaaagtaccagatcatacctcagcaacagcttcaatattcttcaaggaaggattaacacggataatcgtaccaacagtaaccccacggatcctaaccggtgttcccgtgcaaataccagaagcatgactaagctcaaacacagtctgatatttcctaaacttcgaccgcatttgaaaacctcgcaaccaagcccagctaagagcaagaagagtagctccagagacaataaacaaaccaacaccaccttcccaaatacttctcttaccaaacccaaaatcactcaaaggttttaaagtctgtctccatatattcctgggcacatccaaaacaacggtgagaggattcttccccccatcagacgatggttgaccatgagcagcatcggaattggatgcagctctgaccactaaatgcctagttctaggttttggtggaagataaggaaccccattgggtgaaactcgaggacaagcaatcatggaggatgatggcattagtgatgatggaacttgaattactggattcccaatcatccttccaaattcaataaaaaaactaaactttatgcagcaagttccaattttgttttccgagctgtagttagaaagaagatagagaacatgtgaattgcgtgaagcttctactttatcgatcgaattataagtcgagattagggtttttgagcgaaagagagaatacctgggctcgaagcttgtgacgaactggtgtcgtgaatctgagaatagcttctccaaaggctttgttgttgggatttagacggtaaagagaaaagacggaaaatcccatgtgattatcattaatcataattaattaagtaatttattaatcacctaatttcgaaaatgtaaaggcttaatcagttaatcttaagccaatttggaaggaagcaagggcatttccgtgataatcagaaaaatatacagcgaaagtgaacttttctctgttcactgtaatgtttcgtcctttggagaagtggtaggccaaactgtgaaaaatagctcaaatcaatttattcattaagttcaacaactcttcctcatatcagtcttttaaccaacaaaccaacagatccttcttttaattaacatcaagatcacagcttttgtgcttaacactcaaaaatcactaaagcttcggattttattattgcagattccttgagctcatggtaggcttgagaatcagtccattaaaggatttaacttaacgaccatgaactatccaatcaccaaccgacaagcagtagctttagaagagccattctaatgaacaaaccgttctttgcttgtctgaagtaggcagctcttggatcagcatcaacatctgcggtgatctacacaataagaaatacaaagagtgaggattgtgtcacggtacatatatgaaaaatagaggttttcttaacttacttcatccaatctcggtaaaggatgcatgataatagcttttttctgcatcactcctaacagatccttgtctacgatatacttcccacgagctgcttcgtaaaggtccagcctttctccaaacctctctctttggattcgtgtttgataaactacatcacacttggatgctacttccattaaatctgaactttcttcccattcaaccccgcttgatgtcaaatagtcttttatatcatcctaccattaaaagaacacactgaaaatggtaaggaacatacacaatgatgttctcgagtaaaccaaaccatcttcttcaggttctctcatggagggtggcaagtttagtgctactaaccttcattttcacaatttcaggggaaacaaagtagatcttcacgtctttgaacttggcaagcaagtatgcaagagaccgcacagtccttccgttggcaaggtctccaactaaggctacactgatgccatctaattttccaatttcactttggatggtatagacgtccaatagagccttcacaacagtaacagaaccagaaataagaaacaaggatgtaaagtaatgtttgtttaagacaattgaaaaaaactaaaggttaagaacacaacatacctgagtaggatgctctccaggaccatcacctgcattaatgacaggtatattggcagtagctgcagcttttcttgcagcaccgctttcaaaatgtcgcatcacaattatatctgaataaccctccactgttcttattgtgtctgaaaaatgccccaaaaatttccgtaaataatctaacactcaacatgtttcacagcaataatgagatactagctaagatggtaccttcaagtgtttcccctttcgcggcagacgaaaactctctagcgttctcagtagttaagacttcacctccaaggcgtttcatagcagattcaaatgaaagcctggtacgggtagaaggctcataaaagagggtagccattaaataacccttgaggatttcactttgtgaagagctcttttctatcttttccatttcgcgtgcaacatcgaatatagcgcttagcatctctctatcaaactgtttcccttcaatcacatcactaagttcaaatttcttcaactccctcgtcccagcttgcatagcatgacacctgactggaccaacatttcgagtcagattcaaagtagcatttttcttgagatccctagaggcaggaaacgaagtcaaacaaatctttgaactttcaaaagggctgggaagattgatagggaactcagagctgcaggctaatgctttaggaaaaactgaggcgccgcaaagtgtggctgaagtaagtgatgatgcaatagacattcttgcgcaggatgctaattcgttgaaggggagatactgagtcacaacttccagaatctgctaaaataacagacaacaatatatgatgccgttagtttaagaataatcgaaagcaactaagttttcgagactatgagaaaaaaactgcaaattttataaactctaaagatgattacaagtatccacactccatcaagctagtgccaacgatacttgttgcggattatattggtaacctctcttacatatccacttgctttcatataagaatctaaacattacttgaatcctgaattcaattgtcttagatggatagagggagaatcaaaaccttgggtactctatggaaatgatccttaatctcaattataataaaattatgagaaagtagttaccataatccgaaactataacaaatttcaatttcaatcaatcgtaaatcaaaaatcgaaaaagaaaaaaattcagaatctgatccgcagaatttcaaaacctacacagacctaaaagagcgattgaatcagtaaagcagtcaaatggggaagagtctggctggtcgatgtaacgccggtagagaatccgacagcaatgagcacaaaaagaaggaattagactcaatcctggttaaatcggagaccggcggcgggaacggccggggagaaatcaaaggcgggcggagaaatgtagggttttactaaggaaaggaaactagtaatgatgaattcaagacgttttggaatattaggggagggaaaaaacgaaacgcattgggatgataattaataaatcatatttaatgtcttgtttctttttcgttggacgagtaaagtgaatttgggcttctaaagcccataatatgtcttcttttcctcccgcgaagcccaaacagaaacagaaagctccggcggatagtcaaagagagagaggatcaacaacggagaagagaggtttcatgtcatgacaagtttcagctaaatcaagtaagtcctggtattaacaacaagctttttgattctgcttttatgcttttttatttacattctaacaaacaaaaacagaagcgtcatgtgtccaaaccaaaatttacatcaaaactcttaccctaacacatatcaagaaagtgaagaaaccctaagcatatacaaacatggccatctctgaaaacaaaactcagttaacttctggtatgctctgtagaaccggtctccataaccgttgttgattggcttcttcgtacccgcgattgttcaggattggacatgagaaggtttgttgctggaaggtcaagtcatggacgttgactttactcagtaaatcatggagttgcttcttcgtgagcctgatcttgatctcatgagatggaacagaggatttactgtcacgtgttacaattactggtttgccatctcttgtggttttagagctataatgatgatcttcttcatcttctgtgatgaattcatcccagtcttcaccagcccaatgcatttctgattcatgccttaaacaattccccattttttgtttctatttttctttggaggtaacccgtaaaagagcttatatatatataacgtaggtagaagctggtgagatattataatcataaaaggagataaagatcaggagcagtgaatatattaaaaaaaaattaggatcaatgataagaacatatacaatatgccacgtcagatttcagagtactttagtcctacgtggacatgtgtttgttgaactcaccgtcaccagcttttgtccttttcaatttccaacgttccacgtgtccttattggctcgtcagctcggcttggatatttttgctgattataatattttttatctttgttttccggtggaaataaaatgcccatgaaataagagaaaaaaaaagaagaagaagtataataattgcctaacgtgacgtctaacgaaaacagaactcagcacgaaagattctagttcatatgtggctaaaggaaaacatgtgaaatatgaataatgagaaggaagtctcaaaggtccaatactctgatgctatgttttgttgtagacaaataaaacgtataacgttgaggtacgtaaacgtataccaaaaaagaagtcatttatcttgtgcgtgtaataatacctttgataatgagatgtcccattttttcttcttctttttcttttaagaaatacacatttattagctagactatctaccactgaaaattaatatatatttaccaatttttaaagtgttatacaacaaatgtttaacgtgtaaatctacgaaatggtcattgacaacaaattatgatcaatttcaagatatatcgatcataaccttaacagtaaaaaaatatattttctcagcttatgtaagtaaataaaacgtaaagtagaacaattagaaatgtatataaccaaaaaaaaaaagtgtggatggagccgagctaggcagaagaagccgagtgaagtgaagtagtgtgaacacggcattggggaagggatcttcaaagtgtgaacgcaaccaaagggaacagaatctctgaaccaaagatgccctacccaattttcaattactcgtttaggccatctcatgttacacacactcacgtctcccacctttccataattttccattgccatcaccttttttttttttttttttttaaagttttaaatatttctaaggtttttgttttcctgttaaaaatagttacaaggttttgggtatttggaatttaagtaaatattttgaatttgttagttattataccattaaaaatcactattcaaactcatgttctacattaatcactttttttttatctgtccatttgccgttgtttgcatagtttgttctactatcatcatctgatcttattaacatcaattacccaatttactctacaaatgctttatatgatatattcaaatgcaattcaacaaccaatataccattattattcatataagtcaaaagcctgaggttggtgttacatcgaattattccactactagtatatagcatttttatttaagtagtatcgatcacttgacccacataccccgaactttatttttataaatgaaactgatctgtataacattggttgatctatcgatctctctcacctattgctctcattatttgttaattcgaaccgattagtaaataagtaaaagttatagaatcttggtgttcataccactgtagagacgaaaaatctaatcatctcatcataattaagttaaatatgctttatatacctatctctttattcattttttatagttgaatattatacattaacgaatcaatacaatgggtcgatcaataaaatgtgtctattatcaactttttgtgttacatgttacacaaacatatattaattattaattattttcggctgctatgtgatacaacactcaccattttgtacaattttttttttgtttttttttctcttttttttttcattttgtacaattgttcaatcattatattgaaacgaaattaaactgagattcttttgttattaatgagctctattgagtttgtgtttaagtaccacccgaagactttttgttaaattgcgtaggttaagactttagaccgtcaagaagttttgcctaataaaaatgacagtcaaagaataaaaaagaccacttcctggttcctgctactcgatatgcgtagcgtaaatataataatttaaagtaatcaacaacatttgtttttgttttttgacatttaatcaacaagtttttgaagttccacgcataaacacagacgcataactataagaaacattaaaggaaaaaaaaagcagagctaagaagatgcaaaaaaaaaagatctaaagaagatgccattgagacacctatatatagtgattatttcaaagacaaagagttaacgcaatcaagatcaggtgtttaaaacacaaatgatacaaaattatatactcgtatattggaaaccatgatctttgagctttccatccaattttcttctgtaattaaacaaaccagaaagacattaaataaaaaaaaataaacatgcatagcatatagtacacatttagatagtaagatcgtattgtatacatctttttttttattcactgagaagtgagatcattatcacaataacaagaaacaaactaacgaatcaaataaaatatgatgtaacagtttctatgtaataaaatataaaatgagaaaaaagacaaagaatgcagaatccatgtgaagggaatgggagtggaagaagcccatctatattaaaacttactaaaagtactaatgatcgactacaatctcataattaaggttttgaccacctctaatctagcccttaaataatttatccttgtatgtatatgggctttatttgtatatttgttgttgggcttcgatgatacttaaagaatctgaagcacccaaaaagaaaaaaagagatttggtgaaactaatcaaattagtcagagacaccccagtacctccttcatcatcactctctctctttcgttacagttccctaatcaagcaagttgcatatcacgagctctctcaactctcaatccaatccatctctctctcacgcattttcgtttgtttcttcgttttcctcttttcagattcttctcttcgattcttcacattgataaaacttgtctatggtggttgttacgtcgattgagtagatgaagttcaccggaaaatcaaatttgacggctacattacccgcaactgtcccaaatatcagggatattcatagaaggagagcgcgaaaaccgagcttcactcgtcaacgaagatctggcgtgtctgtcaggaggctaagcaggccggagactcctcaattgaaatcgaaggtggaggatcaaaacattgagcgatgcggcggggttgaagatggtgataacgaggatgatgattgtaataagatgcgttgtcaggaacggagtaggagtgtacggcctgatactgttaggaaacttgctgccggagtgtggcgattgcgagtcccggatgcggtttctagcggcggagataagaggagcaaggatcggttacggtttcaggtacagctttgcttttgaaaaaatgagacatttataggatccgcattgtgatgaagtgaattgtatgaaagcaatcaaaagattataggattgctgattttgccttagctttgaatctaaagtatgagagcactggattgattttagctggttgttttaatagtaatgtcaaagtaatctgaaatagaaatgactgttgattccaggatcttcacactagttcataactgtttgctcatgtctctggaatctgtacactctgtttcttgtgtgatggatctgaattagttggctttagctactatctcagaggagttcatatgtcaaataaatttctctttattttctttggtgtttttctccaggaaactgctggtcctgctggaaacttgggtcctctgttttattatcaccaccatgatgacaaacattctggctttcaaagcaacaattcaagaaacaagcatagtagattcttgtgtaaggtttgttgataatctcaaacttctaggtgaagattatattatgtcaattcaattagatgtggatatgcttcaaaaagtcttatacatgttacttgaggtgctttattaagaaccataactaaatgttgtggttgagatgaaggttctatgagtttagagttgttacttgagctagtaaatctgacctcggtcggtttaaccgtctggtcggagtatgaaaatactgccttagcttcactatagttgttaacttgaacactttaagacattgacacgctgcacatttcttggttggctattcctttgtctgagtcctcttaaggttctttatttatgtgacagtttccgttaatcattacttttttctttttcttttgctgttagcatgagccttcagttccatttccccactgcgcgatggagggagcaacaaaatgggatcccatctgcttggatacaagggatgatgtacaccaaatctataccaacgtgaagtggaataatcaacaagtgaatgatgtttcattagcttcttctattgaattgaaacttcaggaagctcgtgcttgcattaaggatcttgagagtgagaagcgatctcagaaaaagaagcttgagcagttcctgaagaaagttagcgaggagagggcagcttggcggagcagagagcatgagaaggtccgagcaattattgatgacatgaaagctgacatgaaccaggaaaagaagactcgtcagagattagaaatcgtcaattcaaaattagtcaatgagcttgcagattcaaagttagcagtaaagcgttacatgcatgattaccaacaggaaaggaaggcaagagaattgatcgaagaagtttgtgatgaactggcaaaggaaatagaagaagataaagctgagattgaagcattgaagagcgaatccatgaatctcagagaggaagtagacgatgaaagaagaatgctgcagatggctgaggtttggcgtgaggaacgtgtccagatgaagcttattgatgccaaagtaacactcgaggaaaagtattcacaaatgaacaaactcgtaggagatatggaagccttcctcagttcaagaaatactacaggtgtgaaagaggtgagagttgcggaattgttaagagaaactgctgcatcagttgataatatccaagaaatcaaggaatttacgtatgaacccgcaaagccggacgatatcctcatgttgtttgaacaaatgaacatgggtgaaaaccaggatagagaaagcgagcaatatgttgcctacagtccggtcagccacgcttcaaaagctcacacggtaagtccagatgtcaatttgattaacaaagggagacactcgaatgctttcactgatcagaatggtgaatttgaagaagatgacagtggctgggaaactgtgagccattctgaagaacacggatccagttactctccagatgagagcatccctaatattagcaacactcatcaccgtaacagcaatgtatcgatgaatggaacagagtatgaaaagactctattgagagaaataaaagaagtgtgctcggttccaagacgacaatccaaaaagttaccgtcaatggcaaagctctggagttcattagaaggtatgaatggaagggtttcaaacgcgagaaaatcaaccgtggagatggtttcaccagaaacaggctcaaacaaaggcggattcaacacattggacctggttggtcaatggagctcatcaccagactcggctaatgctaatttaaatcgaggagggaggaaagggtgcatagagtggccaagaggggcacataagaacagcttgaagacaaagctcatagaagcacaaatcgagagccaaaaggttcagctgaagcatgtccttgagcataagatctaggccacaacatattccaaaactaccagtcctaggccattctactaatctttgtggctgagcagcagaactggatttttgatcccgttctcctgctattgccattgtcgcatgatctagcgctggtcaaaccaatcaacgtggtatattttcgttagctaaaagcaaaatgatctttgtgattgattactgtcatagcttggctgggctagcttcagccacgtcccagcaaccccttggaacagaggcacaatggtgtttttctttactgaattttgttcctcttcagtccaacttgtgatgctaggtcattaatatcttcttttattacattgtgtatatacttcgaaactgtaggatgcattcttctatatgtaagttaaagatatgataaacagaagaatttaaatgatatatccatttattttagaccaagtgggagaaagaaataaggttttccattcgaaagaacgaacacttgaaacacaaagcataagaaacatgatattaagttaaagcacaaaagataagactatataacacatatattatagatgccacggtttaagcttctaaacaagtctatttgggaaggtaatttgtagaagaaatttcctccatagcgacttgaacaaccaacatatcattcacaagaaaaccctttgatgaatttctcagatcagaaagaggcatgaagtcagcgtatccccacccgattgtttggggactgaaccagttatcaactgccagaaaagaaaagaaaaaacacatattagtcatcgtagtgattgaagatgttatgaatttcacattaaataacagtcataatcacatatctagtatccacttacgtggcctttccaaaacgagattggattgggatccgaattggttaggaacacgaagcttggctcgtacgtaaaccttgtcataaggttttgcttttagtagctcttgtggcccaaggttaagataaagcgacaaatttttgccttcaaaagcgccaaaaccatttttaaagattcgtaaattcctgattcagcatttgaaaaacttgttaaacacttaatagtagtatactactacgtacccaccacacttgcactacaactaattatattgagaaactcaccagctttttcctccgatgatgaactcctctgataggtaatcagtaggcagtgtcgagtatccttgaatataccaggtgaatctcgggctcggaaaactcttggtgacagagaaaacttccgatttttcgtagaatggtggaatgataacgtcaacgccaaactcacaatggtcaacgtcataaaggtatccattttttaggttgttaaacgtaatcagaggaagaaccttagaaaatccccacattcttttgattgcactgaatcgccatacatcagtatctggtaacaccgcatagacataataatagacagatagatgttactataaatatagaaacaatgacatatttatttgagtattaccgcataaagttacttatatattaaccttggatcgtaaagtacttcgtctctttcttgttgaatacgtaaaatctgagatctacatgaacctcttcactttgagaggtgagagttgagttgtctaagacgacgtatagcgaaatgtgccctgtaccgttatcgttcttgtttcccttcggatacacaacaagcgtcctgtttcaatttgttcaacacgattcagcaaacaactatagtacataatgaagtggcttgaacaaagataggccaaggtcctccattaggaatatagggattgatcaacgttttgtagtccagtcacaaacaatagtttttatcatggagctagatagattttgggacaaaggttcctaatcttttagctaataaaatagaagaaaaaacaaagatggtacgtaacgtaccagttgtatctaccgaccctaaaaggacgagattcgtatctctcagtgtaaacagacttcatgagtgtgttgaaagactccatcttgagagagtaagacgatggaggacgttctctcagacccttcaccgtgctcgatagagaaaccttactatcacgtgatgatatctgagtggggaaaattttctgagatccattttcctggtttggaactggtcctgcaaaagaagaggtgatgaagagacaagacaagagagaaattacaatgcataaggtgtttatgtagtgatagctcatcatttcaaagatctatgaatgaagtttagagagtcactgtgagacttgttaacgataatggcatgtgtgtgtgtatatatatagaaggggagattggttaactagatgcttactggggctaaaaatagtgagattttggcatgataatgtttttcttctgcctagtgtaccagttggttcattaatatttgaaataccaatctcgtttgataatgcgtttacttttaccattgacttaggttatatattatatttcctccatatttggattggatcagtcttttcgaatcggggatctttttttaaataattgcaaattcatagaaatacaccattcgttcacaattgtagtagtattgaactcgaatctgataactaaaacaatgcctctctaactagctagctactatctaatttaattaatgcccataaactcgcaaaatcaattatctatgtaaacgttgaattgttttaacattatagagtgtagactaaacttcaaagcgaaacttttttctttgtctccttgttcaacgaaacgaaaccttataaatagcatacgtacttttgaaatcggagaactaaaaactaaagtgatgcaaaatgaaaggacataatatttgtctataacctaaactttcttaatttatttctactttaggggtttcgagttaaaatcagatttcctagttcctactatatgcctctgcctcaagtccaagatgccgacaaaaaatagtcacaaagattagataattgcagtgccagatcaaaactcactcacgtgttctcatctccctccgcaactagcgtcgatatcagtggtaggttcacgtggaccaaacaaaccttctcatcttccctattaatttggtccatctttagagacgtatgctatgacggagccacgaatttcatttataagagtcacaaaacatttatttttctaaacctaaaataaaactaaatattttattttcttatatatatacattttaacctaaaatgtttcatatttcatctttcaaaataaacatactctcaacttatctttttttagttgtatcatcaaattccctttctcatcaacactctttttgttaatatattgtggagattgagtagttgttgtgtttatcttgattcatgatttttagaatatatattttagattttttttttgaaaagaatgtagaaactaaaactggatatctaaaaagaagaaaaaagtattgatttgttaatgaatattacagggtttttaataagatattatagtttttataattagccaaacaaaaatgcaaaaaggcattaagattaaatgacaaaatgaatatgcatggggtcaaagacaagcataaatcacataacatgaggtcattgtgagtactttaacccaaaacatataattatcttagaagatataccctatattttttttttaaactataaattttatgggggtcgactgagcccccttcttgtatgttgcctccggcacacgtatgattggattttatcatctccatgatacttcagagttctgacaatctcgaatataatgccactttgtttttttgctttgtaatggacatcatcgatgcttcaatcttcgaaaactgaaaataacgtccgtctgttttcttccaaggtcgtgtggtagacatgacatcttttcggattatgaacatgagaacagcccttatcaattgtttgaaaacaaatcgaagatactcatatttcggatgatgtctattgatcgtccagaatagattctaaacctctgcttccaatacgacgagaaggatctccgatcgaatatggaaacgtactaccaacgatgatcccgaataattcatgttgcaccacaaagcatgaaacatcttctttatttaattcgtacgacaacattctattagtgacagaaaacaacaattaactttgtagctgttaaaaatactggtaaaagataaaaaaaagattgagccgagtttatctgttgtatatactattctttttgatagatacatacacccaagatattttatcttgacatgtgatgaagagatacggattatcctctgaacaataattttctaaaaaaaaagaagcaaatttttgataacttaacttataaatccacctttttccctaattagaagatggattctggctgattttcttggattagtgttagacagggatactactatttcttaacaatgagatgaggcaatctatcaaggaaagtaaaaaaaaaacgaaacttaaccctctttttttctttttttttttatgttagaccaatcacttcttgaaaagattccgtaactagacgatttttatatatatttttttattttttaatttttaatatttccacttcaaatataaaaagaaagtatatttatttgttatagaattatgattagaatatgaatacaaatgtaaaaaaaaaatgatatagaattctatagaaaaaagaaaaaaccttataagctagtcataccatttcatttcattatattgacaattaaaaaaaactgatcatactatgatcatagtatgatggcggttgagcaagtatgcccccatcgtctagtggttcaggacatctctctttcaaggaggcagcagggattcgacttcccctgggggtagggtactacgaaaggaagttgatcatggattatccataaagttagaatagattcttcctgggtcgatgcccgagcggttaatggggacggactgtaaattcgttggcaatatgtctacgctggttcaaatccagctcggcccaataattagctgtctacataaccattttttttttttgcataaatgacagagaaggggtaagaaaaaaaggtcaaatttcagggtatagggtatagttcgactttacttttttttttatttcttatgtttagttacttttttttccataaaaaattccgatcttgatcttgctaaggattccgatatggatcctttaaagagaaactttaatgaacagagtcgataaaataatctatttgcttctgttcaatatataatgactgaagctaactttggttggttaatccgatcagttcatcgatggtcgtatagtttagttatttaggcaataaaaggtaggggttagaaattcagatgatggtacaaaaattaaaaatagatgccaatacgtatatttttcttattaaaaatattatatcaaataataattaaaaaaaaatatatatatatatatataaatatacatagcacgcaaataagaaaatgcattattgaatattgaagaaactatgattactctttgacaacaaagagaaactataatcaattaaaaactttaattagaataaacttgaaagaaaatatgagtaatacgttttcttagcagaaaaattcgttttggaagagttgagtgtgaatatgaggttttttttgggtgtatttactatttacagtaattgttagaagtcatgcttatcttttgagaatttgtatatacataattcattcataaacgttaaaaaaaatgtgtttatatgatagcttttaatcaattgatgtacaatgaggtaatgaaactcagatgagtcaccaactaagttgagaacttgagatggattcaatagtcaatgatgctaggtgaaataacgtaatcaaccaaaaatattattcaatttttaattcgcattcgcaaacacgaggcacataaaataatattatcagtctcaataaaatcttgattcttgatcttgagcatcccaaagcattattaactaagcatgtatctcccactaaggcacaaattactaaccatataagtctcagtactctctgttctgcaaacttcatacacaaaaccaacattaagagatggcgagccactacagaaacacaagcgctattgcttatctattgctttgtctcttcattacatctgccactgcacattccttcatacgacaaatcactgatgacctcaaaacaaatctgcagcgtatgccaattttctatgttcttttagttgttataaatggaaaacagatcctttgtttttatttctcaaatgctctgtttttgtctggaaacagaggaggtaggagcagaaccaatccaaaacctggacgtaggacattacttacaagaaaataaggagatctcatcacgtgattataaagtatcagcttcaaacgcagtgaaaggtttgagagatcgtcctccatcgtcttactctctcaagatggagtctttcaacacgctccttaagtcaacttacacggagaaatatgtatctcgtcccttttcagttggtggatacaactggtatgttggtcatctgatctttatttgcttgaatctataatcttacataccaaatatattttgatgaatctcaatatatacaggacacttgttgtgttcccaaatggtaacaagaaggatagtggttcagggtacctttctctttacgtagccatagacaactcaactctcggacagcaagagatttacgcagatctaaggttttacatctttaacaagaatgagaggaagtacttcactatccaaggttcttataattttcaatcaagaaatgtagtgttttagcaagaaagatactttgtgcatgatagtaatatgtatctatatatcgactggtctttgttatataatctgtagataccgatgtgtggaagtttagtgtcttcaaaacgatgtggggattctctcaggtcctccccattgatacattcaaagatccgacaaaaggatatctctacgatggagatcactgcgagtttggtgttgatgtaaccatgccttctctctacgaaaaatcggaacttttctctgtcacagagaattttctaaatccgagattcacctggaccattcggggattctctacgctgctaaaaaacagttacctatcagaagtgttctccatcggaggaagaagttggtgagtcaacattatttcaaaataaaaactctggtggagtagtaaaatggtggtaagtagtaacaagtattttatatgttgattaggaatatacaaatcaatccaagtggtcttggtacgggagagggaaaagctttgtcgatgtatcttggccttaatgtgaatgagatattcagaccatatgagaagatttatgttcgagccaagcttcgagctcttaaccaactcaatctcagtaacatcgaaagggaacgtaagtaaatgatatgtgttcattgatgggtatacataacatctcatcgcaatgactaatgagatttacttcttttttttgggcagtcgatatttggtacaatggtccgggatatggagaatatagctggggtttccctgagtttatctatttcccttatctcacagattcatcaaagggtttcgttaagaacgatgtgttgatggttcaagttgaaatggaggccatttcttcaaccaagtacttcccgagttagattttctctaagcaaagaacttgtacctacctccatgtgtttgatttgttatcaaatactaataagaatttgattatgcatttcaaatacaattgtttctttttcttcagcatatcattatcaaattatcatatatcttcttgaaagatcaaatagtcttcacccaaaaaaaaatccgccaatccaacattcggctcagttttgtttgttttgatacctaagaattaaagaattaatggataatttatgatggaggttagagtctactgctaaattactatcactaatgtattgccataaacaataaaataatataattgctaatcttaaatctcaacttgactataaagataaagactaaatcgatcaaaaaccaatacactagatgaagcctggcttttggtgggggattttaatgaaattcaatgtgaaaatttaataagaacttttgtgaaaagaaaattggaaaatataagtaaaagaaaaaggttaaataaaactatctaacatcataaaaagttaaagaatagagcaattggatctagtgtattggtttttgatcgatttagtctttatctttataatcaagtggagatttaagattagcaattataatattgtttattgtttatggcaatacattaatgatagtactttagcagtagactccaacctccatagaaaaaaatccattgattcttttattcataggtatcaaaacttacaatgcatttgaacctattttataatttaattcaaactactgtattcagttccaatcatatgtttttgaatgtttttttaagaaaattgaagttcatataggatttataaaaatttattcatctgatgtagaattattttatggtcaagttaatgaaaacttcaagtgagggcactcccaaacttgagatggattcaaaagtcaacgatgctaaatgaaaccatcgaatcatgttttgtttttgaaacaacattattacgtaagaatctaactaatattcgaagactccatcctaaagcatttctctatctctttaatatataagttccactaacctctcttctcttcacttcattcacataagtcataaccttgaaagatgacgagtctctacagaaacacatcctcttttgtttatctcctgttttgtctcttcatcacatcttcgtctgcgggttcctttatacgacaattcagtgatgacttcaacacaattcaacagcgtataaaatctctttcactcttagattcatctatgtaacttagattttgtgtgtggacataatcctctgtttttttttcttttttcaaatgctctgtatttttgtctgaaacagagaagggaaaagatggaccaacaccaaacctggaaaaaggaaattacttgcataaacataatgagatctcatcatcacttgattataaagtatcagcttcaaacatagtgaaaggtctaacagaagttcctccctcgtcttactctttcaagatagagtcttataactcgttccttaaaatcccctacttgggattcgaatctcgtccctttgcagctggtggatacaactggtatgttggtattctgatcttcattttcatgaatcgaatcttatgtaccaaaaatcttttgatgggtcttaaaagacatgatatataatacagggtacttaaggtacaccctaacgggctcacgtgggatggtacttcaggatacgtttcgctttacgtactcttacacgaatcgacccccatcactgcagatcaagtcgtttacgcggatctaaggttttacatcttcaataacaacgagaagaagtactttaccgtccaaggtttttgctaaattttttcaatatgtataacaagcaagaataattatctatgcgtgcatgatatatagtaacatttttgttataatctatagataccaacgtatggaaatttactgcacccaaaaggcttttgggattccctaaggtcatgtctgcagatcaattcgaagacctgcgaaacggatacatctacgataatcactgtgagtttggtgttgatgtgaccgttgcttctcactaccaaaaatctgaatctttatttgtcactgagaaattcgataacccaatattcacttatgcactcctgagattctcgacgctgctcaaagaaagttaccaatccgatgtgttctccattggaggaagaagcatgtgagtaccacatcattacagaagtaaaaactttgcgctataagagtatagtggtagtaattaacaattattgttttatatgatgatcaggtatttacaagtgtttccgaatggtcgtaatctttcaaagggaaaagccatgtcgctgtatcttaacattaacgataaattcaaaccctttgagatgatttatgttcgagccaagcttcgagttcttaaccaacgcaaactcaataacgtcgaaatacaaggtacgtaagaaaatggatatataacatctcatcgccattgactaatgggattttactttcttttttcgcagttagtaattggtacacttcttggttttattactcgggcgactttcagattatccctctagctgatctcagagattcatcaaagggttttgttgtgaatgatatgttgaaggttgaagttcaactcgagggcatttcctcaaccaagtggtaccctagttagatttctcaaactataggaacttgaagctccatgtttttcctttgttaccaaaccacctaataataataaagggtaatttgtgtttgcatttttttttacatatattttctttctctagcaatattaaattatcattcctcttctaacgaccatattaagttattaactcttgtctcttcaagcataatggttttcactcaaataaaataatgtatacaatcaatacatatacgtcaacagcaaatgagggtggacaagacactaaataacttattcttgattagaggcttttgatttgtaaccaacctaatggttgataatccgcaacatttttcgtagtgcagcaaaatgaaaagtaggttaaatatgggttaagccccaaaaaccattgtttctcttatttgttttgacatcttccggaccaaaatacccttcgtagagattgatttgagtgttctagagtgttgcaatacattcaatctcgatcttggcgtttagaggcaaagctgcaacttgatacgtcgatcgtgctggagaaggagctgggaagtctgcaacagagacaaatgtttcatgcccttaacgactccactaataattatgcatctcaaacaaagtaggaacacaaacaatcttgttaaagaactcacatttggcatatatctcgttcactgtcttgaagtcagccaaatcagccaacctttgagagaaaaccagaagagattgtttttctttctatttagattcagaattcaaatggacaatggtactgttgaaaaaaacaagatcccttacatgattgttgtcttcaccaccgaggaataatcagcaccactagctttcaatatctcccccatgtttttgagtacctttgatattccataagataatagaagcaagtagataaaatcaggaaggaaaaacagagcaactcaaccttgctacaactacactggaacaagttaatttgaagactaataccaaccaaatcaagaattttaaagcaaaacccaaaagtttcaaaggcttagttttgtatcatgaaagtttatatcccaataaactcagctagaataaggcacattaagttgtcatccctcactacattttcaccaacaaacaacatcatgacgacctagaggctagacctccttttctgtggataatcatccaccaaaacagagaagcaagtggaaagtactctaaacaaaaccaatttttatagagactacggtgacagtttgaaagctaacctgctcagtctgatcttcgacgctctccgaaacaaactttccagtctatatacacaaaacaaaaagagcaaatcttgtaatcttagaacacagaaaagagaaacaacatggtgattacacagtttcatatcttatatatacggacctcaggtataagtccaagaacacctgaaagaaaaaccagattattggctttaatggcctgagagtaaggtcccaaagcagctggtgctttctcagtagacacaacttccttcttcactgcacaccacacacaacatcacatttctttagtaaaaaccctattctcaaacccttgatcattcaatacggaagatgaaagaaactaaaacccaatactaacaaacatatgcattgatgataactgaaatcaatttcaactttttgacactgacattcataaaaatcgcatctttagaaagtactaatatcggtccaaattggagaaaattgagtaaaatcgtcaccagaagaagcagagacagagagggaagcgaaaggaggagatctagaagacattctgaagagagaaacaccagcgaatgttgcgcagccgacaccagcagcgaccaatggggtacgagtggagcgaagtgcggtggagaggtcgagtgttggagtatttatggatctgaaaaccgaccaagtcatctcactctctccggcgccgacaagaagtatagaatagcgaatggaccacgagagagagagagaaaggtaggtgaagaagaagaagaagactgagtcgatgcgattggattttaagcagatgattctcgtgcttcttcttttgtcttcttccttctcttcgaaatgtttttttgtatttcccactttacccttagttaggtacatatattactgagaatttaatttttatttttgtgtagtttagttggattgcaaattttaaaaatttggacccgttgggtcatgtcggtccatagctttgtgaagtttatccacaacatattgttatgtagaagttgtgttatgtgaaagatggtctctacaaatggggcaagtttcttgtctaagcaaccactcatctatgcaattcatatgaaatgtgtggccacatcttgctagctttcttcctacttccccttcttcccaatcctacacaccccaaaaatgaacattagaaatatatatgatttaagtcattattatcatatattaaaatctgattcctagatgattctaattaattacatttttatcacctgtaagcaaatcgagcaactcgattttgtttgatgttctgaacggttgtagaacatcgggatgttctgaatagagctcttcgatagtccctttttttcatgattgaaatcgtataagtttgaactctccatgtaacttgtatccaatgctattatctgcattttgtattataatattaccggagttaaaattttgtaaaatatacttagtttaacgctttttgttatggttctgattttacgttagaaaatatcgtgttcttgtcaaataaaaagacgtagttgaaaaaaagtcagaagaacaaaaagaatggagagtacttacttgccattgatatgctttgagaacaaaaggtctaaccaatcccataatggctttcccattcactactctcctgagtaaagccacctgccactcttttcatatttttgtcaccaaactattgttaccataacatcatcttttattcagataactagttactagaataccattcatttttagctagctttcttaattacaggaccactcccactatttaactagaaacatatggttgtttagtgatttattttttagattctagggttatatgtagagtcacaatcaccttagacaaaggttgatcactatgtagcaccggtccaaagagttggaccgcagtgataactccagccaccactccaagcacactaccttgaagaaatccgatgtcagtggtgtgaccttcgatggctcctacaatggcggctaccacaacactagctacattcaaaattaatgacatttcgtgatcttataaaattgtttaacatggaatgtggaatgaaaacaatgcaatgtgatatgttaaaatgatacataccaaaaagaaagtatatttttctaagaatttggatgaagatattgttgacaaaaagatatacttttcttaaagaatgagaatttaagggtagagaatccatacataagataagttattaaattcaattaaggaatgcatagacaacaagtaattcaggttaaaggaaaaaactaagaaaatggaaaagaagatcccacatcagactcttatggtaagtagaagttgcttgacacatcgcatccattcaagaattttctctttatctttttgttaatatgttttagttcttttatcaaacactcatgtcaagttgtcaactatatatagtatacatatgtgtggattcatatatgagaggtaagtacatgtcaatgaagtacatatatccaaaaccaatgagatggcgtctcaagtttcatctttaaaagtacgttagtttagcaagcatctatagaattcaaaaaaaaaaaggggaacaaacagcattaaatgataagaaaatgaagataacttgtaaatttaccggaagcaagaatgaagatgaatgagcccaacaaagctcgttttatcgttcttgacattttgaagatcacgcaagtaatccagaaagaaacaacatatgtgaatttcagaagaatcatcttagaaatgcccatgaagaaaagatggaagactaattgattttttttctttctcttataagatattttgaatttgtctatttatggggtgagagcttgaattggagagtggtgtggagtgtgagaaaagagcaatttataaaggaaaaaagagagaaaggaggaggagttgcatttaagaagctgaactacccatacctctaatctacattgcattggcgactctattggcgcatgcatgaacttgcgcccacagaagaatctaaatgttttataaaataaaataaaagcaagaaaattgaatggagaaattaatgcagttttgaaatatgaaaatgggaagggatgggataagcttgagattgaaatatatccaatttacattccactacgatctgaatgagttgtttattgccatttacattctagtcattatagtggtagcagtaaacttccaatcttggattcttaatctagcaaaaagaagctcttcattaaccaatgtttatcaatgagtttggatagactaatttttaccgcatttgtttgttagctcaactagatttatgtttcatataggctatgacacagacttgtatagtaagaagactagcatacattagaaatggagatctgggttacaactaagattgagcccaacatgttgtcgtggggcagcaaggtcttcttatcagtggatatgacaccactcactggcaacgattttatgttttcgtttatggctacaagtttcttcattgatgaagagaagaaaatcgctgtggtttttaatcaaagcaaagacaggaagcacaacacagctttcatcattggacaggatggatccttgaaagaagtggatcttggagaagttcgaaacagagatctcaaaccacttgtgtcctcttatgttccaagttcaatgcaacttgaatagtgcattttacaaaacccataatctatttcttgcacttttacttgtttctttttctcttttgtcatcttcttctttgaacaatatatagaaatttaattcgtctctcatacttctttttgtttgccatatttgacttcgttttgttgcctttagttgtttaatttacttcttctgttgtagtagactcattgctaaatctctgtttctcttctaacatttgttatgtttgtgttcttgcaaataggcagctctgctgttgtaatttatgtagaacagacaacagagtaagctgcgtttaactttgaaatttgcaagtacgcatgcttagatttgagtttcccattttaacttttgtccttgtcagttttacaaagtgcaagtggctgctaggctgacacgtagaagattgaatgatttctcggagttaagttttgtcctttgatactccctggtcttaaagcatacttacagagtaaccgtagctgaatatcaacctcaagcaagtcatggaaccatacaccttccttcaatccaccagttttgggctggttagcgctctcctagatttatgtttcatataagctaaccattaaaagtttaagagaagcttgtgtagtaagaagacaagctaaatgagttctcagtagccttaattcttcttctttttttgactaaatatgagcacttatagatgaagactagtaatgcattgattatgagaatactaaaaagttaagatgaataatcaaaaaaattatttggttagtattaaaatcttcaaatgaaacttagtcttaagatttgttgagatctttcatactatcgaagtcatgtagagtggaggtacgtagccaggcctaggagaagagaagagaagagaaggagaagcaagctaagaaactgaaagcctaaaaacttttgaatgttgatgattaaaaaagaatagatacatgctaacagcttatgcatttttgaaatagtttttgttaactgtcgtgtagcttgtgtgtaaatatgtcgacgacaagtcaatgatgtcacacacactacacaaaacaaaacactgcttcaaactaccttcaacttcgagtccattactataagcaaaagtcccaaatcaaaacatcaattttcttgttcttgtcagctactcaaacctcaacatgttacatatattttttcagataaaacaaatcattctcatcgttcttatctgaccaggaataattcaatggaagtatgagtttgactcggtttccttttgatattagtcgtacttttcaacattttacctagatagagccgtcctcttataattattcatcatttcatgcttctcatgttacatttctgcaatttttcaactctttgattttatataatcatttgtttcctttcttaatcaaatccatctggctaacattatttagcttgatgcaattaaggtatattatctaatgaggtgatgcttccacgtctttatattattataatccctcaacaattttaaaaaaagatcctgactttcaattttctctcttgtttcttcttttgatcatcttcaacaaaaaaaagttacgatctttctctccgggtcatcggaatttgagctagcttagctaaagttccgatctttcctctctgggtcgtcggaatttgagctttttaaaatcatgggaaattgttttgccaagaaccatggattgatgaagccacagcaaaatggtaataccactagatcagttgaagtaggagtaaccaaccaagatccaccgtcgtatactccacaagcgagaaccactcagcagccggagaaaccaggttccgtgaatagtcaaccaccaccgtggagggcggcggctgcagcaccaggactaagtcccaagaccaccactaagagcaattcaatactagagaacgctttcgaagacgtgaagctcttttacacattgggtaaagagctaggtcgtggtcaatttggggtaacgtatctgtgcacagagaattccacggggaagaagtacgcttgcaaatcgatctcgaagaagaagctggtgactaaagctgataaggatgatatgaggagagagattcagataatgcagcatttgagtgggcagcctaatattgtggagtttaaaggagcttatgaggatgagaaagctgtgaatttggtgatggagctttgtgctggtggtgaattgtttgatagaatcattgctaagggacattacactgagagagctgctgcttctgtttgtagacagattgtgaatgttgtcaagatttgtcatttcatgggtgtgttgcatagagacttgaagcctgagaatttcttgctctctagcaaagatgagaaggctttgatcaaggctactgatttcggattgtctgtctttattgaagagggtaaaataatcagacttttctttagggtttagtacattttgatgaagttggttgtctctaggacatagataggatacgtatcaaggttctggttatattggtatcttgtgtctcttggttccgtgaattgcatgaagaagttcagacctttcttgatatacggactaggctagagaccgctgtttttgttctctgatagagtttgatgtttcttactcttcatcatttggtgtttcttcttcttgtctttgcaggaaaagtatatagagatattgttgggagtgcatactatgttgctccagaagtcttacgtcgcagatatgggaaagaagttgatatctggagtgctggaatcatcttatacattctactcagcggtgtgcccccgttttgggctggtaacgcgatattctctcttctttgttcctttcccttttgagatttatatgttgtgaataaaaagctgaaaacagaacattggatatgcagagactgagaaaggaatatttgatgctatattggaaggccatatcgactttgagagccaaccatggccgtcaatctccagcagtgccaaagatttggtacgtagaatgttgactgcggatccaaaaaggcggatttctgctgctgatgttcttcgtaagtaccttttgaagacattttacggagccacaacacaatgcaaagttctggaagattccattatcggttccttcttgattctgagatttgctctactgttttgtgcagagcatccatggcttagagaaggtggagaagcatcagacaagccaattgacagtgctgttctctcaaggatgaaacaatttagagcaatgaataagctaaagaaacttgctttaaaggtgaagtcaagatttttcacatatgcaatgtgattctgtggttgtggtcctctttttcgttatactcatgatgagattctaacaggtcatagcggagaatattgacacggaagaaatccaaggattgaaggcaatgtttgctaacatagacactgacaacagtggcacaatcacttatgaagaactgaaagaaggattagccaaattgggatctaaactcacagaggcagaagtgaaacagctcatggatgctgtaagttggtcaaaaactatattttcccccattccgttcctttactttaagaactcagattctcgggtttgtgattaggctgatgttgatgggaacgggtccatcgactacatagagtttattacagcaacaatgcataggcacaggcttgaaagtaatgagaatctttacaaagctttccagcattttgacaaagacagcagcgggtaagtgacctgtttcttctcgatgttattcattcttaaccggtatatatataagcaagatggtgagccttttcttgggatcaaaatgtgtacacagatacattacaatagacgaactggaatctgcattgaaggaatatggaatgggagatgatgcaacaatcaaagaggttttgtcagatgtcgactccgataacgtaagttaaaataattcatctcctctctttatcttcttcttcttcttcttataaggaaactgaactctgtccataacggtttgcctctcttgcaggatggtagaatcaactatgaagagttctgcgcaatgatgagaagtggaaatccacaacaacaacaacctcggctgttctagtggacattgttgctggattaaaagtctttttgtttgtatctaatccagaaaaatcaggagctgaattaatgtttgttcagacaaaaaccacgtaaagaggaagatactcaaaactctgattgcttgtgttttgtattttgttcttcacttcttctgttttgtcctttgtgttctgtactcaggctgttgtgatatgagagaaagagaggtttcatttttaccgttaagattttgatcctgactgtgttaacattttacctcagttcctccacttttaatgtgattctccattccatcaaatgtcaaatcaacgaaacaactgctaaagcagagctttcctatattttaacatattccggaggcgcaagtatctttggcaaatggcttggttcgcctacaaattctccgtagtgggggtacaagagactaattaaccccaggctagtaggttcaaagaaaaacataaaattcgaaagtgattcattagagggtgtttttggttcaagggtaaatacaatttttaattttacaaatgatacaagaccattagagataatgagattttctcaaggctctaatcatgtgatacgccgaggagctttctgctttctttatcttggactgttcatctcccttcatatataatgttttttcttctgttatcttaatcttagcagagcaaacaaatctctttccctgtaccgagcttctatcttcctcaacgctgaaaaaatgtgaaaaacaataacaaaatgtttttaaacaatggcttatcaaatgtgttctgcttcttgagattataagactttagactactcaagtatgtgaatgcttccaagatgtaggagtaggatatacctgtagataggcttaggccactttttctttaagcaaatctcgttcaacttcgttttagcatgtgtaagttgaatctctacactatcttcatcaataaccatttcaacgggaaaaacttctgacaacttccgtaacgcttctttagcagcgatcagccttgcgatatctttattctcagctcggcctgaagccaaaagctcatcatcaagatatataacagcaatactgacattaccatctttccaattcttgatgtcgattcgcttcttatgtttatgacataatttaaaaagcatagacacaggttgaggttgcttctgcaaatcgtccaatgtaactatcggttccaaaagacccctaaagatctgcaaaatcgacaataagaaagaagcccttaactttcagtaacaaagacaaaacacacaagagtagatctaaagaagaagtagacacagaccacccatagtctttgtagatcaaagttgacatcaacatacacagctccagctaaagactcaaaaagatcagctagaactttaggggctttgactaatccaccatatgacactgacaaatcatcttctttccccaccgcctctgagaactctttaacctatcaaacgacatcaacacacacaacttggtggtgaagatatcacaagaatcactctgtttcacataaagaatcactctgtttccagggttcttcaatgcaaagacaagttttatggattaccttttcatctaaagaaggagcattgcgtcgaagaaatgaatagagaccatgattaagagagacacgagcgagtttctcagtactaacattagctgctctcaacagagacaagtcgtgtggctcaaggctagggtacgttaggtataggtaatttgagattgctaaaccaatagcactatcgcctatgaactctagccgctcgtaagaaggaaagtctgtacacgaggtgtgtgtaatcgcttccttgagaagactcttgttactgaatttgtagttgagtatcttctctactgcttccatagactccatctccgacgaaaccggaacgcttggtgctgatggggaaagagaattgtagaagcggtggatatcggccgaagacggcagtggtgatggtggacggtgaggaagtgaattggataaactacagcgagtgatggccgggaaattgtactccggtgagatagagtgatccatggtagagagaatctaaagagacgccaagtcttctctgtttcaattttccttttaattctttttgttttcctaattctattagttttgactttttcattgactatagtcctcaggacaaataaggaaagtatatatatataatttattatattggggcaaaatataattaaaaacttttatataaaggaaatggattaagcttttttcttaaagggcaaaaattgcctaaaccctaaagctgagatttttcttgctcagtattgggtcgatgacgatgaagtgtgtgttttgttgataatctcgagtgtgggtgatcgaagagcaaaggaagtcccaaggttagcttcttattttgtttatttcgcgattctaattgatctactttgtattgagcaattttttgagagattcatgtttttgaaatcgtgttattggatgttcttgtgagattatcgttgtaaatgtaaatggtttcgaagtttttgtttgaatggattgggatttttgtgcgagtgttgttttgttatgtgttacattttgaagttgtgtttggtttttggttgggattttaggtttttgatctcatggagggagaagagagtttgttggatgctataaatgaagaagacggatttgaaaacttggaggatgttgaaatggttgatgttgaagaaggggagattgttgtggatcatgatttagattctggagagaggcaaaatgatgatggtgatggagtcaaagataaagaggcgattttgggtgagaagaatggactgcaacagacaaacaagaacaagaggaagaagaagaagaaaaagagaaaaggccctgtgatggacaaacccatgagtgtagactggtaagtgttctttttctatatgctaatattgttgtgtaaattcttggtatagctgcctgatcttggctatggttgaaacgttgctcattgtttgatgttttgttatggcaggtttgttagggatacttgtagacgccttaaggagaagaagtcttacatgatatacacagctgttgggtgtctcggaattgctgccttaagtgatcttgtcaatgaggtatacactacttcaagatgttttctgtgttattccagttaaaaccttgtttgatctgtgtgtgaccagcagtggcaatcttgtttagctgtattgtttcacctgcagttcaagatattcctagtggagccttttttgctgcttgtgccttttgctgagatgtagatggtaaaacttcatattttaggttgatttttttttcccttctcttgtgcacatctgtcttttctctgtttttattgatctagacaatttgtatgaaaccataagtggatagatgaagtttttatgatcaacagtgtcaaccatattttcatgatcgagaccataagtggtttgagtgagaccaacagtgtcaaccttattttcatgatcgagaaatgactgtccacatattcactactgctttgtggattgatccttctgttactcccactgtatgcttttaagttggttaagaatatttctattccacttcgcaagattcttgccaaagatatgattgatgatggcaagaaatattttttcttaggtggtagcaattgagacctgtggaggtcaggtgactgctgatggcactaggaaacggacaagtggtggtgtattgtggaacatcatcaaagcgagacagcctgaagcttatagagagataatgaaaaagaccaaggagtttgaggtttgtacttgcctatcatatcacaacattcgtaaatatatcctgctttcttagcttaaatgtgaaatagcagtcatgaagatgttatatcactgttttctatcttacacctctttctctcttgctctttgtcttacgctttcaaactttgcagaaacaatttaggcaaccaaacacgagaccaaaatcagggcctaaaagagatcagggtagctcctccgaaggacttgcctctggaaatgtatctgctgatgaagctctggtgagcgagatgtgtgttatgccggtagctgagcaaactgaatccaaaccggaaaaggaaaggaaatctgttcatgagaggatcagggtacctgtttcatatgatgaccttttcagagatgcacctttggatgattcactagcacatcatccttctgcttaagctcatttatacaccgtttaccttggactttttttaactaggtaaacaatatatctaagctactggatgacttctcttgtggaaagcaattgttttgtcgagaaatggaaagcattgattttgtcgagaaatgcattaacaaaactatatataccaactaccaaagatttcttaaatacacaaacttgagcacctcctagaaatttactacataacatcagtcggcctacaccattaagaggttcatgtgttaacttctcgttacatgatgcagctgatttgatacaaaacatttgtttgcttgaactacaccacgagatgaattggtcttcctgggattctctttatgaactgcttgttcttttattgcacctctgtgaaggcgtgattgataatcttcttaactgccatcatcgcttggacgagccatgttaatattacatcacctcttgtagtgaccttgggttcatacctagcctctcagacaaacatgcttggtgtttgtatgtggcatacaaagagagaggatcatattcggaggatccgggtcaacttgtaaacctgagaatataaaaatggagtttgaatcaacatatgacaggttgaatgcatctatgaatcaattctcatggcagtagatagcatagagagagagcaaaagaaggagagagagagagagagctgacttgggcagtccggctaggcaaaaacacctctaagcaatttctttgaccatcaattctgcacaaatgtggattcggttcaaaatgatgaacagataacatccttatatctttgctaagtaggatactataacattaaactaaaattacaaacctcttgctaattgaccgttgaagatagtggtcttctgttacaatcccttgacccccatactttacttcatcggagttcagtatcatctgcaaaatccaggtaatattctcaggtgaaacgcattgaacaaccttatagtggagttcattgttctatcaacgagtaaaaacgcggtagcaactgtgtttcatggagagcaaagcagtggtttcattgacagacacttattaaagatgatagatgatgggtgcaatatctaaacagagaatggaaaaaacttacggtatattcaccagcttcctctacaccgacatcatacttttcatatgaatttgatgggtggaagttaaagataaataggaaaggaccccttgagaaagaaatcacctgtagagaacaattagttgactagtaagcaggctcattgtacaaactctttcatttctgatgcttactttaggtagtctcattttgctcaggtttacactgttattttataattctataaatgtatttggagaattcccaaatgttgcaggaagacagttggtttatttattttccgcattagctgaataatatcgtatataaaggcatatacaaacactagcatgccaaagaatgccaggaactcatttttcagaccctgaacccaatcaattttcagtggaaaataaaagagaaaaaggattcaattaccatatttgcatcattcacatggtggatgctgggcagacctcttgaaaggatacccttgcttttatccaagtccattagctcctacaaataaagaacgagatcagtagctaaaaagcatctcttctgatacaagaggatatatgcttggaacattttctagtccttacattttaaagatatacaattaaaacttcaataagaaatcaagcatttagtttcttctgatatgatatcggcagtaaagttttttaagttcgagttctgacaactttctcggcttgataacatttatttgccgccttcatagactaatacagtattaaattgctaggaaatttaaggaagaaaattttcagagatgctaacaaaatcatggatatggaagctgcacttttgtaaacaggtggtaatggtaagactgataccttgtcaaaggaaaacaagtgatgatgcactccactttccagcaggtcccagcggcggttagcaagtgaaaacgagaagttattgctctgcgttggaaactcaaccctctgacacaaggatgaaacgtcagaatcagaaacatgaagatgatgtctttagaacagtgggagtttgtagatttacctcaggatgtccaaattcatttcccatgaaattgaggtatgcacggccaccacttgtaaaagtaatcagtctaatcatctggtcgtccaagcaatgacaagaaacgttagctttcagaatataagtgaaacaatatagataaaagacaacagagggcaataattagacaatcttccagatttcatattttcacttttcaatgcaaaaatcaaaataatatcaaatcttattctacagttgtgttctcatcaggatagaggtatgctaagttcgggaagtagtgcgtaaaggactaagaaagggataccttatgtagtgaaattcccctgtctagcaattcttttcctccaggagaaccattatcgactccaccgaataagatttcagcaaatgaacgccctcctgatatggactggtggaaaggaaaagtagaataaacaacaatgtcaatgcaacataaaagtttagttgtgtagtagaaatgaaaaactaaagttacaacgtagatacttggttgtgattttcggcatagctgagcatcttgtctgcatactctttgttagccaccaatgtactgacaatctgtagcactggctgaacatcagacaacaggacaaaagtcttgttctgccatatataacaatggaaacgtaaaagctataaccttgctcatgctccattcattatccggtacattgtcgaggagagaaacccacatttctgacgcagaaagattcacataataatcaaatccaagtccaccttgagaaactggctcacacaacccagggtaatatgttgcctaaaagcaaaaggaaaccttgttaagttctataagtgggtagatagtgaaacccaacgagcaacgattcagatcatcgacagaaaaattaatgcaatttttctgtcaataagaatcttaaactttttacccactgatatacatctaacattcgtaaaagataattcgtcaagaacttcttttcctgcgtatggccagtttaaattggcttacacaagccagtcgacactatggttaccgtcatgtgttgtacatgagaaagcatatatatacatgttacatgttactctcttacacaactttttatctacatatagcatatttggaaaaagcatgaaaagttttcactaactggcagtaacagtactaattctactaaccaacacttgcaagactaaaaactagagataatttagaagcaattatgcccagaaatatacttcagagacttagtgatattctatgatgaaagcagtgtcagtagctagtccccctcaatactatcaattaagacaaagcaattcaataaggatgaatatttaatagctttaaacaaaagcatgaccaaaaaaaagtgatgtgtagcttacatcctcagcaattgttattatatttggatgttgaacgtgcaggatttcattggccaaaatgaggtacatcagagcatctcggtcaacatactgattgcaatagctgccaacaggaaagacgtcaacagtttgaccaactgtaatcaaaattatacaaagaggtgtgtagtctcatagatgccttactcatccaaatcgttgttaaatgaagcaaacccattgtgcgtgtaaatcatcgaggcaagcgagtgaaattggtaaccatcaacttgatactctgtaatccacctgcaaaagccaaatgcaacagcatcagattcctataaccaaaaagtgtgcaacactttcctactataccaaaagagtgagtacaaccaatacattattaacaaaccacttaataatgtagctgcctttaccagttcaaatttgatattagaaaatgaagaacatccaaatcaccgtatttgaacatccgggtgccccagtgtttgtgatgcccccttttacctatttccacgatgaagaaaatggaacattgtgtttttagacaggcccatattcaactatgtcagacatgtttgacgtcatctttggacgtacacaagattatgaacaacattggttgtaacacgaaaattatggtgcatactttctagttacataccaatgacttggacatcaacacgttagaataaaggcatgcaagaagtcttttattcatgcaagaactcatgaaataaataaaaagtgaactactattatggaaattaccataatgaaaatagcaatcatttgaaccatcgaagagagaaagcccaaccatctgatcagctgctgcataagaatgcacgatgtccaaaaagacaagaagtcctaggcctgtatatcatgtgcttcgtcactacatggttatacaacatcaagaaaacaagaaagacgagaaataattaccatgtgcctcatcaaccaaccgtttgaaatcatctggcgtgccatatcggctactggcagcaaagaagttcgtaacctgaaatggtgatggataccaattatgacaaatgaggtaaaaaataattttcataaatccattcattcggtttaaagataagtgacagtagtttccttaataatttgtaaaatctgccatattatgtactaggaattctggttattagcttgagtgtagttccatagctgttatttttttcaaatgtaactagtaaaaggacctgatcaggactaaatgacatatgcaatgcccactaatcaaaattgtttctttccactttatttctatcaagttgttctcttcttgttccatatttttcatcaattctctctattctacactattgtctattttttactaatcattcggcaaagaccttcagaacctttcatgcacagtggacagcaaagccaaagacgatataatcataagaactggaggtaacataagactatgaataacagctatgctgaccctataaccagactaagaagtagtaaaaaagaaagtttaagtgctagaagtttagcttgctgaccctataaccaacagtaaaataatccttgtgctcagggacaccaatcaactggattgcattgtatccagctcttttcacatgaggaaggacctgatgtttgataggccacagaaaaactgagatgtgtgcataataagattgcaagtaagaatacaatgaatacattaggaggtaccttcttagtaaattcttcgaaagttgaaacttttggctcggacccactgattccaacatgacattcgtatatgcgcaaggactctggaacttttggcttggaatatttccacttgtatgcagcttcaggagaaggttcccaatgaattgcgtaagcttgctttccttcatcctctattttagagaaaaatgaatacattaataataaacaagatacattatcgtggaaatattaacatgacacatacaaaaacgttattttaaaagcatctctgcatagaaacatcaagcagtagcgtatagaaacaagaaaggttttacagcttctctgaaaaatgttgttcagtaagactgttaatttagtgcttacaaagttctagtaactctggacatgaaaagcagagagtaaaaaaaatggaaaaaaactccttccgtttgttcaattcgtgcaaatacttctaagcatgtgtcatcagatgaaagaaaaactgaatgcttgcttccatatatttatgaatgttatgaaatttgttaaatttcatgtgctactcctaaccatagaaataccaaacgctgtcatacctggttgcacatatgtagcccaagcaggcactcgttcaagcggtccatcaggagtattgaaatacaatctatacttgcttccatgtggaacagctggaatatatttttgcaaccatgcctttcttcctttacgtgtctctaaccaatatggaatcggaggttctttctcataaaatttctttgtccattctggagatgtcacgacattaaaaatatcatatggctttccttgacctttatcaatgatgtcgcatggaggtagattacttggcgggtcatctttatgctcctctttccactgtttatatctcgtttctgcatctggtatatctccaagctcttctaacgtttgtggactgttcgggccaaacatctgctcgtatagtttggcaggaacttcaaagcggtttttaataaaccgatcctcaccaggttcccaatactcatcattagctttctggaagatttcttcagctgatacaccactatcacccttatcatagtcatcgacatagttatactgctgaaagtatagttcatctggttcttcaccctctcttaacttatcttcaagaataatgaaccaatacccataatcatcatggccaaataggccctctctagctgcattttctgtaggcgaccatccattgaaatctccgattatagccccataacgagaacctgaatttaggattggttagtattctcaaacttcccaacatacatatcaagtttctgaacatcattcattctgtttcagaaccaaatgtaagtaatgaactgactaatgaaattttaagattagagcaagagacagaacctggaccccagtccataaagtcaacccggtgttccatatgtcgatgcatccccaataactcaaatctacaatgaaaagaaggctattcattagacaaagcattttggatacacatcagtcactaatccaggatcaaaatcttctcttgaaagaaactgggaccaagaggatacataccctgaagcaaaatctctgaaatcgaaatggcgtttgaaaatctcatctttaaggtctttcaaagctttatgcctacagaaaaacgaacaggcttattatacacagctgtaatcaaaattgatccttttttgttgcccattttttcaaaatcaaagttgatacatttttatacctttcccggagaaattgagcaaagattctgtcagcaattccgagtctggtgagaaacccaacagggtcaactccagcctcagcgtcgctagtgctctggctctgactcttctttttctgtttctcctggcgtggtctctcggcggcgaagcaagtgattttcaacttgatcttcctgggaaaattgactcctgagattcccaggcgccgtttctcggaaacgacaagattgtttgggtggaaagagaatctggtttgattagagagggacaccatttttgttggtgctacgaagaagatttgttcatactctcactcacactcagggttttagtctttttttaagataagagaggtttttgagtcgactcgttataaagaacgacgacgagttcactcggtattcggatatttttctcaatttgaaatttgaaccaaaccgagcgtaatttaaaccggttcaatcccgaaccgattgataagaactacatggatttgtgatcttgaaagtgagatttctcgttttttatttacttttaattaaattcaacacgagtatggttttcttttgataaatttttaacattcacatatttttacagatttaattgaattttggatgccaatttttggtttaagcaccggttttgcccttctttacagcaatctccaagtttcttcttgtgatttgaagctctcttgtgtagtaatgcattctatctataaccatggccaagaacaagacagtcccttttcacacacataaaaataaaaataaattaagaattagatccaaaaaaaacacataaaaatggtgtgtgaaataaaatggtgttttaatgtcactatttacccatgaggaaagcttcgaggaggcgattggcaaacatgacttgatcggtcgagttagctacaccaccagattcagagacccttgtgtggatttgaatagtgctgaacataaccgagccaaacaacacaagcatagtggctgcgaccgttttcgcaaccagtggtgctcgaccttgctttgataggtctagcagtttcaccaccactcttctcgctggagtcccgaacccgagtgttaatatcaggacggcttcgattgtcacgattgtgaatagaagttgaaacatctctacgaacattttttattagtacatggagaagtttagagtggatcaatccaaaaatgggttcaagttgttataaaaagtgttgatgagtagaaagaataagaagtttgcttggtgcgatggtaactgataatatataactaaggatttggaatggaatactagctcatatgctttgtgtgctctcatgattcaaggaacggatgattttactctctcttttttttttttgtagtttaattatttcgagatttagtttgttttattaaaagaagtattaattttgtgaagaaaaaaaatataacaaggaaataacaatcggaacaaaatatgcaaaactctttatacattatttgaaactctttaacaaaaaagtatgcaaaactcttgaatttgagatcactgaattcaaaatccttgtcaaaattttgtgttattcatatagtattttaaaatgttagttaaaattcattttttatccaacatattgttttttaatgttcaagtatattcaaattaaacatacaaagactcaaatacaaaaaaaaactttattattctaaataaactttattatttctaagtaaaattcatttttaatcaacatattgttcttcactatgttgcatgaaaacggaaacggaaacgcggaaacgaaacgtttcaaaactgaaaaacgatttttttctaaaattagggtatggaaacgttttgaaaacgtatacacacacatattgtatatatatatatatatactttaaataacaaaaatctaaaacataaatatcaaatagtttaactaaaattctaaaaagtaaagattaaaaagcttaatctcaaatatttagaccatcatcttcattagttccatcaaaaatcatatgaagcatatgaaatttgattcgtcgggagaaaaatcttaaaactcgcgtctcccaaaattaattaaatcttgatattttcaaactttttaattattaagttttcaaagtaaaaagacaagatttttcgacgtgagtttccattgagtttccgagagttttcgtttccgaaacatttcagaaacgagaaacgcattgtggagagagtttccatgcaacatagtgtccaagtatattcaaattaaaaatacaaagataaactttattattctaaatacatttttaataaaaatcgaaatcgacaagatcgattttgaaatcagtgaattctacgacactaagatttgaaatctatgtagattttttaaattaaaatagaaaaactattaaaccttctttacttttgttttttctccatatatactacaaactaataatataaacaaaaatactagctgtgaaattgaatgtttctggtgtgtcatgagtttctcattcaacgatcacttgatcaaagaatacaaaattttgttaatgccaatgatttgcgtaatctatatattaaattctatttgaacattcaaacaatcgctgtatatagattccattgataagatgcaaacatatatgacattgacattttatctgtctgtgatgttgatccggtcatcttcatgctgttcagggatcttatgacacatatgtatgtacatgaacatcgatctgatttagcatattaatatatataattacaaaatactaaaattatgaaatcatcaaatactcaattaacaaaaaatatatttttcaacaaaatcaactagttgtgattataactttattttatgtttataaaaagactataagcagatatatatataaaaaaaaaaatgataaatcacactatatatgaatttactgcggatatatcaatccacctaagaattaatgaattatgatctccaaaactttgttagaaaaaaatatattatggaaaaggaacgtgcaccatctttatcagttacaaatcaaattccaaattttagctaaaaataattgattttcttttaatattccattcgtattatgtggaaacgtaatgtgtctatatggactccatgtctagcatgattaaatgaaatgaacttttgccattttaagtcgtgtctcccaaattgtctttctttgtttgcttttttatatgcatcgttcttccacaaatcctacgcaaaagtttgattgaatgcaattctaacaaattcagttgtttgttacaaataaatgaaataagaacaatcaatatttgttgacaaatattgattgtttactgaaagtattcaagtaaatcaaataaacagtaaattataaaaacacgttattcatgtgggttcactttttttttttaatcttttttaagtttggtcaactaggggtgttaccgtgttatttatatgtttttcagtgggatatcccacactaaaatttattgtcatttttataagttttcaacagctatagaaatttggcaatagcaaaaaatgaaagggattattgtttgaaatgcattttttgggaaacaagcttaccaaaataccattttgaatagtttatggattttttcatttttatacatttaacaatatacttatttacaatttttccctgcaaaaacatgtactttatatcaaatactaatttttaaaaattaaaaaaaaaaacgaataaactcaaaaataacgagtaaaaatgtatgttaaattataattttttttgcctgataaatgataaaattcacaaaatagtttaagaaggggcaaatttaacgaatgtcactctacaaagaggcatacccgcaaaagtcgatcattggtcaatactcaaacataaaaaattacaactagatgttgacagcaagaaaattactcactagcttaacgtcatcgaagtagtttttccataccactgactcaaatgtgaaccggtttcttaactggtgtatatatatctagaatttttctttcttatttttcgaccgaaaattgtaagtgctatgtttttatgtaacatatattggctttcacttgccgatttttttatttatcttttacttctgtaaaacctagtttacgtttcttgcttaaatcttttatttattttaaacatatttctcatttaaatcactggaattgatgcgtcaaaaatcactataattaattgaaatcacataatcgcttagtcaaacttgagtatcattcaaaagccttatattatatttagctttatatacaatttgttccaggctcttgtcacccatgtaaaaagcttcatatacaactgtatgtatatatatatatatacacatataacaaaatgtatatattatatagtatatgtctcttcgttcacatgtacgatattgttttttagaaataatgtaaggttaacgtatatataaaaaatggaatcaagtgatgaggcaccagttaagaaaatacggtaaaaaaccaattgacgatttttatcatgaactgtttgaaaaaaacaatacaaaaacctagcctaaaataattccaaattgtttgctccaacagtccaactgtttgaaattaattaattacacacagttagactactgtctaaaataatttattactaatcaatcttgtaaaataaatttaaatatttccctaggcattctaaacctgacaaattggctgtagaaaataccataaataagaatggttcaaatgaaaaagtattaaatgtttaaacaaacaaaaaaatcttttttgttgagacttgcacgtcatactctgttgtttcttaatctttatcccacatataatggaattagccccacgaaacttagtctatctcattaatctttctttccttcaatctgtctgttgctctctctctctctcacacacactgatcagccatgggagacgaaccacttcttcagaaagtcaagattcaagaagacattgaatccgtaccacttcttcagaaagtcaagattcaagaagacattgaatccgttaaaggaattcgtgtaaataatgacggcgaagaggacggtcccgttactttaattctactcttcacaaccttcactgctctctgcggcaccttctcctatggcactgccgtaattttcttcatcttctcttctttttttcttttctctatgttttttctagggtaaacacagaatctaatcccataattaattagttaccataagatttaaccaaaattgtaagttatagctaattcgttatctatttgaaaaagggtccaaatcaaagagaatgatgtatcaacaaggattatgccgtcgcagaaaaagcaacatttttcaaatgattgataacgacatgaatattataggtttatgttatttttgtgtaggccggctttacatcaccagctcaaaccgggattatggcaggactgaacctttctttggctgaggtcagtgctgagttgttaattttatttccattttttattgattagttttattaatttgttaatcgttgtcttaaaaatatatagatggattgtcacaaaaaaaaaaagtatatatgagatagaagtatatataaaaagtatatattagtgacttagtgtggtagaaaaaaaaaatgcaaagaatcatttatctaaaaagtaattagtcttcaaaatccaatatttgcatataaaaattgtctatttattagagttcaaattttctacttaaaagtatatgattgtttttggtaatggcgtaagagtgtgcgctagtgtcattgttaaacacttttgcagattttgatcatcttttaatttaaatattagttataaccactttaatgtgtattactgtattagaagaaaaggtactcaagtcattgttcgttcatggatgtagttctcattctttggggctgtcttaacaattggtggacttgtgggagccgcgatgtcgggaaaacttgctgatgtctttggtcgaagaggcgtaagctctcttttttatattttttaatctctttttatcatcatgactaaaattacaattccattaaggagtttctttacacatatattccaaacaaaagatatatagcggtttcatgaatgactatacgcaggctttgggggtttcaaactcgttttgcatggccggctggcttatgattgccttctctcaggtttctaacgatcattttatatatctcaatacttatttaaatagtgtttgtttgtcacgtatgacataagcttaagcgtttgaatgtttcaagttttaccaaagaaaaactctggtttagagttccctcgactattattctagacaaaaaaagatctttcaaaatcaaaagtttatacgaatagttaattgtttgctgtttcttaagtattgtttatcatatataggcgacttggtcccttgatatcggaagactttttctcggggtcgcagctggcgtagcttcttatgtggtacgtagttaaataggtcgcctggtaattactgtttattgacttttactccaagcaaccaatttaagtattttttgtcattaactccacgcatctaatctcaggtaccagtctatattgttgaaatcgctcccaaaaaagttcgtggcacattctctgcgattaactcggtaatacactggaaaaaaaaatttaagagaaattttaattttattagtttgaaatcattcattttttttttttttggttgatagcttgtgatgtgtgctagcgtcgccgtcacatacctccttggatcagtcatttcatggcaaaaattagctctcataagtaaatactggactctgcctatgaactaattataatatttaaattaatttttaactatgttaaattaatcaagttgacaaaatatttacttggtgttgtttggagttgtgcaggtacggttccttgtgtttttgaattcgtcggtttattcttcataccggagtctcctaggtggctggtaattagttaattagtcttgttactttttagtaactaacatatacaaataaaacatattaaaaattgttactacaagtaaatcaaaccattattaacagtttggtatctttgtaatttatagtctagaaacggtagggtgaaagaatcggaagtttcactccaacgcctacgaggaaacaacactgatatcactaaagaggctgcagaaatcaaagtaaaacaaaaaaagagttcgaaaaagtgacactatacgtaaatttgacaaaaacttattttgattgttctttttttttcttcagaaatatatggataatcttcaagaattcaaagaagatggttttttcgatctcttcaacccacgatattctcgtgtcgttactgtaagaattttattaattgaaatttgaatgtctttttgagtaaaaatgcgttaatactcttgtaaattttgtaggttggaattggattgctagtactacaacaactgggaggtctcagtggctatacattttaccttagctcgatattcaaaaaatcgggtaaattaaaactcaaatgacttactgaaagagaattattttgtctaatataatgaccaaaactatactatttaatatgcaatttaattattttgtagggtttcctaacaacgtaggagtaatgatggcgagcgtggtgcagtctgtgacaagcgttttaggaatagtaatcgtggataaatatggaagacgatcccttttaacggttataatttgttttatatccttttaatcagtgaaactgtataatatatagtgggtaaccagaagttaattaacgttgtttctttgttctttctgtgaattacttatttacaggttgcgacgatcatgatgtgtttgggctcattaattacaggactatcgtttttgtttcaggttttttttttcctgaaataaaattacttattagttaaataaaaagttatatgatttatgtacattctactctctttttttagtttgtttttcttgaaatgagttttattactattttttttcttttcaatataactaatacaatcaaaactaatatgcagagctatggtttacttgaacattacaccccaatttcaacatttatgggagtgttggtacgtactactacataatgatttcattctgtcctccttttttcttttataaataaaatcatgtcctccttcttatataaacataatgatatatgaatatttcgttcctccttttttatatgattacatagacataatcatataaaatcatgtcctcctcctttttttttttcttttagacaaaaaagataaaaattaatatttcttaagataaattttaccgactcttgttacaggtttttctaacttcgattacaatcggaataggaggtattccatgggttatgatatctgaggtaatcatttgtcttcagtttgatcgtaaccagatgaatagttcaacaatatatttatgttcgacaaaaatattttgtatatagtcaaattcaaaagcatatataaagattatgaatatctatgaccaggttagatgaataatgaaacaatctgatacacagaaaaaagaagtagatctgatcatctgataagaaaatgttagaataaattatttttcgtataatttaaaaatagacccttttggtatgataacataatacaatttattatttttaaaataaagtataacataatgacttataaaccataataacttgataaatgaagtggttataaattgttttaaaacgtggctacatttaaaaaacaagaactcgattttatttttatgtcaataaaaaatgttccttattggtctgagccagtgaaaaatattactaagtgttctgcttctgtatgcagcatgcaaatagttattacacttgagaatattagttgggtgctaacattaatttaagataacattaatttaggatataatctagataaaaactaactagtagttttcaatatatctaattattatatttgtgggataattagatgacaccgatcaatataaaaggatcagcagggacgctatgcaatttaactagctggtccagcaattggttcgtctcttacacattcaacttcctcttccagtggagctcttctggtaatttacttcattttacaattgtctctaagtaaataatgcatttactaacttttgatcaaattttaatcatttgttgatatttaaatcataggtgtgtttttcatatatacaatgatatcgggtgtgggcatcctgtttgtgatgaagatggtacccgagactcgaggtcgttcgctcgaagaaattcaagctgccattacccgataactttgtaaaatatcatttacttggtgtcaaaattcatataattgtatacatggcctccctcacttatcaatgaattcagaattgtttgtcccagtttttaaatgcttgattttgacatcattcaccaaacaattggctcttttattttttaaggttggttggttcatgttttgagatacatttccatacaagatataaatttaaagcttgaacaaatatgtactatttgagtttaaatttttggatggtaacatatcaacatcactaacacgaaatcattaccgctttttgccatgatcagtaataatttcaatgaaacaaaagttaatttaccaagtatatatatacagtttagagtacgaacattggaccatcggagttattgctatatatccaaccatggccagttaataaatagtccagatatatgtggtattctatgttattataaaaatattttttaccactgtcaaataatgttgttgttccttttggttacgatccgaaaaattaaacagatctaaaatcctaagaaaaatcgttcacgtcagtgaaatagtcaaatataaagccctatttagatgttcaatgttctttttttctctcatatttagagaattagaggtattaatttcttgttcatttttagtttatatttgggttgtacggtattaatacctcattaagaaagttgcatttagagtttgattccattcaatgtagacggtacgtttcaaattcatctaagaatccacctaaaatttattgatttcaaattatataaatttacttggaggatgcatctttatatttctgcatgcttttggaaatagggctttatttacgtgtttatggttataaattaaatggtcaagtatttctcttcgtgtttacgttgagtaacagtcaaatcgaattgaacatgtcaaagaaacactgaagaagatatagactggccgggtcaccaagtagagctcgattattttttctaattcattcatttatttcctcaaaggccgataataacacaaaatcatggaccgaatcactttagatgaataatatattaatcttttttcataagactttggtacgtaaaacccattgccatgcattccattccatggtttaacgtcaagatcttatagcttctcatcaatgatgtccaccaccgaaaccacctccggcaccggctcccccaccgaaaccaccaccaataccgcttccgcctcctcctccaaacccaccaccgccaccagctccacctcctcctccgagtccacccccagcaccagctcctcctccaaaccctccacctgaaccaccaccagccccaccgccaaatcctccaccagcaccaccacccccaccaagaccaccaccgctcccagctcctccaccaaatcctcctccagctccaccaccagctcctcctcctaaaccgccaccgcctccagctcctccgccaagaccgcctcctccaccaaagccgcctcctccaccaagaccactgcctccaccaataccgcctcctccaccgagacctccgcctggatggtggaagaatgtcttttggtcctcgagaccactcttcagcttcctgttagcgacactggcaaatgaagtgaaagcaaaagagccgacaagtaaggcaacaagaaagagtgacttggaagccatgtcgatttttgtgttttgcgtatgtgatgatgaggaactctatcagccaataaggtgtttatatagaccatttggcatgagctgaagaatcaaacaattgaataaaaagagggagagagtaaagttttagagtgagtaattatcattaattcatctgcccatctaattcatgttggcaaatttaatgcaatccctaactaccagtgttgacaaacatgttactcatccacatgtagtagaccccttctttattctttgtgttagtactacttaatagtactcattttcttgcctttcacatttaaatttggctgcagtatttgatgaatctgagattttagattattcttatgtccggagaccggagttatttaatgtttttgttaatgtgttttttagtacattttggtgtccaccattattaaagaaaacaacaacaaggtatctatattttcatgtttacgataaataaactttacacattacattggaagagaataataagtatgaaataatttgttttcactacatttcttgacttggacaaggttaatttaaattcgggatctgcctcgcactggcccatggtataaacaatctcgttgtttaatgcatttacgcgagtaaaatattcatcatggtgactgtttgtgatttttataggaaagagaataattatgcaacaagccgatatgttttcaaaacttggttctcttcttggattgaatgctctcttcttaattacgttctcatccataatttgaacatctaattaataataaaattgtcaaagttccgtggtcccagtagactattggcaataagttaatatatgaaaataacttaaaaccaactttaagtcaaaatttgatcttaatacgatttaattagatgtctgaaaaaagtttgcgtaatcaatagattgtaaatctagctatgattagaattgttaacacattgttctataactcaaattactaatataaagtaatcgaatgttacctattacttaagataaaattttacggggttaaaagtctgaaaagttatcatttaaatgtggctaatagttatacatgaagacatgatacatggtacaatactacaattacaatgaccttggatctatataccatagtttgtctcttgaaaccaaaattatggagatttttattggtgatctcatgtgttttactaatcatccttttttcttacacaaatcaattatccgaatatttacttacgatataaaaaaagtcacgatttcaaataagttttagttaggatatttaatatctatggatgttttaaattatcgaataacaaagaaattatttaataatgattgattttccatattgtatatatatatatatatatatatatatatatatatcaatattggttatgtatgatatatacataattttattaacgacttcattttatacagatatttatgcattttttcctttaggacatactccacatgtaaattttatatttcacaattatttgaaatttagtgaatttaccaatcgaatgaatatattctgtaaaattggttgctgatggaaattcgaagaaaacaaggccgttcaaaattgattgaaagtgttaattaaaggatgtttcatattggtcacaaatgattgtacaatcaaattattagtcttcatgatataatagaaattctataaattaatatttttaaaattaataatttttgtcggtcccaaatcagaacaatgtaaaaattaaccaaaatcgataagataataaaataataattttttttcaaatctctatataaaattatggtctaaataatatcataaatattaaacatacattctaagacaatttaatataatataaatctagtgttgtttgtctccgcttaagtgtttacggtaatgtcgtagatataaagacataatatcttgcaaaaagaaagttaataaagtaaaaaataaaaatttagtattgtgtcttccataaatatttttaaaattaatattttataggataatataactataaattaataaattttatgatcgaacattattaatttatagagcttccactatataaatatattcgatgaaaagaaaataaataaatagaaattctaatttctgcaatcggacggtgagaaaacgtggaaatttaattcgacggtgacaacgtttgttcgataattagtttttttttttttgtcgattgtttttctttttcttaaacgcgatatttaacttatctatataaaaaacaaattcccatcaaattcggagactttggattctctgtttcgcgcgcttcgcagttcatcttccccaacgactctgctccttccccttctctccatctctctctcgttctaatcttcgacaatggaggaaatggaagacactgaaaccgaaccacaggtatcttcgattacatattctctctaaattcgctttctcttctgattttgccgttcgtcgtcactagagagagagcgattttatgccgattgtgatcgatgtgtaaaaatttgatatctagttagggattattgaataaaaacctcggatctattgttgaatcgatctcaatagtacagacattgataaaccctagctgtttccccttttcaacctcaaatttgattaatcggaagtagttgttccgccgatttgatcccagaaacactaatatctgaggcactgtgcattaacacagaaccaatcctacttttactctcttgcttcgtatgtgaaattgtgaatgtaccaatctgttttcaatgcaatgcaggtttacatggcttgtattcagcacggtcggaggttagcaattgaattcaacttctgtgcacaatttttgagaaactttaacaatttctcaattacaagtggacaagaaagagcatatgagtgaatgcttatgctcatattcttctctttatgttgttttagtaaggatcagtgtctcacttaaacattctcttctcagagttggagtttcttactacgactgtagtgtacgccagcttcatgtgctagaattttgggaagaagattgctcagattttacattgatcaatatgggtataacttttcaacttcaaacagaattgatatcattgcatgtcgagtcttgccattccttactatctgtaccctactctaaatgaagtttggtgaagcaatttcttgattaacatctactttgcagcacttttgttctgctacactgtccctataacatttgttttttgatcgcttcatttgtcttggttatatatcttcagtaaaatatcaagcgaagccatcgatcatttacgcaagcacgaaaagtgaagaatcctttgtagctgctttgcagcagaatggtatggtgctatctattttgttgaaatatgagtccttaagtttatggtcttgcataattacattgtttctgcagacggaactgacgagactaccatggtaaagctggtaaagagctcaacattcagctacgagcaagcgtggcacaggtacagaaagtttaatcaactccatttttcaccttatttatgtggttctggttagtcctattacatgatgaattccccatgaaaaatggtctagtaggaaactggttcctgcagtttcagtttcttgactcaaatgtaatagcttacttggcttatgatatttttatgatacctgctgttttacactgattgttatcccaatattgtgtagactggtatatcttcgagtaactggaatggatgatggattgaacatcaaagaaaggatttgttatgtaagtttcagcgagggaaatgttaatccctttttactaaggattttgatcatttggttattgtattctccagttggaatctcaatcataatgttgaattaattgatattttcgatgtcacaatgaaataatttgacattgtagctaactagttttatggtccttatctatctacaattgtatgaagtttcttcattttgcttgtaaatttcagctgagttccatgatggatgtgggcagtgaagtccaagttcgtgttagtggtggtcttcttgctatattagaaagcgaacgaattgtagaaaccctggaacaaaacgaatctgggagtgcatcaatcgcaattgattcagtcatggaagtaccattgtatcctttactttttctgttctgtttcttatgtcttgatgatctatactttcctgaattattgggatgataatgctgcatgcaaatcctttacaaaatttataacaggaacaagtttcttaaacttgatgctgctgctcacgaggctctgcagatatttcagacagataaacatccaagccatatgggcattggccgggccaaagaagggtaaatgactaaatgccttagttaatctgtggaatcttatatctccttttcctactttgacttgtaatcttcactgaaactttgaaatgaaggttctcggtatttggaatgatgaataaggtttgctttccttgcattggttcattctgggttatgctgcttgcatatatgatttaacttaccttggcctatttcagtgtgccacgccaatgggtagacgccttttaaggtaataaatgaaaattatagatatatgcaaactgttctgaagctgatgtagtcttacgacattggtttccttctctctatttcagaagctggtttatgagaccaattttagatcttgaagtgttagatcgccgtctcaatgctgtatcctttgatctcttgtgaaggagtttgccttatgtcaagcagaataggagttaacaatcaacatcaaataagagaaaccaatagattaaactttatgtctgctttctgtagccttatcagcatagttttaaccgatcgtcatttgttctgaacgaaaaaaaaaattgttcgaccactaattgacaggggtgcctttcactgatgttctgagaggtttcttttgactgtactagatttcctttttcatttcttcagtagagctgatggcatcattgcgggagacactgaaatcagtgaaggacatttcacatctactcaaggtatgtaggtaccattattctatataatatagttttagcatgcctatctcttttagccataagagcctgtgaaggagaattaaaattactaactaatggtacagagaaaactttccacaaagtttgcggtgaatatgttaattgttaatctgttggtagaaatagtgttatatgagcatattctgcccagacagaggacgtggatatattgcatgccaaatatcttcttgtatgccaattctgtagattccattttagttttgataacactttttttttttttttctggcattcttatgttaaaacaagaaattcaactctccgacgtccctctgtaccagtaacgactggacagctttcttgaaggtaaattccattttcttgactatcatctttcatttagtctataaaactagtcttccaagccccaatataatgctatcttattgtgtgcattagagcataagtgcgctcctgcacgtgaataagatatttgaagttggagtttcagaaagtctcagagagcatatgagacgcttcaacttggacattattgagaaggttacttatgttttatcaattgttattctcccactcttcaatccactttcgtggttgttgctaagttctcttttcatgttgcaggccggcttatgtatcagcacagagctagattatgtctatgaactggtcagttgattttacgttctgtttcttcaattccattataatccatactctccttttcaaaagaacagatcttgaattcttgatgctttcaaaattggggtcttaacatctctctataccttttcctcctttgatacatttcttattcctatatcatccttagaaattttaaaccttaatggagttatattgttaaaaaaacgggaaagtcacaattttttgagtggctaaagaaaggtcagctaagatttattctgaaaaagtcacaattttaaggctattcagaagttggataccccaagatttgagaaactgggttaaacaaattcagcaggccttagtgagagataattatgactacagttagtaacaacagacaataactccacaggtcattggagtcattgatgttactagaagcaaagagaggggatatcaaactttggttaaagaaggattctgtgctgaggttatcatagaagttcattttgttcaggttgtcataccactaatcttttgttttttgcaagtaactcatttcttattttaccagttggatgagctcaggcaaatatatgaggagttgccagaatttctgcaggaggtttgttctatgtgataagttcctttaattgataaatgaaggtaaactggaatctctcctaaatgattctaattactgacaggtttcagcgatggagttagaacactttcctcatttgcataaggaaaagcttcctccttgtatcgtctatattcaacaaattggtgggtctgaagtttcacgttttaagtttgacataagttctatacagtgttatatcctcaaaggtttatctgcgctgattttttaacataattaccttttagaatttcacctcatccctaagaaaggtgaaatctagctgcacgaattcattttttggaaccaccatgtcctggaattatcagctcaactatggtgtctatgcttcttgattgctcaatagcctttcactttatgatgcgtctttaacaaatcgcgaccacatgtatttcttcacacattgaaaacagttatttcgtttctgtaaatgaatatatagtttatctgttctgcagggtacctcatgtgtatctttggagaaaagcttgatgaaactgctcttaataggcttactgaatttgaatttgcggtacagtttgtttgtgttcaaaatcttaatcccatactttgggcactatgcatatatgtcattatgaaacagaagttttaatcatatctatcttgtgattagttttctgatatggatggagagactcagcgattcttttaccatacctcgaagacacgagagttagacaaccttcttggagatatctaccacaaaattttaggtatgttcttcttgctggtttatattttccatggcgtattcttcttgagtacaatgacgttgtttcttgttttacaaaattttgctgacagatatggaaagggcaattattagggacttgctgtcacacacacttttgttctcggctcacctgctgaaggcagttaactttgttgcagaacttgattggtaatcaatattcaagagctacggatatcccatatcatttctagtctctcctcttgaagaaaagcaacacattttcacgtacctattatctaattagctacttatgagaaatgactaatgacttatccattattcttggcttttctagcattttatcgttggcttgtgtagcccatcagaataactacgtaaggcctgtcctgacagtagaatcattgcttgatattcgaaatggaaggtgaagttgactctatcagctgcacttatgtcttgttgttgcatttatacataaactccttacgaaaaattatatctgaatatcaatactggtgggcaggcatgttttgcaggaaatggctgtagatacttttatcccaaacgacactgaaatcaatgataatggtgagctgaatgttgataaagttgttttgactatttaggcatgcattacaacttaaacttgtgaactagtttttgtccatcacctgattgcaagcttgtctgtcgcaggacgaattcatataattaccgggcctaattactcaggaaagagcatatatgtaaagcaggtcggctttacttttctaagtcttatttctcttcgttcaaccaaagtgtactgcatcatcatgaattgacaactcaagttctgacttgctatttgtaggtggcgttaattgttttcctatcccatattggaagctttgtaccagcagatgcagcaactgttggtttaactgacaggtctaacgtcatacattctttttgatctttttacaatcgctttttatgtatattttcgttactaagattagtcgtactacaacaggatcttttgtgcaatgggaagcaagttcatgaccgcggagcaatctacattcatgatagatctgcatcaagtaggaatgatgctcaggtattccaaactgcttctatttttaacttgatttcaattagctccactactgataggccttgtgagccggtctcagtctcttcagtcagttagtgacttctagttcacgaggtccattatttaagttcatggggacccaagaatgaagatatcaatcaaaattcaactgtgcattgctcatgacttatgatcgtgttcctaatcattgtgaccgatccaaattctccaggcaggcaacttcaagatctctgtgtctcttagacgagtttggtaaaggcactcttacagaaggtatggatttctccgccctctgcattggcataaaaggcatgtgtttgtgaaaacttctgccttacccacactcttttttaagtacagatggtattggcttgcttggtgggacaattagtcactttgctacatgtgctgagccaccaagggtaccgtatagcgttctcttgtctgtctctaagcttgtagattcttttagaaccctaacatgacattgcctattgctgcatgctttcaggttgtagtatgtacgcacttgactgagctacttaacgagagctgcttgcctgttgtatgtactccgactcaatttcagatagataactcagcagattttgaagtggttccttgcttatagtgagagtctatctttttttactttttcatttcagtctgagaagattaagttctacacaatgagcgttcttaggccagacacagaatctgcaaacatggaagagattgtttttctttataggtatggagtctcattgactagcattctacctaaactgcctacattcttaagacttccatgttttgaccaatgattttgccggcaggttaattccgggacaaactttgctgagctatggtgagcatttttgtcctttgcgttattgtctacatgatcttcttgtgtatacaccgagcttcatcaaacctatttatgtaatgcaggccttcactgtgcgctactcgctggtacatttaggaagattactaatatctttaatgaattgaatacaatttttgatggatctatttacgactgtggattatagagtaacaaaaggaaattttcactattgttgatgcaaggtgtcccggaggaagtcgtgaagagagcagccatcgtgttggacgcctttgagagtaacaacaacgtcgataaactaagccttgacaaaatatcgtctcaagatcaagcattcaaggtctttttgctctctctcacttacacaagcttttaccccctttatcttcttctgtcctctcaggccttaccaaacttttactgatttcgaatgaaatttgcaggatgctgttgacaagtttgcggagcttgacatcagtaaaggtgacatccatgccttctttcaagatatcttcacttcctaaacccttacttaaaagtcaagatc

SEQ ID NO: 445 - DNA, 81677 bp, Arabidopsis thaliana
gatccaagcttgcggaaatcaagtgaagacgtggagtatccgacacgtaccctaagttgctgtctactgggtcggtactccgataaagatccttgttattgggccagtcttatttcggactctttccattcttcttcggataacattggtttaatatattttgttcattggtcatggaggattcaatgcaactaaccaaagtttatcattagctttgtttcaatgaatcaataggagaaaattttctttgatgccctacacataactaaggacgtgataaaaaatggccgacatgatagaagagaagagacagagaaatactcttcattctttaaggtctctcgttcaataatatgactcgtcgtcggtcaatatcttcaagcgtgggaaccgaatattgtcgcacgtgccagaattacatgacaacaatgatacttttttttttttttttttttgttctcactcattttcaagttacagtctttctctgaatttattatcacacaaacaaaatctcttctaatgtcctgaagacgcaaacattctcgattccacgtctttttgcttttccacagaaacccaatttctcggatctgggatcttcgtatgagctggtgttgttgatccatcttttgtgatacgaatcacacaggatcgccaatggagtcgatacttgctcgagccttggagtatacactcaagtattggctcaaatcgtttaccagagatcaatttaagcttcaaggccgtaccgctcagctttctaatttaggttcgtctttatcttccctcattgggaggaaaaaaagtttgtgttttctgtttcttctgattcagatttttctgtgtgcagacatcaatggtgaggctatacatgccagtatgggtttgccaccagctcttagtgttaccactgccaaagttgggaaattggaaatcatggtttgtgttactttactctggttttctgattttctgattttgttgcttaggaacttttatggaattgtttcaaatgggaatgtctaacaaaattctgaagaagtaagaacatagctttgatttgttaaagcatgtcaagagaatacggaattgtgacagtttaagtggatagtttggataagtagtacgagttcttttgaatatgatggaactgaaaagtctttctgtttcttataacgtgtgtgatctatcttgttctccacaagcaataatttcttttttgtttccttctcattttcctcctcatatagcttccgtatgtcagtaatgtacaaacagaacccatagttgtgcaaatcgataaacttgatcttgttcttgaagaaaatcctgatgccgatgtgacaaagggtccaagcaggtactgagaccttacttccatctcttttgcttctacccagtcttgcttaacttcccagattatttattgagtctttcatttttttccccttcagtagtcagtctccaaccgcctctgcaaaaagtaatggttatggattcgccgacaaggtgagatatctcagctacttcgtcaatatttcaaaaaattattccataaagcactgaggcatcagtaggtttctacttagtggttcaaatggtctagcctactctagttaggtaggttgttttgagcttggttcattattggtctttcttacacatgtggttgaagactagctaagtatataatccttttcttttgtcgaagcaatgatgtgaatttgccacctttcttttgattcatatagttatattcattctggtattgaggtacttgttgaattatattttatcacgttgatcagattgcagatggaatgactttacaagttaaggtggtcaatcttcttcttgaaactggaggtggtgccaaccgtgaaggaggggcagcctggtaagttacttttactgcatacattgtctagatatatgggatttagcttcatctctatggggtgttggaatctcgttacgtagggttctttgatacatattactgattagattataatttatgtctttcacactcctacctgactgtaatttcattttcgttgtcctctactcggggattaaatctaaatgccttggattgttacttatgtatatagtatatctaagcttttatactttgtatctagggctgctccgctggcatctattacaattcgtaaccttgttctgtacaccactaatgagagttggaaggtgagatttgcgagcatgatgtaagaaaattgttttctggaagaattagtactctgaatgaattttcatttacaggttgtaaatctgaaagaagcaagggacttctctactaacacaggatttatttatttgtttaaggtattgatgccactctttagctagttttccttgatacatattcttgatggattaagcattccatcttagcgaaaacagtgccatatatctatctatttccatggcgcttgcttttaaaagttctttattcctacctgataatcttctttgaagataatattcttgatgtgatttttttctacatgtgatgcatatcctttcgttatcagaaacttgaatgggaagctttatcaattgatcttctaccacatcctgatatgttcactgaagctaatttagcccggtctgaagaagcaaatctcagagatgaggatggtgcaaaacgagtattctttggcggagaacgctttttagaaggaatttctggccaagcatatgtaaacatttgttttcgtttctcttttacttgtacatatgatattaaagcgggatgtaatgcattagatgttttggtacctaattcattagccttgatggtggcctcttgttcagatcacggttcagagaacagcactaaacagtccacttgggcttgaagtccagttgcacattccagaagctgtttgtccagccttaagtgaaccaggtttttcagatatattctcttagttttcagatagcaggttgatgcagatggataactaagactactcgttattctttggaatagggttgcgtgctcttctccgctttctaactggaatgtacttatgcctaaaccgaggagatgtggatccaaaatctcagcaggtcttatatttctcactcacagttgatcttgttaaaggaacggtttacatgaatttttgttctcactctttcatggtatgcctataccagtctgctgaagcagctggacgttctcttgtctccgttcttgtggatcatgtatttctttgcattaaagatgctggttagttaatttgactcaccacatgttagctaaagagtgcagtcttgcatggaaccattactcttgtatcctgggtttaacatttacggcctttctacgtttcagaattccaactggaactgctgatgcaatcactccttttttctcgggtatgttctcactgattcttaaatttcgatatagaaacaattcttgcattcacatctgcaccatggaactttcttagttctgggaaatcgtaaaccaaatttcaggaactctagttcgtatgatttagttctaagtgtgtataagtttagtacgagttggaacaagacgcacacattatctataataaaatcggatctcgggcaatgtgaggaattcataaagaaattagggatttggaccagattttctccctcgtgaaaatggttaataaaccactctaatataatgaatgcatataatgggtttgaccactcacttggttgtctcaagctctatatatctcttcccagtcatgttatgttcactagaaagttgtttgccctcagatgatttaatgcacttcagtacgccaagcatcttgaataaaatctagttgtatggtgctgaaatctgacgtgactaggcatattatacttgcaggcctgtgtttcagacggagaatcagctaactatttaactaagattttgattggtgggctatttttaaggtgagtatgcttatgtcgagattatatagtaatactcctgaagctattacttataatattgatatattttcttgtgcaagtgtggttcgctgctttaattttaaacttcttgcataatcattcatggtttcaattcagggatgctttttcgcgctctccttgtgctctaatccaaccatccatgaaagctgctgccgaagaccttgcaattcccgactttggtattaatatttccggactattttacaaaattcttctattgtgatcctgtcagttgttaagcatttttcatgctgattaatttttcttccataaatttgtggcagccaagaacttttgccctctcatatatccattggacagcggcccgtggcaaatagttcaggatgtacccttgatctccctacactctcttcaggtcaagccatccccaaaacccccacactttttctcaaagacagttatccagtgccaacccctcatggtatgtatatatcacgtaaaagtcaaaattttctctttttcacatattcttgaccattttctttttctatcctttctcaggttcatcttcaggaagaagcttgtttaagaatttcttcttttctggctgatggcattgttgtaaatcctggtgatgttttacctgataactctgttaactctcttcttttcaccctcaaagagttagatgtctctgttccattagacatgagtaatttgcaagattcagcaattgaagaagacctatccgtaaaaaagtccttcgttggagcgaggcttcatattgaaaacttgtcttttgcggagtcacctaccctaaaagttcggctactaaacctggagaaggatcctgcttgcttctgtctttggccaggacagcctattgacgccagccaaaagaaatggacagccggagcctcacattttagtttggctttagaaacatctcccaactcaactcaacttcagagtcctcgtggtccggaaatgggtttgtggaattgtgttgaaggaaaagacgtgtctatagaagttgctatggtatctgcggatggaaaacctctgataacaattccccctcctggtggtattgttcgcataggagttgcttgtgagcaatatatttcacgtgcttcagtggagcagttattttttgttctggacctctattcttactttggtaaggtgagtgaaaagatttcaattgttaaagaaagcaaacgccagaatactgtttctttgactggagggttgttggagaaggttcctagtgatactgctgtaaaattggctttgaaggatctgcagcttaagtttcttgagtcctcgtttactagtacccaggacatgccactcgttcagtttcttggcaaagatctttctgtgaaggtaacacatagaacccttggcggcgctattgcagtatcatccaacatatactgggaaaatattgaggtagattgtgtagataccgacgtagaacatgaacatgagaatagctggaacggtcacttagttagctgtaatgggtctaccccactgaggcgtgtcttttgggttgtcaacggaagacatgatgagcatagtggcagcactcttacaccttttctggacataagcataacacatgtgattcccctcagtgaaaaggatatggagtgccacagtgtaagcatcgtggcttgtatttcaggtgtacgcctaggaggaggaatgagctatgctgaagctctcttacaccgattcggaattctgaatcatgatggtggtccaggagagggtctgtctagaggattagatcatttatcttctggacctatgtcaaaacttttcaaagcatctatagttgatgacaggaaaaagggtaataagaaaacccatcttgattgtttccgtttcatatagttcatgtgaaagtatcctctatgcagattgttcttggttacagcttcaatttttgctaaccaccgttgctaatatatgcatccagatggaactccaggaaactggaatggcgatggtttcccacatttgggaaggccagatgacattgatgtctctgttgagttaagagattggttgtttgctttggagggcagagaaggtgttggcacaagaattttgaataatgaagatattggaagagaagagaggtgttggcacacaaatttccgtactttccgagtaatagccaagagtacaccaaagaacgtggattcaaatgggacagaaaaccagtgtgatgctcacaagtatcctgtggactcaattattgtaagtatctgtactcctttccactgctcaatttctttccctgaactttctgaggttaatgataaccacttcactttaaggagagtttggtggtgatcttagaaaaaccctatgtaattcttcaagcagcctttatctttctggtgtcttacgaatgccataaggatcgtggaccattttgtggtactaagcctttaaaattttatccgggaaatataggtcagtgtcgaaggtctacagacagtgaagcctcaaatgcagaaagggaccgattcttgtaatggtttgtctacaaatggagttcacgaaaacggtcaaatgcatggaggggtgaacattgaagctaatattgtggcatctgaagacaaatctgttcatgatgacttattgaactgggtggcagaaagtctgaaattctctgttaagcaacctgtaagtcaagcagagctcattgctctttgcttcttcctttttagtaaagtagtttttgtaataaaggtcttttgttctttgtgctgcaggttgaggcagttgtaacaaaggatgagctgcaacatttgactttcttgtgcaaatctgaaattgacgcaatgggaaggatagtcgcaggggttttacgtgtactgaagcttgaagaatctattggccaggcgactcttaatcaattaagcaaccttggtatacttatctcaaactccgctgcttctatttaagcttatagtttcaactttcccaggttcttggattttccttttcggcttataactcttatgtctgtatgttgcaggaagtgaaggttttgacaagatgttctctccaaaagcaagcagagcaggaagtccaaaaagctcaccttttgctgcatcattagattcaatgagagaaatttctttacgtgcaaacctcgaatctaccatttcgtccatcgaagaagcctcaatggagttagaggccaagtgttcagctctagtgtctgatctcaacgattcagaatcttcagcaaaacacgccaacgagctcaagcagaaactcgagagcttgcagagcttaatggctaaattacgaacccaaatctaaaatttatactcccaataagaagtgaagcagggcagctaattctttgatgtaaatagcatatatagagaaatgtgagaagcggcggggaatttttttgtatcctttatatataatgtggaaacgaatttttgtgtatgtctcatgagttatgagcaatgcttgtacttgctatcacccaaaaaggaactgtctttttggattcataagtttcgagaaatttttgcaaaaagctatgttttttttacgttcttcatggttgatttcgattaaaagagatcgctttttgtagctcaggtctcatcaaatctgaatccaattttcagttggtggatattggatgatgctggttgtttcggaaaactacttattaagcccttctttgtaccttaaagctcttaaattatgcagctaccaaaacgtcaagaaacaactattgttgatccatgggaattcgattacaaatgggttctgctccaatctccagttgaaggacatgttgatagatttgtacttaaaacagggagatgtgaaacatgcacgtaaactgttcgatagaatttctaagagagatgtggtttcttggacagctatgatctcgaggttttctcgatgtggatatcacccggacgcgttgttgttgtttaaagagatgcaccgggaagatgttaaggctaatcagttcacttatgggagtgttttgaagtcgtgtaaagatttggggtgtctgaaagaagggatgcagatacatggtagtgtggagaaagggaattgtgcagggaacttaattgtgagaagtgcattgctttctctttatgccaggtgtggaaagatggaggaagctcgtcttcagtttgattcaatgaaagaaagggatttggtttcttggaatgctatgatcgatggatacaccgccaatgcttgtgcagatacttcgtttagtctgtttcagttgatgctcacggaaggtgaactacttaattcaattcttcgtacatatttcaaaacttatgtgactcagtttggttatatagcttcttgtgttgttatgtgttagggaagaagccagactgcttcacctttggaagcctcttgagagcttctattgtcgttaagtgtcttgaaatagtcagtgaattacatggattagcgatcaagctgggttttgggagatcaagtgcactaattaggtctctggttaatgcatatgtgaagtgtggtagccttgccaatgcttggaaactgcacgagggcacaaagaaaagagacttactatcttgcactgctctaattacaggtttttcacagcagaacaactgcacaagtgatgcctttgatatcttcaaagatatgatacggatgaaaacaaagatggacgaagttgtagtatcctcgatgcttaaaatatgcaccaccattgcatctgtaaccattggaagacagatccatggttttgccttaaaatcttcccaaatcagattcgatgttgctttggggaattcgctgatagatatgtatgcaaagtctggggaaatcgaggatgcagtcctggctttcgaagagatgaaagagaaagatgtgagatcatggacctctttgattgcaggatatggaagacatgggaattttgagaaagcaattgatctttataacagaatggagcatgaaaggatcaaaccgaatgacgttacatttctttctctcctctctgcttgtagtcatacaggacaaaccgaactaggctggaagatttacgacacaatgatcaacaagcacggaatcgaagctcgagaagagcacttatcttgcatcatagatatgcttgcgcgcagtggctacttggaagaagcttatgcactgataagaagtaaagagggtattgtaagtcttagctcatcaacatggggagcttttcttgatgcatgcaggcgccatgggaatgtgcagctcagtaaagtagcagccacgcagcttctgagtatggaaccgaggaaaccagtcaattacatcaatttggccagtgtgtatgcagctaatggagcatgggacaatgctttgaatactagaaagcttatgaaagagagtggttcctgcaataaagctccaggatacagccttgtgtattgaactaagagaataagacaaaatctccagaaagggtatacactgtggtacaagggtggacgttaacaaggctacaaagagcatctcaaggtctcagggagtagcaacatgatcagaattacaataaaagaatggatatctcatttcttcgcactcctaattcatcaattcctacaagactcagaccgctacttggtaatcacgtcccagcgccatatagtcccgtcctcgcagcaagcaagaatcgtgctacaatcccatggaagaaacagtgtgtcagaatccaaagtttggtttgatttacagtaactattgagtcataaataacattaagaaattttcactgcattggtgagagagaagatggatttataccttccatcgacagacatggctgtttgcctgattacagactttgattgattgtgtgataacctatatggcaacagaaaatcatgtcaagactaaaacatttcttaaagatcaaacattgtatctgaatccgaaactaacttactttgtaatcaaaacaggagggcaacttttcaaatcccagacataaacctttccttcctgattacctgataacaaaccagcgagtaatttgtcacaaaatgaataagaaaagttgaagtaatctatctatagaatgcaaatttgtatctaacgagctctctgattacctatcgcaacagaacttaaatggaggtcacaagaaaacttgataaaccaaatatcacacattggaaccgggtatcttaatagaacatctgaagctccctgcaaaccacaaaaagttcaactgtaaatatatgtgatgaaatgaatgattatgttgtgtttggagcaacaatgagatcctaacctcgccaggagaattctctttcagttgtggttcccacaacaggatctcgttgtccacactctaaaatccgatagaacaacacaagagtaaagtgttttaacagtacaccaaatgaattaatcttaaccatcattgacttactaacctttgagaggataaaatcaccaaaccaacggttacaatctacataatttgtatgaatggaagctgtaaatacctacatatagaagtaatgttatttacaaaggccatcaccaatatttgtatgtcacttgttgttacaagacaaggctaaaacaaaatacttacagggaattggacaaattttgtggggaattttgatggatcatcagtccatgtgaatgacttctcgacgtacgtccaaaactctatagacagccaaagaataagaagatcatacaaacgaaccacaagccatttttctcaaaaggttttttaaaatggaagtttattacaatatgtgctcgatcgtacctttcattgaccatattttaatagtggtgtccataccacaactagcaaagcggtaaatatcagacggatgaaaatcctacaattttcaaaataagatggttccccttaacattgtctctatatattattgtagaaaactaactgaattagataaaacaatattggctcaccacacttagaacttcatagcgatgacctccagctccagcaaatatcaaaatacatatcccagtttcaacattccacaaacgaacagattcatccttattcaattaaaacgtaacagctcttaatcaccaacaaataaaaaagaagtcaggatactttaggaagaaaagaaagccaagagatataccttgctagcagtaatcacaagttgaggttttaaaggttgtgtcctgatttcgttcactgaatctccatgacccacaagactctgcacatttgcgagcacagattatacaagaaagatatagaatcatttgctaggatacatagaacatccataaaaatgcaataataccttatgaatcgtttcactgttgacgtcaatgactcggattataccttttactcctccagccgcaacatatgggttcccattaacgccacacgcccaacttaccgtgtaaaacgactcttccttctgctctccagaggacatagacaaaatataaccaaatggcctcagtgaaacatcacttactttaatttgatggaaaagctaatatgtatgcttccttacatcttcatcagcataggattgcaatgctgatatggcaccatctccgagacaattgtacagagtaatctacataataagagatacaccaatggcagtaatgagattcatgaactagctaagtaaaggttaaatgaaagaaccccttggttaaagcttctatgagaaactcaaatatttctaactagtaaatcattcaatttaaaatccaacggaaactaggaaagatgaaaaaaactacaactagttaagataagtatattgagactgagcaaccaaacaaccttagtgcggaaactgttaggcacacaacattataaagagaatgagacctaaccaagtgtgtaagattacaagttaactctactcattgccgattggaccccaaggactttcacatggtatcaaagcccactaatcccaaatgctcgaccgaagacgattacaaattaactccactcattaccgattggtttttcatggaacccgagaactttacgcggtatcagagcctactaagcccaaacgggtatccgatcgatgtttcgacgaatacaaatgagcctaaagagccactatcaggtacattcggaacccacattgaaaacaaaatagagcagtctaatgtataaggtaatgacttcactctatctagtttcaaaattagaaaaaaaaataacttccacaaaatctccaatacaggaaagcttaaactaaacgcttcataactcacttgatgaccgtttcaaaaggaacctccttagataagcagactaacaacatcaaccaaagtttcaattttttttagaacagaatgcaaatcaagtgtataaggtaatgagttcactttaaattagaaaacaaaaaccatatcttccacaaaatctccaaaaccagaaagtttgaactaaatgttacataatcttagactatagcatcaagcaaagtttcaatcttttaatctcactaaaggctagaaatcagaatccaaaatcaaacacaaaaggaaaggccttaatgttacaatcaatctgaatcaaaacctaaacagacccagaattgaaaacagtgatttcgaattgaaagtcgagatcttttacccgatttccaccagcggtaacgaagacatcgaagaaacgagcatcaaggaagttgaaaacaacagcatacaaaggtttcttcccttcctgaatcctattcgtcactttgtacgatttcttattcgatggagtcaaagacccaactattgactcgttccctaaggttatcttcgacattcgatattcgaaatctctctctctgtctgactctcgcacactaatctaagctcacaagtctctcatgcaacaacaactggtgttttgtaattttcgattagacacagattcacaggttattaaaattactgtaaccgtagattttgacctcacgacaaacttttattttggacctgacacaacacacaactcaccttttagaaaaaaatggtaagaaaaatcaaatttaacgttttttaataggacttagaattaaacgttacgatgaaaaataaatatattctttgattgatacgatcgaagtttacctatttgtctttcttttttttcaaaggaatattatagatttgattgaaattttctgaaagtagtaattatttaatatgtaatcttatattattgaccattcattactattagttttactaaaaatggttaaatgatataaggtttggatttaaatggtatcacgtttttatgttttgaaaacattattttgtcaattacatacatttctcaattttatgtaattcttttcttccacccaaattttacatatttttttacctttttctcaaatttgatactcaatagctacaattccaacagtaccacatattttttccatcaagtttactgtatgcaaatatggatcatttcttctggactacacctccgagagtttatatatcatagtatccatgggtaatacgatacttatggaaagttttataagatttacttgtaatattgcattaagccaaaatggaggaacgaacttggctctataatcgaccatagaagtgctctgttttatttaaagcttactttcatctcttaccttaagtttttattttattttcttgcactttaactaaaatagattttagatacaccaaaacaaaatcaagatcaccgatataagaattaaaaaacatagatgcaacaactaatagacaaaccataaccaatttgaaaatagaaagtgtgctaagtaggtttgatgtccgcctatttgaagttgtaaataaattgatttaacattttatcctctcactgttgttatttaccatgatatctcttcgttgagagcattttacttatttaaaatgtatttaatggatttttaaagggtttatttgaatactttggaatacttttccaaataagtcacattatcaaaaaagaaaattagaagttcactatttggatataacgatttgaacatctccaaacaagataatcaaggtccaaactttgagaaactcatcgataacgacaaaatttgcgataacgacaaaatttacgatagagtccaatcaatgtttataggaaaggaagacaaaaaaatacatggttatagtttattttaatatatgttgaatgtaatatatgaaattatagtgctttaattataatttgaaataatcagtttacaacggtacaaattatataatttaaacaaaaaaatagtttaaagcaattatggataattttcgagtggtattgtagaatatcacgtgtggaaaacacatttgttcaaaaaaatttagagatctatagaacctctagttttaaaccctaggagtaaacaagtattgaaagcttttgtggttgttgtgtacttgctcgcttcctcgtacaactcttataggaaaatagcatttctcctagcactaagttctggaagcgaatgctcccaaaatctcacaactaattcacaattgctcctataggatcgaataatacgtgaaaactgaactggtatccgagtaaaaaccaaactaaacacattactcttctaattgtacccgataattttttattctttccattctaatttttttattcgattaaattgaaattttccggatattttggatatttttcaatagtttgagaatctaagtaaaaatatttgaattgaacaatatccaaaaaaatgcactttataattaccacctttgtaccaatcctattataaattcaagtaatcaatatataaaaacaaaattgtactaataaacgatgactagaagaaaaaaatctagcatctatataaagtataaaaccgaccgaaaattctagccgtagatttaaaacgaaaaagtttctgataaaaaatgattaaaaattaagcagtaaaatctatccatttcatattatcaaattccctacaaaagaaaagtgtttaaaaaaaatattgaaggaaaaagattctcttgttgtaagttctaatctccctctcagtcttctcatgttatttccatggttggtcttaaagaaatttttaccgttttttgaatatttaaatgtctctttttcaaaattaagatcgatttgtcatgtagcaatcatgatttgacgataatcacatttctcatgccttattgttgctctctaaatacgtgcttacatatatatgtaaacgcatatgtatttgtctatttgtatatatatgcaccaaagcaacacacgatctccacaagattagtggatcgattagctgcttcagatctgaaaaaataaaaactaaaacttttgttgatcgatttgcttaatctctgtaagtgttttttttttttagaaactcaaatagtcatgccctactcatattttttgtttgttgtttataggaaccttgtttttctatatgtgattctcgaaaaatgtttttgtaaattgtattcataaaactactgtctaaacttttatatcaagttgttttaattgattttcttgaacttttctatagtgaaaaatggagccggaactggacttaacactgaagttgggtttgccaaattcgactgttgagacacatctgaccttaagccctcccaccaccaccactgatcaggtcttatttcatttatttattccttattattattattttttcactataatttattgatatgagcatgaataaatatgaaaaatcttcatctgatgaatcaatcctagagagatctattgataccaccatctcttctttcatttattttgcttttgaaataattggactaattaatttcatgcttatcaaagttttttaaattctttggactattattaaattattaaaaatctctcttaaaaaacgctaatcccactgtctttttaaaggtaaaaacactaattggaggaaaaaaacattggaaccttatcatcatcttctttttacaattaattcctacatacggacaaatattacataaaatatgcattaattactagtgtaacaaacaaatatagggaaccaacgtcgtggacggcggagaagttataaaccaccgtcggggtcttttgggagatgatgaagtgatccacaacgaacctacaagaaacaacgtggagttcaacatcagaatctacaattacgtctttcaacagtttgttggtgcccccaacaccttgaactttgctccttatccgatgcctccgtctccggcaccggcacctgagactcctccagtgagtgatgagtatgttctgattgatgttcctgctaggagagctcgtcgtaacaactctacggtgatgacaaactcttggaaggaaaacgcaaccccgaagcggattcgcggttgtggtggattctgcggggggaggattgaagggatgaagaagtgtacgaacatgaattgtaacgcacttaacactcctatgtggcgaagaggtcctcttggtcctaaggtaattagtctccgaattttcaactaataaatcatgtttaaatattaattatgctgcttaataattattattaatttttaaattggtaaatgtgtttcagagtttatgcaatgcttgtgggatcaagttcaggaaggaggaagagaggaaagccaaaagaaatgtagtgattgtattagatgactaatataaagaaaataagagaagttgatcgttagttattaggcattgtatattatcaatgtccctggttaagcgttatgagagaagagctaaagttttgagagttatcacttaagcaattgtaatgttaaggtcgctcatttgcaagtcttataaaattcatgaatttgtggcttttttttaataatgaaaatcgtatttcagttacccctttacaaacaaattattggatctattcaccaaaaaaatcaaaaaaatatattggatctatagagctttactttcatgacttgaatactaatgtaaaatgaaaaatttctctatgtaaaagttacatgctgataaatgtgatttgatagataattttaacaaatgatgtaacaatattcataattttgtctttttattcgaatttaatacaataactaaaacaaatgttacttggaaacattatacatatcgatagtaatacttattcatacacagttacacataattcagatatcattgggttcatacttttatcagatttcagtttttcaataaataatataaatagtacattttggtcataaaattggtatcttgacataaaagaaattccaaaatatagttaaattttaatttctccatatctatgctattccagaaatgttgccatatattttatcttcttgtcatttttaaattcaaaagtctcgttttttttagcaatcaaaagtatagttataaaatcatatatttaccagaataagaatttgtattctacattcgacaaccaaagtaaataaatggttttactcacagcttgtgttcgacttgttgcatgtcggaaaagagcaaatttcaaagcctctctgtaacttccaaaacctaccatcaaccaaaatactaatcctaaccacatttaaatatctgtttacctcataaaacatgcttccttccaaatcgaaaccatagctaggttatataaaaacgttactatgtacccccaaaatgattagttaagaaaaaaggaagaaaaaagacttgtcaattccctaaccatcttcacaagccaccatttttactatcttcattatcgccttccatgttagaagaatcttcgacgaccgtttcctcttgaatcaccgaaccttgtttcctcgacagttctattgaatcttgagcaactttggtttccctgagtggcatcagctcctctcccactgccaccattttgctcattggctatgcaataatcaccaaaaccccaaaatcattagctaacatataccatctagacacttactaaaataaaatgaaacactaatctatacctcccaatctttgtaatcaaatctaagaacaaaatggttataagcgacctcccctgacagcaccaggtttgctgcaggagcattccttggctctgaagacaaagaaaccagttttttggggttagagggtgaaatcaactaccaaaatcagacacaaggaaggaaaggtaaatcttaccaacaaaatgagaaccattgttatcaacagttatctcaacacgtccatctttcaccaggaatgaaagtgcgaacatattctctgctgtctgagcaaatgatttcctattgagcaccaaattctcaatcttgacacgtttgtttttccgcaagatgttaaacattactgccatgttattgtctgtatcacttttcttttcagcttctgtatcatcaacctcctctggcttaacaccagcaccaggctttgtacgttttctgttgcccactctacttttcctttgtttcatttcactatacataggacccatcctagaaaaacagatacaaaaacagaacaataagttaaaatattatcgatattgtcgaataaggtataccaattccatatcctaacattaagcactagtaaatgagagaaagaaaactcacattgttgtacaaccacatgataccaaaaccgtggaacagaccgtaaacccaagatccttccacttcattgacacttgtgtattttcatcagcatcaattcttaaagaagttttgccaaacccattgatcaaggcattaacaaactcagctggagaaacaccaccatgagctgattgcgatttcaccgatgaaaccacactattcgttaaatccaaaagcgcctccgcatcagcaatctgctctctaggcttccgaactgcaataaaaatgtaaaagcaccaaaaaaagatatcatcagtgaataaaattatccttgctacaactaaaatacacaacataagaactaagaacagtttttaggttcatccaaaataagaaacatctactagtttaagacttaggaatatatatataaacgaattgggacaagtttacatttacctttctggtgcaaattctcaacctcattaatgatactgttgaacttgttagaatcaatttttgtcaagtcatctttagcatctgtaccaaaaaaaagttaggtcagaaaaaaaaccctaaaaaaaaccctaaagtagaagaaatagaatgtaacctttgatcttgtgggtaagagcaagatactgagatcttatagctctccgatcagcaattccttgttcttcttcttcctgaatcggcggttgttgaggccgtaatgaagcaattacggtcttactacgcttctccttctttacgatctttggtgtctccgaggactcatcggcttctcttctcctgctgcgatctccggttaattccgtttcccatttcaccgagtttctcatgatgattttagaaaaaaatcatctgagagacggaaaggaaaaaggtgaaacgaagagattataaaaataagaaagaaaccctaacggcggcgagaagacgaagagacgtcgataaatttcccgccaacgtcgaagtctctgctatatatttattggagtatattttttgttgacttttttgcctaaagattaggtttcggttgactatcctctgaactaataaatacttggttaactcaggctgagctatgttctgctgctctaatggttggtcatgattcatgagattttacttcccttgggtaattacaattatgtttcaaggaacatgtggatccttgataccctgtgtgaaaagttgcgtcaaggtccaagtttgcgagtggctcgctatttcatagttgtgagattaattgatgcatgaaatgatttacgtgtttaaagggtgcgaagagatcaaaccggaagtgtttgacacaagacacaaactttggaagtggcgccacaatcccactatatttatctctgtctcaatagagagaaagatcttatattctaggagttatggacaagtgaagtgatagtttatgatccaagagatggtacatgcatgtgagcactattgcaataaagatgttcgatgtgtgtgtgatagattatgtgatttatgtatataactctagctcctcttgggtttatgtggtatgactttaaggagaaggattggagacttgttaatggtttgaagcttgacaagtatttgtgctatcaaaatctcaatggctgaattaatatatataaaccataatatggacaaaaaaaattgaaatagataaatattaaacatatgaatattgttcaattaaaaagacaatcaggaaaaaggtatttaagaatacctcacatgtaaggtcctttttttttcttctttcttttttttggtgtttggtttggaaatgtgtgctcgagcactcgacctcgtgaacacaagcactgacccatgcttaaatgttaccaacgagccacaagcgacgagaacgttaacaatcaaatatgattattattatcatgttcctattgtaataatagtaacctctccaagccgtttcaaataaggatttgcgtcattgcgtgagtaaagaagatagaaacagatataaaaacaaatttagtttaatgatcaatcaaaacttaaaatctaatctaggaccattttataattacaaacaaaaaatgaaatatatattgttcaaaaaaaaaggtatttaagaataccttacatctaagatcttattttgtttttcttcttgttttgtgttcggattggattgtgtgtgctcgatcactcgagctcgtagacacaagcattgacccatgcttaaatgctacccacgagccactagcgataagcacgttatccatcaaatacaattgtaataaataattatcccaccattccctaactttgaggtagttagcgtgaattacaccaaacttttcaattgtaaaagtcaaactcaacaaaaacacacagaagaagagagcttgcaaatatatttatattatgaaaacttacatttagtgttcgttcatccccaagtcgggtgtgtaactaaaagctgatgatgacagagagattcaccaagccgagacaaagacacacagtaacagagagtttttagagactcttacagacacatcataacaagcgatagagacagagagacccaggaaaaaatattacatggttgagtgaatgtaagaacacaaaagataaaaataagagaagatgaaatctactaccaagactttagaaccatatggatacatcttgctgcttctgctgcattccatccatcgttcctactactcctggcatcgacatatcatctctgtaatcgaatgacgccatgtcgaacggtgtggaatcaaacacaagctggaacctgttgccgctactgttattgttgttgttatgtgcagcttcaaagttgttgtgatctgcagtgtcgaacttaaacacattgttgttgttgttgttcccttgaaaaaacgtttgattgttgctgctgttgttgttgtttgctctgtttgggatgttcaagtcttcaaagaaacttccttccaccatgtttcctgggaactggagatgttcttgatggttatggactgtgggttgaagcagtgacacgctttgattttccatgaccatagaggtttggttgctctggacatttctgtcgtacatggacatgagctctgagatcatcttctgtccatcttcaggaactatacccgttaagtcaattggttgggctactgagttcactggccttggctgaggaaatccaactacaggcttaacttcattgacatgaaacctggatggtgctgctccatacggtaagcgactgtctcgatgtggacatgccagttgatggttgtctctcgaattcctatccagaaatccccggctgatttcgctgtgcgcacacccaagattctcgcaggtgaaaacggttctgtccataatagtgttcagatctctgtttggctttctctttctcatgaattccgagtttcctgctgggacttcttctttgacaggaaagtcatgcattttagcaaccatcccaaagtttgaagaattcataactttttctggcttgagctcttccacttcatagtgagactccttctcgaaaccttcaacatcgtattgactgcaatcattcatcagaagcgagcaacttccaccagacagagaaagaggtggacatgactcgggataaagctctctagccaaggactcttcttggttaataatagcaagccaggtagcactctctttagcagtcatcttatcctgcaaacatttagattgcctcacgagcttacggatcttagcaatatcaggaaacatatgcttgataaccgcagtcaaaacgccgactttccacgccttcttcaaatcatgaggcttcttgtaaggtgcaggaccttgatctttaggcaaaccaagttgaggccaccaatcctctttcccattaggccaccacggaggaggaactcctttctccaaaggaaaacgtctctgaggaggatcacagtgttgcatcaacgcagacaaaagcgatccaagagtcgtgtcttgaagctcttgcaaggtatgaggagtcggtccaatcgggttattaccttcatgaatccccgggatattattctccgcttgatacttggtaatagccgcaggaccattacgatcaaacctaaccttatctttccaccactcccttaaattatcagaagcaccagtcacaggcttcccattctccggaataatcccataaacaaagccttgagctttacaaacttccatcatcttcaacatatacttcaagatcccatcttgagctctagacattttcttcctcctagcttgctcttgagactgcctctgtttagcagcatcaacaccttctttacccttatcctgctccttgagacgtttaagccgcattttgtctctccacatcctcctctccaattcatcaacatcaatctcatcatcagtatagtcatcttcaacaatggaatcaggctcagcttgtggaacaggacagaaatcaacttcaccaagtgatccagaagagaagaaatccatgtttccacacattcccatctcattaaacatcattgtaacctgtaacaaatcaaatacacaaacaaaactaatcagtacaattatatttcttctgaatcaaacaacttactaaaaaaaatcatcaaaccctaaattataaaaaaggggcttttcgaattcaatcaaagttttaagtaataaacacataatcagatcgtattttaatcactcctaaactaaataatcaatcggataataaaaattatcaacagattcaatttccaaaaaaaggatgagatcttcaacataggaaccaaatatagaaaggatcatatatgaataagaaagagaaaacattttcaaatagatcaacgatttataaacaataaacaaaaattcaaccaaaaaaaaaactaaaagtagcataaactcatgaaattagatcgtgtaaacactagtaaactaaagtaaaaccatcgatctagtaaaaccctatgaataaacctatcatcatcttcagtatcaataataaccctaaaaaatcaatagaagaagaagcgtatagtacctggagaaatgaacagcagaagaagaaggagaataaaaatgatgaagaaaaaggtctctgccttttctatggtgatgggaaaaagaaggagaagataataaaccctagtttcatcaaaagaacttcgacaaaagttagagatacgagatgaggaagaggaagaagaagaagaagaagaaaagtcgacgaaagatcacgtggctagaaagcgacttttgtttatttgcgtttctttgtggagtctctctgtagatcaggaagatagatcatagtatatatactctatttatatatatatatatatgtttagatatataatatacatatatatcattttaatttcatttcttacacataaaatttaagacatcatttattattattattacacaattaatatgtaattaacaaagcgccttttggcaatactcactgctcttcgtttgtttttttattttattttattttacgcggtatgtaattaattgtttcttacgcggagttttatttattgttgtgctacgttttttattttcatttttggaataatgggttttagaaaagaaaagatccattatccatacctctcattaaaatcggtagagagaaaaaaaaacgcacactttttttacaattatattttattacaagtagaaaaagtttcgtcatcatcgacaactattatcgattatgacaaatctgttctcaagaggtgagaaaactattttaataaaagttttcatgcttcttgattgttttgtttattaattattatcacgttcttcgacacatttgttgaaactaaccaaacatagtgttaaattttatgtcttcttttttccacttttcaagtgtttgtcttaaaatatcccaaaaaacactgaaagaaaagaattgactaatagagagatgcaaatatgttttacaacatgagcctgaagacaaaagttggactatgaagatctatgaagttggatttgttgggatctaagtgttggagatatatattttctctgggttcttcacttactccactttgtgttgcatactctaatgccatctcgtagtccacctgaaaccaccacatatattcagcaagaatgacttaaaagtgatgatgcagtagaaacttatgctgagaagtgattgatgcaaaaaaaaaaaagacctgttctacatgctcagctagcttttctttcaatgtttcttttgtgattatctgtttagatactttatcaagcataactatgtcttcctctccgtaacgttttctctttgttttatgttcttctgtcatttgttttagaacctcgtacactgcccccgttgcatcggggatgtatctgcaagcatttccagttttggttatcttttttttcagggttggagcataaaatgggaaggacactgattatcttttttacctgctcaaactgcgttttcgctcttgttgttcacgggcttgcagtctcttgactattttggatttcagttggatgcagcattgttgaattgcagactgatggaaataaaggcggaaagttagatttaataagatgtgggataacgtcagaaaaatcttttcttaatgttaccttgactgcagtagctatctcactgatgtcatctcctatgtactctttccctgtccctttgaatggaatttttgtactcactatgctcacaaatactcctattttatcttgcgtctggttgatcttataactattccaactgcaatgttttgaaaatactcattaataaaaaaaagttggagaaagataccaactataacgatatacagagaggaatacagcaagctaaagaaagagtctcacttgattctttttaaggccgtcctggtgacaacatcagctccttgttcaaaaaggagaggaatacggtttgcaaaacggaatatgttgatcccctgccatttcagttccagcaaattcccaaaataacccattagatagtagaagagtgagatcgacaaaagataaagagcaatggttatggtggattcatgctcatacttagagcaaccttaaatctatgagaacttgatgacacatgaataaacaaaaggaggatatgacttgcctgtttcacgtctcttccacccaaactaacaccagcttcaacaatgaaaggatgaccttcgaagacctgagcactaaacatagtttccaggaagaagtcaacacttgatgaaacaaagctcagattaacgacaaagtaggtaaagcttgacatatgagattactataagaaaaataaactccatatctaaatcagatgaattcgtagaaaagagggttgcagtgacaacctgccggaatacgttgccaccatatctggatgtagctccttaataatccctagacgaagattgtattctcctgctgggctaagacactacagaagaaaaccgcagtatgaatagagctaattttcgaaacaatacagatgctctaacttgaaattttataagaccctcgagagagatatagagataataaagcagttcccagtgaaccttagagagaaagtagctgcttacatcaccactagggtcgtcgaatttagcttggcggaataactgatgtatgcgtaccatttgctgagatgtcacagatttgacagccatgctaggcccgaaatcaggtcccatttcccctgaaagaaagaaaacaagaatacttatgactgaatttgactaaagagatagcacaggcttagtaaatataaaaggcatggatgattttctcagaataataaccagcaaaatgaagcagaaaattgccattcagaatcagcaaacatttttagtgaatataataatccgtctaatccatcaggacatgtgatacagaatttcttaattggatatcagatcatttccattggccaagtaaaagtactgccaaatgtgatgtgagggggaatattaaacaacttcaaacttatgtaacaaatgagattgatgtcatattaccaattaatcgtgctgcaagggttttgttaatattcacaaattcattttgaagaaactgcagaagggtctttttggaagtgtctgtaataaggcgcttgataagcagcaagtcaactgacgatggatggtgctttgtctcgataggaatagggggcatcacatccgttcttcgagtaaacttaatagtgacatttttcctacatgaaaagaagatttaaaaacccgataatgctgcacataaagagctatgtgacagagcagcaaaaaaacagaaagatagtgatcttactctggtgtctctgatataaatctaaacagaaactgcgcataaggagtaatgacagccatttggcgcatatagtgcaagatctttgactggatacaacaaaaaaataaaatgtgttaaacaagtttgcgtgcatatatgtctaatgaacacttaagaaataatatacagcagaaggacgagctagaccacgtactctgtatgttgtccagtttccttcgataaccacctgtatttcagccccatgccatttctctttgttgcccttcttttcgtgcagatgaatatgaggaatgttcctgaaaattttaaccatttgaagacaattatacggcgtggaaaatccgaaggattcatagctattatgtcaaatgcccaaacataaaaaattagattgatatccgctttcgagaagctgctcatgtattcagatgggtacctgtgaatatcaatatccagtctgcagaaagtaacatagttttggctcttcatagatgacgagatctctatggggagacctgtactcattttggaccagattaaggcctgcacgccaggaaaatttagagaaactagaagggttaaacaagttctctggaaaaaatatcgatatgaagggaaacatagatatgttatgaatatgaatacaaaaacaaaagaccagctgcaaatcaaagccaatgattaaatcctcctaaagcaacatatacaacatatattccttttgtaaacctaggaacgagccatctaaaggctgcaaatttgaaactgataaaccacttcagcatttcatgcagttttacaggctaatctcagatatcaaacttgataagaatagattattaccatctttgcacccagaccaaactttccacgtgtttgcttcagtccatacttcgtcccggataaaactgtaagaagaacaatttgtaaacttagcctcaatataaaggtttattataaggttgatatgccaggctaaatcaatagaggaagtgagggtggtcattagctattttacctctcccaaacatatttggaatgtcatcatgtggcatccccttaccattatcctacattatgatcaactcaattcataactcaaaaaatgtttaagaaaacaattaggatctccatatatttatacatatacttaaaattgcatatataaatttctgttgaatcaaacaaatattattcaaactctcaccttacatgtcactttgtaatatgaggcttccccacgggcctttaaaaccttcgatactccaggctctttgtttttctttcccgatgccaaatttttagcttgtatctcactggctcgagcttcctttgctaaccttttctacataacaggaaacaacaacaaatattagaatcacaaggattacagaacagtgaaacttcttgaacactaaaaagtagcttcttaaaagcacaaggatttgatcagaacgaagaagagagtaataaacacagaattcacgcaccccacgggccttttctgtctcataatcatcatacagctgtgtgtcaacacgttcccgatcgataagaccaatcatggagttgaacttagattttacaatctcttcgcttcaaaaatataaacaagacagtcagtgaactaaacccctacacagtttctcctaccagaactaacatctcgaatcagcacgaagtaaggaacgtacatagttacttcaacctcagggagctctgaaatagactctgcagaatcaagagcattttcaacaagctctctaactgtagtataaagcgacttccctggctgatgagatccacaattcaaaattcgtgtgatacagaattgaaattacaaagatgcatcgtttgaattgaaaccaacaaattggggactcacattatcaaatccagcaatgttcttgttctccgcgaaaaactcagctggagattctgcaaattcacgaattcaaaaaagagagtcaattgagcttaatctcaattgaaatcaattgtgcagcaaatgatacatagagcattactttgcttgagcttgctctcgttgctgtccttagagttcttcgagcttcccttcttcgtttcaactaaatcatcacccgccattgaaacaacaacaaattgtgaaaatttgagtcagatcaaaccaaatgtctcagagtacaacactacaagtttccaatcaaaattcaaagcaggatctagggttttatggagggaagttaaggaaactcgatcaaagagattggttgctggggttatatcggtcattttactaaattatagcgtttgcgattggacttagtgtttcatgagttgtgtggtgtgactataagcagcaacagttgtaagttaacttgattctgtttggatccaatagagaaaaccattacacgagaaaggaaaaaaatggtgaatccttcttcacctggaattgccatactcggagctgggatcttcgtcaaaactcaatacattccgagattagctgagatctccgatctcgtcgacctgaaagcgatttggagccgtactgaggtgacatttcgatcaatgcgcttgatttttgggagatgtttatgccaaatgtctaaaaagatgaaaactttggcgaattgtgatttttgttatggttgaaggaatctgcaaaaggagctgtggagatagcaagaaagcattttcctgaagtgaagtgcaaatggggagatgagggtctcaatgagatcattcaagacagttcaatagttggtgttgctgtagttgtagctgcagaaaccatggtatgtttgatcttagacttgagagatgcgtatgaatctagttgggacagtgcataggatatttcttactcaaagtcttgtgctttaggttgaattgtcactgaagatgctcaaggcaggaaagcacgtccttcaaggtgacttgtccacttcatttctgctctgcttttatgatcgtcttctttagcaatgttattgcttcttggaaatgtgtcccaacttaaaaagctaaagatatttcttttttcttgatatgtatattgctgtcctggatcggtctgcagagaagccagctgctgcttgtaagttgatcactgctcttgtttaaaccaacttggcatgttgtttaagttccactactctagcccagagtcaatttttcctgttgagcatgacccatttaacgtgaaactatagtcttcctggttatgccactctaaagtgcagatgaaatgctttattcctattgttttacaagtttttttgttgcagcaatcagtgagatagaaactgcaatgtcaagctatagaaatatttctgctgattccccatgccgtccaatttgggctgtggctgaaaattatcgttttgagccagcttttgttgaggtaactgttacttattgtcttcttggcactacctatttgagcaagtaatattgtccttgaaaaattgaagtatttcatggttgctttcggcagttgaagaaactgatagcagaaattggagatatgatgaacgtccagcttattattgagggatcaatgaacagttctaatccttatttctcaagctcctggaggcgaaatttgagtgtatgtaatactttctattccgtcacattcttattttgtcagactctgttgcattgcatcttcctaacacgctgcttacttagactgtaacataagaattacactgacatatatatcaatcacccatatatatcttgaagaaactgtgttatctgttaatattttacagaaagttcttcatatgcagggtggtttcatcttggatatgggtgtacattacattgcaggattaagaatggtaccgtgtaacttcattagctgataagcttatcttgctgtggatcccaagtatgatatattggtttttcatgaacagcttgttggatgtgaggtaacatcagtctcagccaccactacccatgtggataagactttacctggaccagacaatataacatcaaacttgtaagtgtaaatacatcaatcttgtttcttagcacactaatttcacatgaacatactaatccaggatgtttgctctatagtcagctcgagaacggatgctctggggtttttgttatggttgtgtcttcaaggtctccaaaggcatgtagtaagacttagattttcttctttccacaccggtttagcctaataaccatagtttttcttacataacttctatttgttagatactatggagaatcgtaggactaaagggcactgttcaactagagcgtggagtggaaggtggccgacatggttacatggtttgtatactttaacatgtgaccatctgaatgatccagattttgcttgaaactactcaactcaaatggctgtgatcttatgaaattttcaggccacgatttacggggaaggagggacatcaaggaccatcttttacccattcagcggagtgactgaagagttaaaagcgttcttcaatgatatttcagaaacttcaaaggtaatcctagaatcttagccttggaatgcaggaactcataacatgagtattctattacctaaactctcctattatggatccgtttcaggagcaagagcctcgtctatcatatgtggaaggtgctcgtgacgttgcagttcttgaagcaatgctcgagtctggtgcgaaaaatggagccgtagtccctgtcaacaaattctagctttgaacctttattaagtacgattagactccaacataccgctaaagcttttgctggaataaaaattgttaccgttcaacatgataatacaaactctataatatttcttttgtaaccaatcttttattatcccaagacttatgcattctgggggattggttctagagcttaaaaataattacaataagaatttcaaacagactaaaaagcctataacccatcatctaagttaaggcattaaaaagcacatgtataattagaaacaaaaacagaagaaacacactccatggatgggtttgagatggattcagctcaaagcatgtgctcaaatcctccaccttgatgtgttgggacgcgaccaactccaacattgtgcaccaactgttgcagccaccttcttgcagttggatcctcctgaaaagaagtacacaacaagttttcaactgaatcatctcttacacaaacaatatcaaaaaccaagtcaaaagatgacgatgacttacgcgaagacaattgctaaaggatccatctcgtagcgagtcagggagacagcttgcgagtgcagcacaagccctaattaacacaaaagcttaagcataagaaagccaaacacatgataaactacgaaaagtcatttctgagtaagtttgttttgggctaaatcaaccttgggttgtctgataaacggagatagcaacgaatgatatgcttcaaaaggcgcggagaaggctgctccacaagtgactgaaccatatttcccaacactcgaccaactgcaaaaaaccgctctgctgttgtgcagatgtaatccatccccacatcatccaacagtatcttttgaacaataaatgttgccacctgtcattaacattatgttaatacgtaagcaaggggttgcacactttcaatgagtttcaatgtagacaccatttcattggcgcagaactggttctatggaaactttacaatcccagcctaggatatataaaaaaactcagaatgagtaatttttgggcttaagagaaacagttaaatgaagaaacgagactcattttcttttaggactttaaaagttaggatttggattatcattttaggtaatacattcatacacttaagagaaacagtaacaagaaaaactgagactcatttcttaatatgattttgaaagttaggatttggcttatcattattaacgatttcaaatgccaaaaaagttagaaataaaatcactaacaaatgtgcatctaaaacgaattttaagactgtcaagaaacttaaagaaggtaccatatgaacatgaaaatgtaacggtaaattaaaagacttactgtttttgacagctcactccccatttccatggtacggaggcacagaggaataatttcagttgaaagaaggaagctaatgacctctgtatcatcaacctggaaaacaaagtgaaataaggatccgatgaacctttcttatttcatacactaaccaccaaaaaagaatataaattctctactttagaaaccaagaccactaacacaatttttagtcctttgctttcagcaaaaagtaggtggggaacatcaaaaccaaagagaaacaaggaacagaaaagggacgggatggtgtaccttcacaagtgcaccgatgacacctaggctagtaagccgcaagtattcgaaaggtctggacttactcgttgtattaaggaagggataaaggtacaacgggatatgagctgtgcacaagaacgaagaaaaggcataacaacaaattcatcagttgtattgcttcacgaaataaactgaaaccatgcaataaatatacaataaacagataaccccactaactcgtatcaaatagacaagagcatataatagacatccccaatggtacatactatataacattaagcttagcctgatgaaaagaaaaagaacattacccttgagaaataacattctcgtgtcagaatgagatgctacgcactgcagagtaaaacaacaagacagaaaatcattagaaatctgatggattcagcaaaatatatgaacatgaaataaaacatcctaaataagaagacgaaatctccatgtgaacctgaagaagagcgagcgagttgcaaacacggttggactgagcaggagtcagatttggaggtgcaagaacagagtagattgatacaatctcctgcaagcacaaatagacgaaacagtcaaatcaaaaccacgctactaacaccgaataaatagcatttagatataaaagaatcatttgcattcaacgctcatcaatttaacaagaaaggaaaagcatttaagtaactggagataaccgaaacagatgcatttaagtcattacctgtaacaaggcagcaatggtaccaaaagagttccacaacaaaggcgccagatcctgaaacaattctcttttctacaaaagaaaccactaattcagatactgaaccaagttcccaaattcacatactcaacacaatttgagaaaagttctcaactttagcaaatttcaagagtaaccctagcgctcgttgacgaatcagacaaaaaaaacgactgcccagatggaagaaatgaagaagaaaacatgagagattataagaaaaccttggaaagctcgagaagagcattttctctgagttcaggattgctgagatcgagtaccaactgttcagcagaggccaaattgcgatctttgttggccggagctccggtaggattttgtgcggaggtgctaggaccaccgaaaggtgtgcccatggagagagaagaaggtagattcgccattctccagagttggttttctcgtttgtttgttaatgggacttttcaaggattcggtttctcccttcttctctcttctttatagatggcgattacgcccctttcttccttatttatttattttcatgtcaaaacaaaaaaaaatgtttagtttcaaaatagttttaatcatcactatttacgacttaaaccgttttttatttgttattcataaattataatatgtagtgatgcatatggtaaacaaataaacaaaaagtagtgttaattggtttgtgtacaaaattaagttataagttaaacaacatgaatgtgaacggaaatcaatttatcaaagcaatggcacataagcaagaaatagttctctaataatatcattaagttttttaatcattgatgtaaaatatcacatatgagtccaacataagaaaatatttttaaaaaaaattgttgactgaacgaatttagacggaccaaaacgtaagaactcgaacactaaatgagatttaaattttcaagataggcgtaaatgtaaccgatgcttctgaaacaaataataaaagagttagaaagctttataagaaaagtacaagcggaaaatctgcggttttccaagtgtgacgatatctttaaaaaaaattctattaattttcaacttttttttattcagaatatatattaaaaaactaataaaataatgttttgagtcaaatgtcactatgtttgtagtttaatttctgcatattacgtaaattttaaccttaaatctacatataaatttttgcagccattttgtgaaataaatcatatagttgagacttatttacaatggctgccactgaattttaatgtttgtttttgataattagaaagagagtcggctatggcctatgggccaaactggccaagcatgggattgtagtggttatggctcatagtgggaaggtgtttgagtaaccatgtttacatatttttttaacttgtaaacatactattactgaaccatatattattttgggcttgtggtcttcattttgttagggccatttctgcttataaacaatttactgagtataatttcaatattatttcgcggtcaaaaaaaaaaattcaatattatttctgtgtcaagtttacattttatgaattgatttccaataaagcatagcataagcaaaacaaaatacttgggacttgaatgtttcattgcattttaatttttggaatatcagtgtcataaagcatagtgtgtttgcagtaagcccactggaaaaaaaatcatatgtaaagagtgcttttactaggcccagcgggaaaaaaatattttgacccaaaagttaacaaaaattaggactgtttttatgtgagatttcatttgttaattgagcatccattttgtaagtgctcaattaacaaatgatattttgacccaagttaacaaattaaaatgtgtatgtcacaccaatcaacaacataatactataattcttatctaccaaactaaaaccacaaacatagattttagcataaaatacacaatacaaaataaaactaaacgtaggcatattataaaaccgattcagagcataaatttaggtttattctatgttgaaaatagtattttgattttttttattctatgggtttatgaaaagatttatccaaaatagaaagaaataaacaagaggagtggttgaataaattgtactattttggagggttcgttttcaaaattagaaagaatacagttatagatacgaaaaatatctgatcctaatcatcacttcaaaatatctttctttccctttccactttttcgcttacactttccccaactcatcatcactctaaaatatctcccaccacataccacttaacccgacccgacccgaccggaaaacccgacccgatccatcccaatgtcaggagctaccaccgcttcctccggagaccacaacaacctccgtctcccaactccgacgcttgacgccgaatcgcaaactctgctgcaatcgatttctgctgaagggggttacgcttatgctcgcatggcggtgttagcggtggccggtgaccaaagcgcggcggaggcggcgcgtgatatggcttgggagcaacttcactctggtccgtggcactcggttctccccgtttggcgcgacgcttactcaatggcttgtctccacgtagctaaaatccatttcgccgccggcgagtttggtgaggcgcttggtgcgcttgatatgggtcttatcatgggaggtatgcttctccgcaaggatcttcatgattctgttttgttggtctcctctgaagctcgtaagatgacgaagagtcttgaagaagcttctggagatttcaaaggtgagagattggtcccggaagttcccgtcgacgtcaatgaggtgagacatgttttggctaatctacaattacttgtaagactcatatcttgaaacctcgataagctctaaatgaaaatggagatgtgctgtgaagagaatcagactttgaattgtttcgtgttgatttagttttgtgttgttgttgttgttgaaacttgcaggtccttaagattctaccttgcaggtctttaacttgtaaaagagtagagaagaggtctggtttatctttggaggggtttctgcgtgattattatctgccaggtacaccagttgttataaccaattctatggctcattggccagccaggaccaagtggaatcacttggactacctcaatgctgttgctggtaaccgcaccgttcccgtggaggtgactgccatcatttcttcacttagttcttagttagcttgtgagtgttgattagtagtcattagacgatggttttagctttagttggctcctacgctgctctaagttgccatgtccatatttttttagggttcttcttaagaatgttgaatctcatagagtcgtgtcaactgtatgataaaagggtttagggtctaggtttgaaataagatttgtatctaggttagattatcacataaaatcagaataagaacatgacaatttcacgagcgtaagatttctcatttttgcttcatagagatatgagtcttattaccactatttagtctgagctaataagaagatgggttggatcagaataattttttccgtagctgaaagctggtgaagtttaaaatgctattcaggtggggaaaaactatttgtgttctgattggaagcaagagcttgtgacattttctaagttccttgaacggatgcggaccaataaatcgtctccaatggagcctacttatcttgcccagcatcctttgtttgatcaggtatataagtaccgagatgtttgatgtatatgtttgtctgtactcggtgtgtgtcatactaaacctatggctattggtttaacacgaatgggcagataaatgaactgagagatgatatatgtattcctgattactgttttgtcggtggtggggaactccaatcacttaatgcatggtttggcccggctgggacagttactccgttacaccatgatccacatcataatatacttgctcaggtaactacggtgaaagatcttttccttacgtgagctgagcatggctcttgtctgtgctcgctgtctttaatgctatccaatatatatatatgtatgttctgtaagtgtttaacaacctttttcttctttgatgttcttgcataataaagcctgatcttctcgctggattgaagtttgatgactctttgactaaccaaagaaatcgtttggcctgcaattcatatgtttctagtttacggaaacttctttacttagatgctttctccttctactgaagttttgatatcatctgttcttcaggttgttggcaagaagtatataaggctttacccatccttcctgcaagacgaactttacccttactctgagacaatgctctgcaactctagtcaggtaagctttttcattccgaagtcaaatctcattttttggattaaacatacaaccgaaagctgactcgattcttctgttccaaaactgggtggtttcaaactatggttgaaggttgatctagacaatatcgacgaaaccgagttcccaaaggccatggagttggagtttatggattgtattctagaagaaggtgaaatgttgtacatccctcccaaatggtggcactatgtcaggtccttaacaatgagtctctcggttagcttctggtggagcaatgaagcagaatcttctagctcgtagcgaatggatttatttttaatctctgtttcaggttctaagttcacgttgtgtctttatgtaagaagaaactatgtagagaagaaaacaactgctccgagcatgaagatgtttgtttggtttacgtctatgttgtaaaagacaattgagagctcttggtacagacattttttaggtattggtaatgtttgtctttgtttcaagtaagaaatggtttaatcaaaatctaatcttcaattagtatcttccttttagttggcttatgtcattgtaattgcacttatcttgttgatatcattcattttatatataacttgcgacctaaccaatgctttggagttcgtgggtgattaatatactcatgccaaaaccaataattaatttcttgacacgtaatacccgcagcaactgagctgtcgcatgacaagccaaaaaaccatcaagtttaaagaaacaaaatccaccaagatgagatttttaactcgcaaagatttttgttctttgggatgtaacattaaatagtagacgacagattttatgcgaaatacaaaaactttgagaaaatagttttaaaaaagacatattgtacccctccaggtaaaaaagatctagtccaacacctataaactttgaaaactctactagcattaaactttggacattactatgtctcgcataatcgcctttaggaatgctaaggacaaaaacatgttttacagttattgtctgtgagcagtagtttcatgtggctgccgtttattacgaaaccgtcggtgctgaattagagacacggacggtgaaaaatcataaacggtaaatgcttttacaaccatttatctatatgctttgaagcccaatcttagcccaagccatgatactagaagccgaatcaaaagctaatatagggcttgattggttctccctctgccacccgcaaacgcagcgtttgcgggtggtagcggttattagcggttggcaccaatcatagaaaccgctagataccgctttggaccgcttgaaatcaccagatttcaaaagctccttcccgcaagcgtttgcggttgcgggcggtagcggttaggttaaaaaaaaattaattaattaattaaaataattatgtcttccacccaaaccttatacttattcttatcagaaaaccctaatcaatgaaaccctattctctcaattatggcatccacccaaactgacaaaaatcaaagtcaaaatcaagaatcaaacgtaagtatgatctatcctttcatccattcattagctagtgtaattctcggaatatttcatggcatcgttgtttttttttattttgtttttttttgagttttttgattgaatacatgttttgatttgttttctcgattagaaaatcatttggtcaaacgagaccacatttgcgttacttcaacgggttattgtggagaaataaacggaagaatccaaagaccccaaaatcagatttctaagtgatgttcaaaaagaaaatattcttaagaatattaacgtttggaaaaaatttgagttggagatgtgttaaaaatcgtttggatatcttgaagaaactttatcatatgtatagaggcaatccggaaaacccgcgagttcaacgttatttacagtttatcacactacttgatgcaatttttggtgatgtaccaaatgcataaagtattaaactttttcttacaaaatttatttatttttgaatttttagttttatttatggttttaattattaagtatgtttaatttttcaaatattatcaatttatcataataatatattgtattttttttcttttaatagtaatatattatatttattttggttattttttatttaattactatcgcacccgctggtttaccagtcataaaactcccgcaaacgcactcattaccaaacgctcaaccagtcgttcaaaacacttgataacgtttgaaaccgcaaccgcccgtttccgcaaattcccgcaaccgcaatcgtacccgctgcgtttaaaccaggcccatagtcaacataagttacggaaccacaactatttgcgactcgaagatgtgtatcgtcatctcataacatgattagaaaaaggattaaaatgcaagaacataaccacgtggcgtcatgttgaccctgtgatatgattgtagtaagcaacaagcttatccaaccggcaagtcgcatcggaaaatctaatcgtagcttcaattatttgcatgggaactctcccccactttcagttcctgtctctatcttaatttgtctgcaaccttttctattaccatctaatgaatgtgctcaacactataaatccatgtgtatgtttcttcatttttgtggccatattattgctacaactagttattacaaaccacacaatcacatgttactcaaacaacaaacccacatgttaaaagttattaccaatttcttacgttctcgtttttttgtgtttaagatatctaacatgaatttgacatttgttgttgactaatttgatgtagaatttcttgattaatcaagattacacgaacacaagcttcattattgaacgaggccaaagtgtctaatcttacccatatcgaattattattttaacaatttcacgtaaaaaaaaaaataaagcaaagtattgtcctttttttattaatatatttttaaaaattccctcttttatttaatatcctctatttatatgccattaacgtctatcttcttccctcacccatcaagtcccaattcccaacactgtcactcaaaaagaatcttcaaacaatgaatctcaacgtcgtcgttttactcctactccttctaatctcatccgccacgtgttgtccgccgtcagaccgccgtgcacttctagctttccgatcagctcttcacgagccttacctcggcattttcaactcatggacaggccaagactgttgccacaactggtacggtattagctgcgactcgctcactcaccgagtcgccgacataaatctccgcggcgagtcagaagatccaatcttcgaacgagctcaccgaaccggttacatgaccggacacatctccgcctcgatatgtgagctcactcgtctctccgccattacaatcgccgattggaaaggtatctccggcgaaatccctaaatgtatcactcgtcttccttttctccgtacactcgacttaatcggaaaccaaatctccggtgggattccatacgacatcggaagattaaaccggttagctgttttaaacgtagccgataaccgaatctccggttcaattccaaaatcattaaccaatctctctagcttaatgcatttagatctccgtaacaacttaatctccggtgtaatcccgtcggacgtcggaagattaaaaatgctcagccgtgcgttattatccggtaaccgaataaccggtcggatcccagaatcattaaccaatatctaccggttagctgacgtggatctctccggtaaccaactctacggtacaatcccaccgtctctaggacgtatgtcggtactagccacacttaacctcgacggaaacaaaatctccggcgagatacctcaaactctgatgacgtcgtcggtgatgaatctgaatttgagccggaacttgctacaagggaagatacctgaagggtttggaccaaggtcttacttcacagttcttgatttgtcgtataataatctgaaaggaccaataccgagatcgatctcaggtgcgtcgtttattggtcatttggatcttagccataaccatctctgtgggaggattccggtaggttcaccgtttgatcatcttgaagcggcgtcgtttatgtttaacgactgtctttgtggtaaacctttaagagcttgcttgaaaaattgatttttatatgtaatttgagttttttcattagagacattattatatttatggttatgcattttataaaaaaaagatttaaaattgtatgctacgtttagttgaattatgggatgattaacaaaatatataaacttccagtttcattcgtcacacgattgctatcatttttaattcaattgtttggttttttgtaatatgttatatgtgtacgtatacgattactataaactgttttatagacgattaaattttctctataacacacgaacatatttgataatcaattatgtttactgtgacaagagtcaatattgggaatatatccgaacataggatatacatggaaatacctacggatatgttcgtatttaatgtatcgagtaaactattttttgttttttcttacatattttatacgatatacatataactatagactaggaatgcatttagttgggtttgtttaagaacatttattctagagccaaatacacataatatggaaaaattcaaatcacaatcacatgaagaagaattaaatgaaacattaaaaagaaagcgttgtgggggtaataaataaatgggcagaggcattgcatgtgagactctgtaaagcattttgcggtgagtgttaacctcaggacctgtcgctgcttcactacatgggtctactctttatgtcactgcattcattgcttatgtctctaattacacacatttatatacttgcttacaaaacgttttgggctcatacagctttagagtccaaactaattgggcctacgtacgttggtccctatagatttttatggtttagagtccatcacaaatcttgttttcatactttgtggtatgtaaagttgagattcaaacaaaccatttgtacaacgtataaattatgtattaagtttgaacctatttgattatatattccgataaataatctgccatacatcatcaaaacaaaatgattttttttttaacatgaactaaagaagaagaagaaagttgtacaagttctttaactctctccctgccttctgttgcttatggaataaggttggtcgaacacaacatgtgatcaccttcctaatatccaaatcttcttttgtcctattaattatttattttttccaatatttatcttgatggattttagtataaaatacccattgtcaattttgagaaatgccaaactataattataggttttgtccactttctttttttattttttattcctcctttttgtatttgtcttaatcagtactactcgaaatacactttgttcactacttgtaaaaactcttaacatacttgaataggatctgttttctataattaacagaaacattacaaagaaccaaatgcataatggtatgcaagaaaacaaaccatatgagtcattgtttaaattgactctccttgtacagtgaaacttctagctaattactttttttggtgactgaaccaagctaaatctaatggaacaagtgttattcaaaataaataaattgatagctactaacaagagcgttgagaacgttacaattaatatgttaaataatcagattttaaattttgtgcaatctccaaaacttttctgctaacactttacatggatctttgtttttctttgatcaaagatcgtttgtgaaatgactttctaaggcattttcggtgtgactttcaaacgtatgtattgtaaataaaaaggacatgtacgtattttcaaacactataaatcatttgtaaatgtatgctttgcaagttttgggcggaacacctacataaaagttaatttttcattttcaaagccaaacacctatctttttagcttgtaggtgtatccttaatatgggtaggactttgttttacccgtgactttgctttttgctccatatctcaacacaattgcatctattgctatatcataaaaacacaaaaagtaagctagtcttagatccatcgtagagactcgagatgatattgaaccacttctatacatatctctccgtgataacattttataaaactataggaatgatagctagaaactttgagttctaaagaagaagagacagatttatcataacttgttaatatgataatatcagtaagtattggattactaattcagctccaggcttagcaatttcttgctttacttaaaaaataacacggaattcgaattcgaacaaacgattctccatggatatgttgtaatcaatttcataagtgttggggcttcttgacgtgatgataattttcttcgatgactagatctttgtcaactgaaacattattaatcaataaagtaatcagagatgtggcatcaaggtgccccaacacttcgttaaacatatctaaagtgtttgttgggattcacttacttgccggcttaagttcaatatcttatccttaatcgctaaaaatcatttcccgaatcactagaactttgatgatcgacgatttaactaataaagccagcaaaataattatttactctatcatagcttattaattattgtaattgaacaatgttgagtgctatcaacgtatgtgaaagaaggaaaggtatatattcaaatgtggattctcaagtgtaattatcaggtaacgtgcttatggaagtgtttatgttatgtaattatgattaacacattcccatcttattctttattattatttttatttctaccacattttcaacccaacttcttgataattcgtatccaaatccaatacccactaactccatctttttcctttacattctaaatcaaaataaactaatgactccttataattataccttttaaaaaaatcatagttttatctaaatttcgctatattttacaaatattttcttcggattgtgcaagcgaagtcttcaacaccaaaagattataattttcataattctcacacgttagggggttatggatatacattttctctacaactttgtacgtgttagattccccacacgtggattagaattcaataaacggatcgtttttacgacacacgtgcggcggagaacgtaacggtgacggaggagctgatgatggcgtcgtcctcagtttctcaaaatgttcccttatatcaaacccacctaccgttaactctccgtcatctcttaacggaataaacggaggtcgtaacacctccgttaacaaatcccacctcacacccgcgaaaaaagcgagctcttttatctccgccgcgccacggtggcaacctaaccttctattcggatccttcaccagtaaccgccggatcaaatcagtgaggtcgttgggttttccggcgaactcgggttccttcatcaacacgttacgaaaagtctccttcttgctcttacccttgaacggcgtctctccatacatcatctcgtatgtcaaaacgccaagagcccaccaatcgacggcgaagtcgtgaccgtcgccgcgaattacctccggcgagacgtactcgtccgttccaacaaatgagttagaacgttcaccggaggagaaactcgttttccggcgattaattgggttaacccgagcggatcttgttttcttcaaccctgttttgtttttctccgccgtcggcgagatcaaccgagaaaagctccgactttttttacgatcgattatcaattccgggtcgggttgatagaaatggggtcggaggggttttttaaggctccgagaaaggtcaaaatcggttaaggtaacgtgaccggattgctgaatcagaatgttctctggttttaagtctctgtaagcgatccccatggtatgaagatgctcaagcgcacagacgatctccgccacgtagaatctaataacagaggaactgaaaacgccgtcgttttgacgatgaagaagtacattaagatcaccgccggaacaataagggacggcccaagcaaagtattccggtgactcaaaagaagctaagagacgtggaagaaaagggttttgattagagtcaacggagagacgacggaggacctcgatttcccaccgtgcacggcggagagaggaagcagaggatttggggacgagcttgaccgcgaagggagaagaagaagaagaggttgaaacgacgtcgtgcgcgaggaagacggtacctgtggcgcctttaccgaggattttgagagctttgatagagtcaaggtcgagaatctccggcggtgatgatggtggggacgacggtgatggctccattgagtgtgagtgatgagagacgagtgggtctgaattttgtattgtgtctcctcttacctctatttataattataatactgttctctcggttatcgacttatcgttgtcttcgaatttgttaattatatttgtctctttagagcttttttaaaaaatgcaaaattttatttaagattgctaattattttccccatattatggcgatcaatgtctcttgtctaataaaaaaatggttacggaagatatatatgcgcacgtaatataatctagaatttcattttctttgataggataatgacaccttgactatacggcatccacctaatctacgataattgattagttaaattttctcatataaattatataagacgtttaattgatttgtaaaggtataaatatttattcgaatttgcgatactttaagaatgatattaagtttttatggtgatgaaacggaagcttctagaataggattacagatccgttgattctcagaatacccggaaatctagggtttgagagttcttctctcagggctttcgcaaaagctcttaggtttgtgaatactctttacagtggtttataaaaacttctttcaatctttcgattaatcaatttatcaaataactgaatacaataagaggcctaaaaaggctatttataataaagcacaaaaccctaaaacttagaatattttagaataattataataaataaattaaaagataataatattagatatctcgctgcatcatatggtaaggttgttttaatttttacttgtgatatcaattaatatacagaaaataatatcaaatttcgctcgaaaattcgctcgaaacttctaaggttttaagacgtcctctcaaattatttctccatattttcttgttcaatcaattttgaagttcatcttttttatgattttgtggatatatagagattggagaatgatgcaacagttgaatcttggatacgaaaaaaaacacgctgcaagtttcagtggagatttgcaaatggaatgcatgtacagtaattcagtaaagtaagctaagtctggttgttcgaaagtcttaaccaaggaccagatattcagtctcatatactcaatttgcctaattaataactcatttatagatttctaggagagtaatctttcagaaatcagaagtgtgatgagtcttaagatcaagacacttggattcatcttaactaacatcaataacattataatgcgagctaagaccacttaatactttttaatttacgtatgttcatagatatgataatcaagtggcagacgtattagtgtcatgggttgtacaatacgaatttctattaatgcattaatatccaggttgtcgagaaaaagaaaaacaaaacttagttttgattataatatatacttatgtgtatgttttttcttttttcttttctacttcacgacaaggagaaatagaaaactaattgaaaataatgaaggagtaagaaataatggaacacgtgcggtaacataatgcagtagagccaatgtgtcgcgacaagccaaactggcgcctcgcaactaccacatttaaatcaaaagctaaatctttgtttagtgttaatctcttggcacgcccgtacaattattaaacctactttcattaatccgatttattgttcctaattgtagacgtcgtattttaaagaatgcctaactcactttcgaattagcgacttttttttttaatatttatagtatggtttgtattgtttgttatttatgatatagattattgcttatatatacatgctagagaagacatttcggtacgtgtaattgtttatatacatgttagagaagacatttctgtacgtgtaattgtttatatacatgttggaaaaagtatgtttaaaaaaaaagaaactgtaattgcggatgaaataatataaagtgaagaaaataaacgagacaagagattcaatcatgtttagattttgattttattatattaagaaaataaatacaacatattcacaaacgcgtaaactaaacataatcttgttgttacaccgttccgttttattaatatgaaatcttaaagataaatctccaccttaactaaacttctctgaacctagattaatttaataaagataacctaacatgggctaaactctttctaaatctctaactctctaaatttagatttcaattctataagtttctggactaactgtcacatatgaatgttataccaacgaacaattaagctttgatcagacaagcattaaaccgcgaaactatgtttcacacaaaatctgagaaaactctcgaaaaagtttctttatgtctcaactttcttgtttttcaagacgtcttgagctcttttttatatagccaaaataattttctaattaccataggaaaaaaatttccaaattttatagaaaagtaatttttttttacatttttcctttttctttttatcaaactctaatttttaatgtctctaaattattttttaaattcttttacgtttgtaattaattttctaaacacactccaaacatatcttctcaaatcttttagaaaacgatattcacacaaaaacatcaatttcttgaataattcaatgattccttcagacgtagaaactacatattcagaaacttggtttacacatctaaaattaacgaaagttatatgttgttatgtaaggattttactttattttacaaaatatactttaatacacaaattatcaaacccgttttaatgttattttttattgaacactttgaaatagattactaatgacgattagacgatgtcttcttttcattgatttttagtactcaaacttttacaaaatagatatccgacagtgatacaattaccaatattatttggaccacgtaatatattgtagttaaattctttgctaaatccttcttaatacacacagaacacgaaaagatctggaccatctggtggatctcataacatgatgacaattacatgtagtggttgatagtaacaactaagaaaaacttgacagaaatgatatatatggtcctactatatttaggaatttttttaaatgaataatcagatgttatgaataatctgagattctttcgttctcataagttttttttggtaatcttctttcttttttttgttgatattgtttaagctcgcaaggtcatcgagataaaagatgtattcaatgaaaaaggtgtatggtgtatatattgatatattttctaaaatacatcgaacctaaccagaattttgggtagtcaatccgtttcacattttggtcgatgacgaaaataaaagtttcactataaacattgttttactacaaatttcacattaaaaagttagacgtaatagtcttgagtataagagatcgatgtagatcactaactgatatgatatgtaattgtaattctgtgaaacttaaatttctcattgtaatcttcacacattgttgaatcttaactgatatgatatgtaattgtaattctgtgaaacttaaatttctcattgtaatcttcacacattgttgaatcttatttttattttatttttgtcatgaatctattttgaagtatagatatttgggaaggaagtgcgggtaagtcacgtggtatgcacaatcgaaaaaaatgaaaatacgtaaaacagtgtatttttgtaatggtttcagaaacgagcgatagagaaatttcagaaaaaggaattttaaatgagaaagagttaccactttagggcacagtgtatctttcacactgtactctatttatttatttccggcctcttattaaattatgaacataattacccccactcaatatttttattttccattaatctatagcttaaacaatgtattaaaaaccttcattgtaaagaaagtcatgaaattttgggaatctgatgtcatgatgattacagcttatttatatttatatggcagtcacggggttaaacacccggacaaaatggaagacagttaaggttttacgagtattaactcgtgaaatgaaactttcacaagtcgtaaccataccaaaatatatagtactggagcactcgaataacaacatatacatcaatactgtattatccacatatataattaaataatactaatagtacataaataattatatcaatatttggtttattccctgttttgtgatatatgcgctacatgtttgtaacaaatactagctaaatccaactattgtccgtaaactacattattattcatataatatatttaaaaccaaaactagagtacctaagtattatctgtatatattacttcaacgctactttattgttttttttgtttacttaaaatacgtttaactgtttacctgagttgagtccataacccaaaaacagaatatacgtaccaatccgtgcttaattagtcctcttgtctacgaataactactacaaacaaaacgtcaaattcagaagagaaaaatggtagtaacaaaaagcattacatgaatcacattcttcattctttctttttggcatcaacaatcacattcttcttcttccatccacgttgtcaaatttagaaaaaaaacatacatcagttttataatttatttggatggaaagaaaaaagacttatgatgactcttgtcggccattactttttggccaacgatttttcagaagataaatcaaaagtgtattgcacaaacgagtattttaaattgttcttggcacgattaaagggagacaaaaattcgaagaatagagtaaaccatttaaaggctctgcatgatccacctcccacgtatgttttacgcataaaattttattattcgtggattctctttctatttttatttcattgttctacttctaagtttttccactagactttatagaatactagataaggcccgcctaaataagcggatgtaaaatgtaaatgtaaattttatcgataatatttaaattttgaatagtaaaataataactaatacgttgttcttgatatataattttgaatagtaaaatagtagtcttttgcattttattttattataccaattcaatcttattaatgatatttgaagtctaaataaaaacctacacactttttctttattataatttagtatttagaagaaaaaaacaaatttttatcttacacattcaattttgtaatacaattttaactatctatttcataaaaaactcgattttaattttacacacttcatcttacttgataatgatttcatgtaaaaataatatatatatgagatcaaatctatatcttagttaatattaaaaattattaacaattaacaaaacataattattaataatattttttttgttaataccatatatattaaaaatttgaccaataacatatataattttttttgttaattttctttttggttaagaaaaataaaatgtaataatttttagatatagacatatgaattagtatatgttaataatgatttattttttagttttctatttctttaagaaaaaaagttaattgatttcttttttagtattttttttttcgttttttgtgcaaattatttctatttctttaaaaagaaaaaagttaactattttcttacacatgccaacatctgatcgatagacttgacacgtggcataatcctatgaattaataactttgaaaaccatattttatataataagattttaattatatatgatttaatcactgaatgcgtagccatatagttctttttattattgatggaagcatttttaatttttatgtgttttaatcaatttcttcggtcttccttccactactaatatatgaagtactttaataagaacattatatgcgattccatcactaatatgcgtgtctatgtagattttggggctgaaaaggttttgtaacccctccactacttctatagtccactttctccctacagtcgcctcttcgtagatatgtatgtacacgtacaaataaataaaacatatattaaaactgtgtatacacatattgtatctgtatatagtgttttaaatttggtgtatgtaaaaacatgtactgaccctcaggcacacccacaggtcttttggtgggaggaaactctcggtgggaatttagatgagagtttgtggagatgaaatggctgcatgcttctgaattctgacaattaaagaattttctgtgtggaaaatagttggcaaattacgttatatcattcaaattctttaattgtgggaattttctctaataatgtcttctatgtttttgtgtagtagggagacatatgcccatgacttaggcttcgttatttgccaaaaaaacattcaaatgattatgagattgataattgggacatgatttgtttatataagaagtagcaggtttcactcgtttaataagtatatattcaactcaacttcaagtaaggtcaaactgaaaagagactcctttttttttgttgaaaaaagacactcatttgtttttgctttagctttaattcgctatatggtcaaagcgatgtatggtcagaggattttaataactctttatcaaactatatttcttggaaacactcttgcgatttgaccaattctttgtttcgccagggatctttgcttttaggacaagacaaagcttgtaacttaagaaaagtgaactgttttacaaggttgaaaagagagacaaagtagataaatacaagctttaaaaaacaaaaacaaaaacaacaacaaaaacaaaaacaaaaacaaaaacaaaagcaaaagcaaaagcaaatgcttgtatgagtcataacaaactgaagacacacaaaaaagaaaaaaagaaaaaaaacaaacaaaaaattagtcttatattccccatgtgctaagattaacaaaagttactgtcggcctaaacaagactagcatagagaaagataactaatgggccgattcaaatcaatgatgaaattagaccgaaatgaactttaagagaaagtatttagaaaaagtgaatgctcaattcactaaattacatgtgttccaattagatttagagctaggtacaacggtttcaaaggagatgtgaagccttttgattcctccccggatcccattctaattctttaggaagtaaaagttaaacatcctttttttaaaaactacaaaaaaacacctccctgaaagtttgttatttaattcaaatcatataaacaattgaagaggaaagtaaagaaggatgtaatgtggttaaacatattatttaattttatatcatataaatagttagattttttacctatgtagatattagatttgaattattacggcggttcgggtgcacaaatacataagcgttctagtttgtattatttttaggatgaacaacaaaatatcgcagagaaacattatttgtaaatcggtttatgattggtccgcgatagttttcttatttttgaatatgcaccattatatgaacataattcgtgaatggtaaataaaaagtgatttggtttacaaagagagttatctgccttaatcgctgcaactatttggacccattaattcatgtgtttgttaaagcttttgcttattatttacttgctctactaattagtttgatttcctgagttaaacaaatccggctaacaggttagtaagcgtttcagattacaagtgacagattcataattggttgggaatcgtaagcaatataactgggccaaacccatttattattacccgactaattaagcccaacaaatgtacatcataaaatgaacgctgcccattaaccgactctcaaatcactaaaatcgtgagtctattgtagatgattaaaaaaaaaaaaacattataaaaattgctatacatagttagacacaagatcaaaagtttgaatatcaaattaaaatcttgatttcagtttttattcaactacgggatggttacaatgaacgaattcatgccaaacactatctcagttcctcacaacccatgaacatgagaaattttgcgtttcttttccttacgtagtagttgctataatcatatgaacttaaaacggatatttaaaaaatgaataagataagattatattctttaagaaagccatttctattaagtaaccaatacacgccatgtatttcattaatgtttataatcacaaattcttaagataaagagagatagtaagcaatccctagttttatcggatatcttcttgagaatgaattctttaactctcttttttattagaggactattggtgtatatgagggtagcgtagactctgcgtaccttttgataaattattcgatgcggttctacgtcgattatagctatagaaaataacgtattatttaagacaacaaaatcttaataatttatatatagtattagtagtactagatgtgattctttaccccaaaactgaaatatctttcatgtgattccttggttatctacgttcacgaaaacctatatccttccttgtcttacttgatttaaaataatacaagctaagtatgtaatctatacaattaaaacaagagattataatagacatggatatactattccatattttttagcaattgggtctatagataggaattttgctgatccaagtttcgtaatctttatgtgaattttacaaaaatcgaatttaaatgagcacgccagttaattattacattaccctagtatagatgacactataactataattatctccataccgctgatcttgtaaaattgttggtaacaaatttgacgttggtgcaggccgtttgaccgatttatagaatgataaaattgacatttatatactacaagaaaacatatatatatgagtagataactctcgaagaaagttttgttttgtgaaactatcacatatactatcgatagttaatcctatttttcaaacgatcatatgcatgaaccaaaatcaataacctctactcggataaaaaaaaaattccatttcacagaacagtatgtatggtttatattattactatgtcacatgaatctccttgtgagttgtgagtaataaaaagaaaaagaaaactataaatgaacctagaccaatcaattaatcaaacgaccacctatatatatctcatgaaaattcgaaaaatgtaacagtccaaatattaactattgaaactacttaacaacaaacacaaacgccacgcccatacctctctatatgcataccatgaacgtagtcataagctatagggtcctttctcgggatcattcaatatactgctatgcacatatgtttatatctcagtgagttaggacaactaataaaagcacccctgataatattatgcggcctcgtgttcttacaataacaaaaccctatgtagaaccctaccttttaagaaaggattatataggtctttctatatacattaatatatatgtgtatacacacctatcttatttagatatatgcattctttgtttttcctttttggaacttagcttatatttcgatctcatgtagaatcataccccctacttagtgcaaatccattgcaagcacagcaaatccccaaaaaggataaaatttaatcgcactatactaatacaaattaaataatacatatataaatggtaaagaggagactcatctcgaggcgacacgagcacttttccggctattcctcccaccacacaccacaccacatttcaccatggaaactctacaaagcctttctctggattcccgtgactgtgacctctctctatttctttgatttttctcctccaagaatttaccaccggtttttcgtgatttaaacgtctatgcctccacatgcacatttttatattcatgtctatctaagtaacacttaatctcaggctccatacctttttatgactctactaattaactcgcaggcttcaaatggttctttcttcatgaagtttatatagtagtttgattaagtagggtttgaataacatttaatgagtaatttgctggttgtgatttagaaaaaaccacatcatcatcaaatatgtgagatggagaagttcgagcggctctctttcccatttgatcaattacggttttgcattattaagtaaacatttgcatttaggatttcgcataagcttcttaatggtggctaaatgttttgcacaatatttcatgcataaaattcagcaaggacataaggtataatcgtcattaatatgcttagaaacatttgtataaacgagaggattgctcatctagagaaactctattttttctttctattattacactaactctattttagagtacaattagaatgatacataaatcatgttttgttatagagtcactctattttaaagtaaaaaataaaaatatacattgaagatggtcttgatcagttaaaagtatcattattcatttagaaatttcaagaaataccatcttataatatatcaaacaatagaagattcaaccaaacaaaagtaaatttatttaaaagttcaataatttcatatttttcttaagtaaacagaatagattttggttttaaagattaattatctttataaaaaaaaaggaaaatctaaacagcttaaaaccaagcaaaacttaattagaaatatgtttttatttgcgtccactctaattagaattattattatttgactgataataaactcacgaggaaacctaacctaaacgtggcagtgtaataataatatgagaggaggacggcaacaaaaatctgaacgatgggggaaaaaagaaagaaaagagtattaaccgagaatcgccggtggctttaatagtctgcaaattgcacattctcttcacttttcccaacaaagactctctcctctccttagattcttttttcttcccccaattcttccgattttctgcaacttcttttttttaaaaacatttttttgttccataaacaatttttattttatatctttttgtagaccaacgtagaagctttgatcacttgtaagactataaaatctagggtttatcgtttttacttttttacatgattctgcacgacagagttctttattttaacctcttttagttgtttataatttatttttggtatttgatgttatgtctctcatgtgtacttttgtctttatctttttgttctaaataagtagagtaaataataatttttaatcctggccaaaacaaaaggagacctcaatttttcagcaataatattctagtgatcacactttaaaataagtttgtttctaacattgtccagtggaaagttataaattatccatggaaaacataaacctagtcactctatcagtagtgccaacaaggtgaaaaagcatttcaaatatgaagtgaagatgtttcgtaaaaagatttcctaagaaagaaaagaaaatttaatcaactttttgttagggaattttgtaaaagctgttattttagatgactaaaattgttttattttctcagtcaaacttaacaatttgtttttgttcccaaaatctttgatataggaaaaaaaagtaaccaattttggcagcaagatgtgacatcaaaggtaacagattattctggattttatttatttatccttcttaaaaaagtagttcagaaaatgtcatttgattattcttctgggtttagattctacttatacgtagcagactgaaactctgagtggtacagtctggaagaaagccataaaaggaagctttcttctgaactttctattttttcttttctcacttgtagaaatactgcagataaatttttagttatattgtattaaatgataaaagtgagaaggatataataaaatctgaaaagtggaatgagaactttcctttagcagacctacacctgcttgatattgtagtatttattttttaatgtgtatttgaattgataaatccatttgttgttttagtatcatactatatcatctgacatgtgttaacataaaaaatatatttgtgtgagtatatgtaatatgtttaaatataaacagaagtaacaacatattatcattcaaacatgttttttttttaactaaatcatctcttttaaaaaatgtttcagtttcacttattcgaattttttgctaaattatttttgaaagtaagtatcacgtatagtagagtacaatgaagttgacgaagatctggaccttttgggtatattgatatgttattacaaatgcctgtatgatgagtatacttttatctttttgggaaatttccggaatgagtattctatgatcacattctgaaacataatctagttttttttggcaacctaatgaagtactatagtggatactaaaacgtatttgtgccatactaaaatttcatatgtgaaatcaagtttggtacacatgtacatatatatcgacatatagatttaaaatacgtacattgtaataagaattattaaatgaatatgatgttaatggatgacacaaggcatgcgattaaaaaagagggctggctcctagcacaatacaatgcaaaggacataagcaataataacttttaaacttaaacatgctctttaatttaattaattcgtaaaaactctctcttttgacgggtacgaagaccgagtaagcggtcaacagatttttactcggggagacaaaaacaaattcccctaccaaatttacgatttttttgttcctgtttgaactttttttaatcttcccttctccatgagaaaactttaaactaacaattaaaagaagagtacttttctcttgtcaatcttgtatgcaatttgttttgaacgaagtgttacttttactatatatctttctttccatatgtgatcttaatatttaatgcccccttattgaattggctcttataatattgcatgaacgtacacatgcagaagtgagagaattcggggatctacaataaagtatcgcttttttagagtaacccatttgctgtgttttgtaaagttatacctttaatgcatagactagggaatgtaatgtatacgtaggcgtatgctttaaacatgcatatactggatcaagtatgcaagtatacatggtaaagcagagcagatgtagagagagggagagagggactttacgtagaatggtcaaatggtaattaaggcgaagaggtgatttgcagagtgtgggaatgctgggctttgtggagtcatgaatcgcattaaacgaggacgtgagttcccataatcctagtggggtttagagagagaagcttgagtgagagagaaagatagagagttaaaatctgcttttacaaaaagtttataagtcatttcattgtgagtgataattaatttgcctaaaggttggattttttcggttggaatcttaggtttggcttactatacgaaggtgacaccgcccattttattttattgttttagattttatagaaatgcatatgttttttttttgttttttttcttaaaaatctttcgtattctgcaaaattagttgtcactagctcacaatatattacccatacacaattgtttttagctggctattaaatgatgttttcagataaaaaaaatatatacaaatttgtatcatttgtgtaatttctaatgttgtgcgtttaaccaatacgtaatagaaaaggaaacggaggagcatatatagttaacgttatactatagtaaaagatattttatggcacaaaatattttaaattttgaagtttaattaatcgtatgaaatatataatttcacaaatgtctactagtctacgtagtaaaagttttaatagagtttattaaatctatgcttattacttactgctgaaaaattagacataattaattatggttatttagataagttttacagaatggaggaattattcatgagctagaacccgttgcatataattacgtcaatcgtgtgcacctttctttatagcagataactttttgtgtggatgattttctatactattaatgttatcgccgtatattcactgaggtttaaatccgacaaaatacgttggtatagtgtaagaaaacaaattggatgctggttttagttgaactcctataataattataaacaataataatgtatagtgcatacataattatttatacaacaaataatattctaaaggggtctctcaccataaaacttctctggtcttcctcaagattcatctctcacaaatatcttctcctttgttaaaaccctaaagctagagtttatagcttttgagagaacgagaacgagaaagagaaagagaaagagaaagagagatagatatataaatctgaagaatacatctacctatataaatacatattctccaatctttgaaagcagtcttgatcattaaattatctttccccaatccttgatagttgaatcttcctttcttctctgattggcttagagcttggtatattgatcataccaaagtggtagtgatttattgattaacccaaacacaaaataaacagatttgactcaaaaagaagaaaatgaattctaacaactggcttggctttcctctttcaccgaacaactcttctttgcctcctcatgaatacaaccttggcttggtcagcgaccatatggacaacccttttcaaacacaaggtaatatatctatacatatatgcttctctttttctgtataattatatacgaaagataacaatttgttaatttgtagagtggaatatgatcaatccacacggtggaggaggagatgaaggaggagaggttccaaaagtggccgattttctcggtgtgagcaaaccggacgaaaaccaatccaaccacctagtagcttacaacgactcagactactacttccataccaatagcttgatgcctagcgtccaatcaaacgatgtcgttgtagcagcttgtgactccaatactcctaacaacagtagctatcatgagcttcaagagagtgctcacaatctacagtcacttactttgtccatggggaccaccgctggtaataatgttgtagacaaagcttcaccatccgagaccaccggggataacgctagcggtggagcactagccgttgttgagacggccacgccaagacgtgcattggacactttcggacaacgaacctcgatctatcgtggtgtcacaaggttagatatgtgactcatcactcttttacttgattctttaatgattttgtgatctttatttgagtgtaatgatgaaatgtgcacatatagacatcgatggactggtcgatatgaggctcatctatgggataatagttgtagaagggaaggccagtctaggaaaggaagacaaggtaagtgatttacttccacttaattaggttttgtcttttaagtttcatttggctcatactaactatgttttaatttgtcttcattctttgttcttgatgcgtaaatcttggggactcaataataatctctagtttacttgggtgagtgcatcgaatcgtataagattaattatatatagtctttcattaaaggaaacttaattaaatcaaattcttggtataggtggatatgacaaagaagataaagcagcaagatcatatgatctagctgcacttaagtactggggtccttcaactactactaatttccccgtatgttaattcatatttttcttgcaaataatgtcgtgatactagttttgtatgcttcaaatctttgattcatgactgtatatcagattacaaactacgagaaagaagtagaggaaatgaagcacatgacgagacaagagttcgtggctgccattagaaggttttgttttgtgttttcccatgaggcattttcaaataaattgaaacttatctaatctaacaacttatatattcgtcaaatcacaggaaaagtagtggattttcgagaggcgcttcgatgtatcgaggagttacaaggtttgcatacgtagatattcccatgcttagtcttttaagaagcatctttacttgtcgttgaatttttttttgtttttcttacttattatatgtataggcatcaccaacatggaagatggcaagcaaggatcggccgagtcgccggaaacaaagacctctacttgggaacttttagtaagtatcagttattagatcttgactgcgtttggtaccataagaattgattcaaacgatttaaatattagtacacaattttaaatcaaagaggttactttagtagagaaaaatagaaagaaccttacgcatatacatgccaaaatcaaaacataacttcagaaccagcctgtataagtgtacggtcctgcaaaccattatcttacgttatcaatatggtttatcttgttcaggcactgaggaagaagcagcagaagcttacgatatagctgcaataaagtttagaggacttaatgcagtgaccaacttcgagatcaaccggtacgacgtgaaagccattctagagagtagcactcttcccatcggaggaggcgcagctaaacggctcaaagaagctcaagctcttgagtcttcaaggaaacgcgaggcggagatgatagcccttggttcaagtttccagtacggtggtggctcgagcacaggctctggctccacctcatcaagacttcagcttcaaccttaccctctaagcattcaacaaccattagagccttttctatctcttcagaacaatgacatctctcattacaacaacaacaatgctcacgattcctcctcttttaatcaccatagctatatccagacacaacttcatctccaccaacagaccaacaattacttgcagcaacagtcgagccagaactctcagcagctctacaatgcgtatcttcatagcaatccggctctgcttcatggacttgtctctacctctatcgttgacaacaataataacaatggaggctctagtgggagctacaacactgcagcatttcttgggaaccacggtattggtattgggtccagctcgactgttggatcgaccgaggagtttccaaccgttaaaacagattacgatatgccttccagtgatggaaccggagggtatagtggttggaccagtgagtctgttcaggggtcaaaccctggtggtgttttcactatgtggaatgagtaaacaaggatctctttcttgcggcacaaggaatgggtctgaatagtaactattttaatctctactctcaatttttatttctttcttgtcttggaagtaataggatcaatttagagggggccttttggtagaagaatttaggtgacgcaaggagttctttctatatttacggcgaaggtattctcagactggttaaatggttcttgagggttagggttttatgggtactcaattaagtttgtgtacccaaattttgtttacagctaacccttttgactaatttccaaatttgtaattcgtttataaagatgttttctctagctcttattttattatctatatatataatataccaatggtagccgacaaaaagtcaaggattagtaaaatagtttgttaaatttgcttagaaagcatcaaccaaatcaacatatatatcatataatctaagagtaatttgtgaataaagtcagtgtcgaactttacttgtataaatccaaaagaacaaccgttctcttgatattttaatactactacttaagtaagcttactatttagaggaaggcgtcaattgattaggcaaagaagagaaattgaaaatgcaaacaaaaacagcaaaagccgctcaatatatacttaagaactacaatagaaaatgtcctaaaagttagtgggaatcctctaactctctaatcaagagcttccaattaatggattaattacattataaaacatagttatgtcaaggattttaacattatcattgaacaaagaacacaactactaaaaatggtgtcccaaggtatttccttaactctagtttttctcttggtaacactaatcacacttggtgaagccaataacaaccgtaagctcctctacacttacaataactaccaaccacaacattctcctcttccatctccggtatattcttctccggctgatcttcctcctcctcctactccggtctattctcctcctccagctgatcttcctcctcctcctactccgtactattctccaccggctgatcttcctcctcctactccgatctatcctcctccggttgcttttcctcctcctcaagcttatcaagcctactattacaggaaatctccaccaccaccaccttctaaatatggaaaagtgtatccacctcctccagccaaaccatggtggtggttgttgtgaagcgtcaaagacattagtccattaattatgtgatgtctttgatgtctcttaatttccccgaggtttcttttatatatttcagttacgattttttttttttttccttctcttttttctcttttgtaatgtgagtgaagtttgaaaatctttgatcactaacggtttgcttaattttgtgttgtattgtattgattctttgtcatattttcaaatcttctcgactgaacataattatatgttgaatattaagttttgattcaaattttatttacccttttataaatttaattaatgttaaaaatgaatttctccgcaacatgcatggcgagaaacctactatagttaaaagaataaattttttaaacgaaaaaaaacttttaatcccgtaaaacaattcaaaactgcaagcattttactttgagacaaaaaaaaagaacgaaaccgagattgaacggatttggatagtaaaattacaaaaatatttctaggcttacacacacgtcatagtcgactcatagcaccatatattaagaaatggtccaaacttttcaagtttgacacccataaattgtcatctaatatcctcttgttaaagatttaactaaagactcttatctcgaaaatgttgtggtgttagagtccatactctgttactacagagaaaattctttaaattatgctaatggtaactgatgttcttgagtcttcatatgaaccatacatgtcacttgactcacttctaaacctttacatatccaaaaatatatataacagtgtatatattataaaagagtgatttcaatatgagactttctatagaatatttttattatttggttgttctaacttctaaccaaaacagttaagatatgatccaaccaaaagatttaagaggagatcttgagacggtacagattttctttggttggtacaacaataaaagtcatgaacttcacatttggtcaaataaataaactctcaagaattaagtttgacaaaataatcttaacgacccaaacataataacaaaaacaaaacatcaatcaaaactcagagaatgttttttttttgtcaaaaagtataaaagtgagaaagagacatgtcaacaataataaaaaagcacttgaatgtaataataacaacaaacatgtcaacaacaacaacagtctgaaacctcaagcaaaattgctttggtgcctcttatctgtcaattgaatcttcttccattctttttatttcttaattcatttaaataattttccctctctgaccaaagcaaagaatataatttccttcactttctctgtacctttctttgcttcatcttcaaatcttccctccccatcttgttcaaaagaagaaaaagaaattacgaaactttcttcttcaagatatttcaaaatcaaactttggtttaagggtcccattttttttgtttttgtttttcttgcctgattctttaattcttgattctcattaatgcttcatgggttttatatgaatcccctgaaagcttataggctccgttgaacagttataacttgtgaaagttgaatccttttaaaccgacagaggaagatctcagatggcaaacaagataagtgaaactgcttccaagatggacgattatgaggtcgtggaacagatcggacgaggcgcttttggttctgcttttcttgtaattcacaagtccgagagacgaaagtgagtacttaaaagaagattaattcttgatttgatctatatttgttgttctgatcttgtttaagatcaaaattcattgtaggtatgtggttaagaagattcgtttggctaaacaaacagagagatgcaagcttgctgcaatccaagaggttgaatattagcatgatcttgattatatatccaatgttgattcttgaaaaacaaaatgtttattttgttgttgttataatgtagatgagtttgatatcaaagcttaagagtccttatattgtggagtacaaagattcttgggttgaaaaggtaatatattcttcttgttcaaagctcgttatctagcggcgcaggaaattctaaactattttgggattttgtttatgcaggattgtgtatgcattgtaactagttattgtgagggtggagacatgtaagtcaaatcatttcatatttcaattgtatgtttcttgattattctttggtgatggttttcctaagtgatcatggtaaatgcaggactcaaatgataaagaaatcaagaggagtattcgcgtccgaagaagttagcaatcactaaggaatctttttggtctaaatgatagactgatattgaatctaactaataatgatcttcgtcgttctctgtagaaactctgtagatggatggtgcagctactgttggctatagattacctccataacaatcgagttcttcaccgtgaccttaaggtaacaacttctattagtctttatgcttcttttgcttcaatggaacaacacatccattcacactgctaaccaaattttccagtgctccaacatattcctcactaaagagaacgaggttcggttaggtaaacaaatcctatgcaaaatcctctcttagttacctcttaagaagcttttctagaaccattgtcttaagattggctcttttatcaggtgactttggcctagcaaaacttctaggcaaagatgatcttgcttcctcggtaatgctcatattccattgggatttatagcttttcgtcgaagtatttctgaaacatttttttgtttttttttgtagatggtaggaacaccaaactacatgtgccctgaacttcttgcagatataccttatggctacaaatctgatatttggtctttaggtttaacttacaatcctatcttgtgatttcttaacattcttgttcttggtttctcataaagatattggctctacaggttgttgtatgtttgaagtagctgctcatcaaccggccttcaaggctcctgtaagaagtttttccattttcgacgtgttaaacccgaaattcttttcgagattctgaaactatcttgcttgtaaacaggacatggcagcactcatcaacaagattaaccgctcttcgctttctcctctcccagtcatgtattcctcttcattgtaagtatacaaatacatttagtttagtgcagaaaacaagcttttgagtgttactgacttaatgttatgaatttctaatatgttttgcagaaaaagactgatcaaaagtatgttgcgcaagaaccctgaacatagaccaactgtgagttgatgagttccattagtttcttcttatttttctactttacgtccgcaatttcttctaactttcttgaatggaaaatgtctctatacaggctgcagaattgctaagacatccacacttacagccatatcttgcacaatgccaaaatctgtccccagttttcaaaccggttgtgtccaaatcagaacacaacaccaacgaaaacagaacaggtctccccccgaagaccaaatccgcaaaaacacccatcaaacacaatcaagaatcagaggaaacagagaagaaaaataaggatacgagctctagttcaaaagacaaggagagaccagcaaagagccaagagatgtcagtgattagcacattaacgttgctacgcgagtttcagaagaaaagcccgaaaagcgaggagagagcagaagcattggaatctttgttggagctttgtgcaggtttacttaggcaagagaagtttgatgagcttgaaggagtcttgaaaccttttggagatgaaacagtttcatcaagagaaaccgctatttggcttacgaagagtctcatgaatgtaaagagaaagcaaaacgatgatgaaaccaatatttaaaagaaacattaaccacaagttttcatgtaaccattttgtgtatgaaagaattaaagcaatgaagtttttgatcagatatcattagatctgataaaatagtgttattattatcatatactcatatatattagtgtaataacttacacaatgagattatacatcaaaatgggttatttgtcatcatagattctaaggaacaaaatcagaacaaaaaaagagttttgttatatatctccttctcatattttgaggactcttgtctttctactgcaagagaagagccaagaaggcggagagtgatgcagcaacaatggagccaaccaccggaaaagctacggtggaggcagaggaagcacctggtgatggtgctggagactccattgtagccgcggagactgagctcactaacacggccgagataaagagggccacaaagatgttcttcatctccattatttcttgttttttttttgtttttttttttggttttttgttttttggttgttgttttgtatttttggttgtgatgcatttgaaggtgaaggtggggaaggaatatatactataataaaatgtagagagagtttcaagctctgccattgatatgcaaaacaggagaattcaaagaattttctatttttttttactaaatttaggaataaattcatggcaataataaactagagctgtaatttttctgataagtttgaattggtctcagaataaaatagaaagaatctttttatttttggcaaaaggatttttggtccacagatcacatggtcttctaaaagaaaaagactaaattgtgatgagaaacaaataagcactttgtgtagtatttgcccaatattattatttgaaaaaaatatagatttagagtgacatttgttataaattatgtgaaaactctagtttactaaagagattattccttttgaattaaaatgaatagtcagattgtttacagatttcagtctttacagatacaaagagactacttcactccagagactgatttatctctttgggggaggcaattattgcacatgacatcattaaacttacaagctcattgtctcaggcaaactcagctccagaaagtaaagactgcaaaaaagagaaagaaaaaacatagacaaacacatcataatctacgccacggattagatacattttcaccactacaattttctcgtctattatgttgatgaatggttaaggtaaaccaataatttctaactactaggttgaatcctaggatgcaagtactatttcaaggcctcaattatgttttacagcaagtagatttatgaatatgggttctcaggtttgcatttttacctcgcagacatacatgccatgccaaaaaacacagctttcacagcttgtttctgtcccgcataatcaaatgccaaaggaagcatttcgtgcaatgttaggaaagccatgattccaccaactgcatcatacaaacaacagttttgcatcaattcgttttccatccaatgattttagtttaaagtatcgatttgctgcagaattcctacttacctgctcccaacaaaccttcaaggatttctggacttaagcttctcgggaatagataggctgcatcgtaaggaagatggatcaaagcagaatttataatactctttttagaactcttaagagaacagggactcgtatataagaagcaacttgagcaaagaaaaccaatgcaacttacccacgataattacacctagaggctcagctaaaccagagagtgttgccaacttaaatgcctgccatttgctgttacatgcataaaattgatttggaatgaatacaaccacggagtataatgaactgcataaatcctatcctaatatacaaggtggatagagaaataaatgtaaatccacatgcaatcatgttcttacctctctgttgcaaaataaataggaagtgcaactgcaacaccctgaaaatatcacaccggagcagcaagagaagcatgtcaaatcagaaatatgaacaatctaggtgtttaatcctctttaatattagtttatagtggaaaatagacagtcaaacaggaaacacgcaagaaaaataagacatgttattctttctaggtatcttttataatggttacagaatttctacctcgggaatgttgtgtaaagcgatggccaaagccagattaacaccaactcgcatgccctgtgaagtagaatccaacaagcaaatattgatattaatacgtagatgacacaggttatcaaatagtatagagatatattgttagaatgcatgcatgctccctgaaattttctgtttttcatgttttttaatcctcacctttattgatccgagaaatacagccatcccttctggaaaattgtgcaagcttatgcctatagttcaaagccaaaatgataagaaatacatgaagagtttagaaaaacatttattttgtatttaagctataacattaacatcaaaatcaaagaaaattttatataattccaaaaaacatgaaacttcccagttgaacaaacacacagatcattaggtctttcacacatataatcttattgttgtgtaatatattgactagttagctaaatataaagagtttaaagttgcaagtcaacaccagacgtttgtgcaaacgaataaagttcaagtacattggatgtaatggtttgtaggagtcattgtcgaaacatctagccaacaaattacagattaaaatatgcacccaagtctcggacaacagatgattaataaaagaaagggatggtagtgaaagttagtatacctatagctgttataagtccactatataagacttgcttgcgatgcttcttcatcatgtctttacctccctcgtctccatttttctgttatcaacaatatgccaaagttacatgatgctacagaaccagaaagcctttgataacaattcgtaaaaaaagaaaaaaaaaacactcttgcctttcttcttttgccgtcagtagaaggaccaagtgttggttcgggtatgaatttggtaatacacgcaaagaatatcacaccaccgaaaaactgcatcactagaaaactatattactttcagtgtgaaataaataaacatattatttgaataacaaaaaccactgaagtacaagatggacagaagtactaacccagaggttggctttaaagaacccaatagagtttatagcattatgagccaaatccaagaacgatatgctcaacatcagacctgaagcaaaaccctgtaaaaaggagttgaaaatatcagttaaacaacctacaagatggatcaaattttcccaagtgaaaagtttcgtacaaaagaatgttggtacaagaacacaaattctcgtcactagcaccctacaaaacatgacgacaagagaatatagcaatgatgcaatattaaaaagagaatgtagcaatgaaactccaccaatggcttctacaagactacaattacgggaaccctgttgtaccagaaattgaccaatattggaaaactagacgtagcatcgtcacctgtagaagtccaagcatcttcatattgggagtctcactaagaactacaaaaagcgcacctacgaaaaagtaacatgaaacttaattaaattgaagaaacaatctaacttgaagcttcatatctcgaaactagcaatgtattgaacactcaagcattgtacaaatcttatcattaacccaagcaattgctgatcctacaagtagctttttgacaatttcttgaacgaaaacaattcaccaaagatagtaaaacaaaggcagagtgttgtggatcatcaaaagaaccatcaatcatcatttaaaacaatcgaacaacaatgaatcatgattctaagatcatacacttatctgccacatctaaaattcagcaacacttgcaaaatacagaattttttttttttaagtagaaggaagctaacattgaccaacctaaagaggtacttaatcccccaacaagggatagtccaagcgccacgagcatctgagaatccattgattaatctgaatagaattgaagctagccttaacaaaatcacaaacgaaatatctcctgagtcaaattcgtaagtcgactttgagaaatgatatatagacggagacgaagagaatatctaaacccgaaggtaagagatactttgttctgtgggttaatcgattgaaagaggaaactgaaaaaccctaatccatggttttcgcttctacaaattcttaggctagtgagagagcatattatgcctgacccttgcctctcgttttcttctacctactatcttcttctttctcgtgtctctgtcccctggtttgtgttgacccgaatttttctcgggtcggtttaacccggtgcaccatctacaaccgggttaaccaatttttaatttgcataaattaccaaaacttcatcaatgtttacctgaatatatgaaaaaggatttaaactttccattcgtacattcaagtccattaggattcttgacatagtattttttttattaattttgttttattctaatcatcaatcacgtttgcaagctcatgctatacttgctagttatcaattggttgtaaatgcatatcgtaaattaagtaggtgtatttaagaatctgtctgcgagcttgatcatgagatcttgtaaaaatgagatgtatatgtattgtcaatgatcacaaaattcagaattcataaactcgatgaaataagcatccttctagacctattactgttgagaaagcctagtagtagactcttattacttgcaattcaaacactcgtagagaatacaactctctcttttttctcttctttatgattttctttagatatctacgtaatttatattactaaaaagactgctttccaaaattttggtaaataggattatacttcaagatactaaaattttggtatattttcaccaaagttctctattctctaatttactctactctaaattctagtgtactcatggaaatgtgtcccttatacgtgtaggaatagaactcggaataaagattgttagattgatatttgataacatgcaaatcaaatttagtaattatatcaaataagacacattctaaaaactttttttaggatacgttctaacatttgttaacaaagacctcaatagtcaattaatacagtaaatttaaagcttctgctattcccattaataattatactaatccctaaaaaaagcaaagacgacgaagaagaaatcacaagcataaagcatacaattaattaatgctcgaaacaacaacaacactaaacacgatcattcttgctgctcgacatcagaagcagcctcctcttcctcatgatcaattccacaacaagggacatgaccattcccaaaggccttaacgtggtctttaagtgacctcttgtgcttaaaatccgacccacatgagcaataccatagcttcccacagttcttctcgtgagtcctccaatctcctttgaccgcaaatgccttcccacacctacgacaagcaaagggcctcacaccgtgcttccgcttgtaatgtgtctgaagcgtacggaagtccttgagcggcctagcccttgggtggtctatgttgttcttgcagcccggtgcacagcagtagcaaggcagcttcagcatcgccgttggttgtgtccctctcagcgactccggtccttttctgtattgtgaaccatgtccccacatgtgcatctaataacatttcatcacaatacattagaccatatctaaagaactttcagattaaattccaaactaatcttgaaacatgttaatggaaatttcagttttcagatttcacactgtaaatttcgtttttttcttctatattgttgatcctcggaaatattctgaagatataaagttaatggaaaagttttagacgttacgacaagaaagatctagagctgaatgattgtttagggttaattaatataaacaatcataaaatatatatatgttataatgtgaagatataaagaggtacaacacaatctgctagacatttatcatcctctttttcttttactttttagggtagtgagtgttgtgtagtggaactgcgcaaaaatcaagagagacaataaaaatggaaaaggacgactgatcacattttagggttagaaacagtcagtatgaaaaaaagacttttggttaaagaagatcttcttgatcttaaacctattgattgattttagttgatcttttcctagccatcaatccatcgtacagctgatgacttgtaccatcaaattaaaagttatttctcgagttataatagtaataattattatgaaaagtcgtagtgtgtactaggggttttatcatgatgaagatttgaaaaataaataaataacaagaattattatgtagatacaaataagaaaactaatctattttcaagaacaaaaagtcaaaacttgaaaatcattttatggaaaatagcaactaattagagttaggtttattgaatgaatatatccttacttgcatgttgttgtatctgttgaaagtcttgaagcatagaggacaagagaactgtgttggacccatcagaatctgagaaggagtcgggatccaaaagtgatgaagatgattacccctttgtaagccaccatgttcatcatcatggtcagaagccatagtaacttcaagtccttgatcttgatgatgatcatggtgaccctcttggtggtcggtggaatcaaggaccacatcgctgctgctgcttccaccatcaccgaggtttggtaaccctagatgaagatccacggttacatcatgacgataactgtcttggcattgatcaagaaagtttgaattagaggaagtttctgtcgtctccatgaaatagtactcatggtggttagcagtaggttcttgatgcttatgaatggggcttaagctaaggagagggagggcttctctaagtggaggagagtcaggtgaagtcaaattagggttttcgttgatgtttgggtttgtcgtctggtgaggataataaaagctgtcatgagagttgtagatgcgtgagagggaagtggcatagttgaagctatagttatagtagtctacatatccatttctgaagatacaatctggatcagccattaactttaggagagaagatagtgagaaaaaaagaagaagaaggcaagatatctctagatgatggagttgtgttaagaaaccagtgaaagctagatatgcatgtatatgtgggtgtgtgtatgagtgtatgagtgtattaggacatgtgagtatatataaggtgcgatgtgacaaaacagtggaaaatagcatatgttaattgatagaaaagggtacggagaagatagtaggtagaaaagaaacaatgagaaagtttgaagaagggaaaaagaaacttgctatcttgggactcgaagtgcacgcatgtatttactaaattaaagtcaattactaattactaaatctttatgaaacaaccatataacgttataaactagcatgagtattactaggacgtgtgtaaatctttattgtcactaagtgtagtagatatgtaagatgttctaccggacgtgtgtaaattggtgtaccaggaggttttgctattggaaataaacctattgacatgttttggtccatggcccaaattaagaagtagccaatggcaaaaaacctatgggtagtccaaaaaatgagggataaattattcatctaaatatatttaatcattatatgtaaactgtgttatacatctacatctcatagtcttttgaatctattgattaagatcatcgatcgattttaatatattactgattaggttaaatgttgtatagttaatatgtgttgttggtttgattagtatgatttttgataccaataacagctttaaatctctgggcaaatgagagtccattagacaaaacatagtatggaaaggatcaaataaatggacaagatcggcaatcaaggataaaagtttgtctcctttaatgtctaacggtgaattacaaaatgtatgtagagagagatagagtgatgaagcatagaatcaagatgataaacattttggttttgtggggagattgatcgcgttggaaaaagagatggtcgtgatccaggacagcacttgcgttggtggcctcatctctatgtcggctcggcttcagaaacatattacttgggaaccccaaatctttatttaattaattgaactaacgtatagttaactaatggatttttacaagaaatagtaataattgacgaaaataaatattatgatgttgccatcttggatgtttaatttttatgttcatgtaatgttacttgtttacttcatgcatccctagctatgtgcaaattcttattcttgcctttaataggtgcttaccatgataaagtgactgagaaattaataaatttatcgtaaatttaaataatttttttttaaaaacagtataagttttataaataaaaatagtctatttgtttgatgttaaaaaaaaatagtctagtttaaaagatggaatatcatcatcactttcttttttttcttccaattatccaaaaataagattgctcgttttttttttcttttttaaaacaatgtatttcttggatgtaaaatatacacctgaaagatggcctggtacttggcttattttttgggtataaacaaattatatgagtgattcaaaagaatggaaaagaccctttattgttcactaattaaattaaatatccttttgctacttctcctatctttgtagatgttatacttttgagtaggaagaaaacccaaactaagtctacaaccacttgattgataagatggcctcatcattgttggggtctatagagtactttccgggtataccatttgcacatgtgaatggccaatgttataagaaaaaattacagtagtatataattatacatttttttaaagctaatttttttttataaagttaagtctatctacgggttatatttagtactaaaagtttgaatggtgacgacggttgggatggacaaatccttatgatcagtttatgtttgttaattatttcgtaaatactggcggtgcatggtttctataattttggattgtggttacgaatatttagttattaaaaaaaaaatagttttatgaccaagtaactatgtttttataagagttagaattgagaaaaacaaaaatttcttatgacattttggtatatttcatacaaaccaaggttaagaatttcaaatgttgtcgtagtaaaatgcgacattgtaagatcaagggggtcaaaattagtgggttttgatcagaaagtgcattggtcgcaatgtgtgaactcggaaagattgggccagaaagtcaaataatttagagaacatgttgatttgctattaattagttcgtattagattatattagtataaataaaacaggagatgttcccaagcaagcacgagtgtgtgtttgtgtggatggatttttgtatttgaagcttttttgtaagttcttaagtgcgttctttaatctctctagcgtgtcttttgtgtatactttgttctctcttctcaaacatttttatctatatatgcacctttgtgttaatttccttttaaaaatgttattatttattctttaatgtaaagtctttggatgtgtgtttgtatttatgtggatgtctgtatgtgtttagtatatctgttcttccaatctatttgctttgggattcgccatgatgttatttttatatttaaaacctttttttagatttctaaagtaattatttgaatgatttacagtgcaagatgttttcacatattattttgttttttttcaccattttcacatattgatcatggaaaaatcctttggatacttactttatcttatgtcgtaaaatgataaaagaaaaataatttactcgtttatctatcatattcatatgtttattagttctcacgacgatagaatctaaatcatcattagtatagaaaatcatatcttgaagaccaaagtatatctacatatacatttttgcagccattttgtgaaataaatcatggagttgtaacttatttacaatggctgccactagcttattcaatgcaaaaattaactacaaaatcaaagcaaatcttattcaaaggaatatgctcttattctatggcctaattatttttgccaaaatagttaaaatatttaaaaattaaataatcattttaaaagaaaactttaaattgatttaaattataaatcttttaataaaaatattattacaaaaataaaaaattaatttcaccgaacatgattagatagtaggactagatggtaggacgtgtttataatattataatatataaactttacaacaattaaataaccatttgaaagaaaacttttaaattgatttgaattaaatattttttaaattaaagtattattaaaacaaaaataacaaaataatatctaattctactgaacggagttagtggtatgacgggtttggtcgatagtattacgagacggtataccacaagtgaaatccattagatatgtttaatttcactgtgcaggattagatagtatgatgggtttggatcgatagtaatacgaaacgatatactacgggtgaaatcctacatataacaattaaaatctaaatatacattatcttaaacactaaacaaaacaaacaatattaataaaataaatatctacatatatattttatataactaattttatcaaaaacctaaccccgcggtataccgcgggtcaaaatctagtaacttacatatatcttaaccttttagcaaagaaaaaaaaaactcacatctattaacttcaaatgttcgtttaaacataatcacatttgtgaatcacgaatacattctttcatgatttcatattggtgatagccatctttaaccatatttatacaaattaattgtaactcgcatagtcgcatcacgcatacatggtcatctttcataaatggcatggcaaaacatgaattttttcataatttttaagtttcgccactattattgtattttgtcacaatgtatacgagagaaaagtaaaaaaaataaacgtcgcctgagagattcgaactctcgcgggaaaatcccatgtacttagcaggcacacgccttaaccactcggccaaagcgactgttttgataaggtttctcagtttaaacttatattcttcagaatttgtacgaggctgatccagcaagattatgttaatttatgaaggcccaaacccaaaagcccaatttattttccttctcgtttttcctaattgtaacgcttttttctctcagcaaagatttcaaaggcacgatttcgaattcgaaggctcagagaagaagaagaagctccttcgaaagttccaatcgatttgatcatccaaatcaggagacacagcaacctactccgtgtaattgataatgttctacagagggtaagccctataatttatctctgacttgttctccaataatttgatttcaatagtttccgcaattagggtttcttcgtttgtttatgggttcaaatcaatcctgaattacctcatttaacactcctgtttaagtttaatctgttgcgatttcctttaattgttcaactttatgggaatttttgagtttattgagtaaagtgttgagctttagctgagatatgtttgtggtgaatgtagatatggagatggtcctgatgggcgtgagatgggacctaagcgtcaaagaatgattgatcaaggtcctccaggaccattctatggacctcatcctagttctggctttatgtataacccttatggatttgttgctcctcctccacctcctccttttcctgcggttcgactccgtggtttaccctttgattgcgcagagcttgatgtagtagagttttttcatggtttggatgtggttgatgtcttgtttgttcacaggaacaataaggttactggagaagccttttgcgttttgggttatccccttcaggttgattttgctcttcagaagaatagacagaacatgggaaggagatatgtagaagtttttaggagtacaaaacaggagtactataaggctattgctaacgaggttgcggaatctcgtgtccatggtatggctagtggtggtggtggaggtttaggtggtggcaatggaagtggaggtggaggtggaggtggtggcggtggaggtcgaataagtggtggaagttcacctcgcagacacgtgcagagggctagatcgagtgatgatgggaaagaggatattgaacatacaggtatcttgagacttagaggattaccgttctcagcaggaaaggaagacatacttgacttcttcaaagatttcgagctgtctgaagactttgttcatgttactgttaatggtgaagggagacccactggggaagcttttgtggagtttaggaatgcagaagattcacgagctgcaatggttaaggataggaagacgcttggcagccgttacatagaattgtttccttcatcggttgaggagttagaggaggcactatcaagaggaagatgatactgatacagcatctctcatggtactttcatacctcttctaaatggttttcctaagatc

SEQ ID NO: 446 - DNA, 63748 bp, Arabidopsis thaliana
gatcgcggaaagctaggattagattcacaaatggatctactaccatggcagaaggaactggagatgtgactatcatgactcaagaaggtaagaagacgatcaagaatgttctttacgctccagggctcgtgggaaatgcattgagtgtttctcagatgctgaggagcggcttggaagctagaatggatagagaacgatgcactatatgggatcggacggctgggaagtcttttgctgaaaccaagatgggagagagaggctttcacctgcgtttggatgtgattgatgaaggtcattttcaaagcaagaagagaaaatttgctccagtttaattttagagggtggacaataatagactgttttacatcatcatgtagttcaaagcaagagagagacttttgcctgcgttaggatgccatgttgatttagtatgatttcatctgtctagtttagttagcttctatcatagtctcttatcattttatcctttgtctcatagtttagtacttatttggctttttgactacggggaaatcttgtcttcggctgtcttatgtttgtaatcaccacaagaagcggattcgtaaagggtaatgagatataggtatgaaaggggagagtgtattctcaatgtggaggtaaatggcatgtctttaaagactgtagcagcagaaagaagaatgacgcaattacctgagtatcaaatgttagcaatcaatgttggtcctgtgacatttgacaaggatatgtggatgatatacaccagtacctccaaccatatatatgactccttatgagaagtatttcaccactatagacagaacacacagagctcggatcaaattcatcaccggacattctatcatgtctgaaggaatgggatggtagtttcgtgtgatgtcaaatcttagggggtgttattagattgtgactttgaaagagttttaatgactttaaaaaaatatagaaagtagataaaatgaaagattttaaatgatttttagagagttttgtataatctctatgattacttttccaatatcttgtaaaatcctcttataatcttgtaaaatattcctagttacaaagtcattcacaatctctttttttttacgatactttacatgattttagtttgtaaagaaaagtgtataaaatcataaaccaataacacaataatttaaatcattaacaatcatagattcatttgttttagttgaataacacaaaaattttaatgactttattaaagtatgaatctaataactcaagatttatgaagactttaaattactttttacaaatcaaaatctaataacaccaaactttaaaagagtcttataaaatcttaattgaataacacaagatttttcacaatatttcaaatcattaaaaatccatataaatcacaaaccaataacacccacttattatataaacaggggatgattttattcagtttctcgagggaaaatatacagaataaaacgttttaagaaaccctaacagttgctggctatggccgtggtgaatcttccgactctacaagacgttgtttccgatgaacttaactacgaaatatgggctccaatcatgaaaactagtttagcggagaaaggactttgggacattgtcaagtacggaatcccaccggatttatcaaagattccagagttagcgaccaagattcgaacccaagacctttcaatatatagagattctgcggtaaaagacacgaaggcactccaccttttgcaatcttttctcccagattcggttttccgaaagacactggaaaccacttcagccaaacatctttgggatttggtaaaagaagattacgtacaagccaagttagggatggagaaattacctgagtaccacatgttcgcaatcaatgttcttccggcgacatttgataaggatatgtggatgatatactcagtaccacttctcatatgatccatataagaagtatttcaccactttggatagaacataccgagctagggttagtttcatatttggaagtactctcatggctaaaggaattggagatataattatcatgactaaggatggtaataagacgatcaagaatgttctttacgttccagggatcacaggaaacgcgttgagtgttgttcagatggagatgagtgtaatcttcacagcaagaagagaaaaataacatcatatgaaacttagttttagaggcaggacactgggctagctattttattaaataaagtagacaaatcgatggattgtgttcggctaattcacttttcattttgtttatttttatcggtatgcggacttgtagggtttatggtcgcgtcttttatagcttgtggtatgtagctcaatggttgcttcattcaaatgcattgcaccatcttgaatggttaggtctaataacaagtcaaaaccatcaacgattcttgttgaccatatatttgtggagagaagcttgcgtgtggattacggttagtcgatttaaccggatcaataaatttaaactgaaccaacacttaaaaacgttatttggctttcttctaaagaatatatgtttaaagaaacatgcggatacgacggcggcgaatattcagtttcgttgatttcaaaattcaaattataataggatttagggtttgtagtgatgcaactatgaatataaataatcgcttctccaagataaataaaaacagaggaaatcctatgtaagtaccacgaggagatggtagttatgtatgtggagacaccgactctacaagagctcatttccgatgaccttaactttgaagtctggtcggcgatgatgaaaaccacacttattcagaaaggactttagcgaatggaatccctccagatccatcgaagaatccaaagttagcggcgacgattcaagccgaagatgtttccaaatggagagaatttgtaaggaaagacatggaagcactcgaaatattgcagttttctctcccagattctgttttcagaaagactctctcggctgtttcggctaaggatctctgggatctgctaaacgaagtacctgatcatgtagctgagtgttttagtaaatacacttttcatgagaatatatggttgattagctccactaactcgaatcatatgactccacatgtgaagtttttcaccactttggatagatcaaggaaatgtaaggttaaattcatatctggagataagagtgagaccacagtggcaatggtagaaggaattggagatgtgactttcattactaacgagggtaataagacgatcaagaatgtgctttacgttccagggatcgagggaaacgcgttgagtgtttctcagttgaagaggaacggctttgaagtttctatggaaagaagaactggatgctttgtttgggatcggacgactgggaaaatgtttggtaaaaacatgtgggaaaagagaggcttttgcctgcgtttcagtgtgattgaaggtaattttcaatgcaagaagcgaaaatttacacaagattaatgttagaggcaggacagttagattattttactaaataagattggactgatggatggatttgtttcagtttatttggttttcattttgtttctttgttcgaagtaagctaatgattgcataaatatggggtattgcagacttgcagtattggtttagtcccctagccgaagtgggaaaatagtttgaattactgtgttttcctgatgtgatcatgtcattgcttatgttagccaaagtatgatcaatggtggattatcagatagttgaatgtattctacaattaccaaactatgcaaacgtaaaatatacgaatccaactctgatttttaactatggatattcaaagtagattagtagattactgttaaacgtaacctaaaatcaatgtgaaagttgaatgattagtgcagccgtttttgggattttgttttgtgattaaccttttaatttattcaaggatgcatttaattagctatatattaaaggcaatttaactatattaaaaggcaatttgtaaaaaaaaaaaaaaacgcatattatttgacgtaaaaacagaagctgagccgttttcaattatttccttttggtttgactatgcatatcgaattgccaaaccggattcgatctcccttaattaaacacacattctttaattgcatgaaaccggaccaaagatagatccaaaaccgagtctaaaatcaaatggtttacccctaaaccgatcacattgtgatttcaaattgtaaattactaatttagggtttaaggttaaggttaatgagactatataaatagaaaatgttcgggtcagcgaaacgaataaacctgttcactttctccgagagaatatagagaaaagatagtttttagaatctccgacggttacggctatggcggcggcgaataaacaacacgacgctttctccgatgactttgactacgaaatctggtcgtccgtcacgaaagctacactaacggagaaagaactctgggatgttgtcgagaacggagtcccgccggatccatcgaagattccagagttagcaacgaagattcaacccgaagaactttcaagatggagagatctcgctgtaaaagacatgaaagctctccagatcttgcaatcttcttctctcacagattctgctttcaggaagactctctcggcttcttcggctaaggacctttgggattcgctcgaaaaaggtaacaatgaacaagcgaagctacgtaggttagagaagcaattcgaagaaatcaaaagagaagaaaatgaatctctagattcatacatagataggattacggaaatagttggtaagttgcgtgttttgaaagttgagaaatccgaatacgagatttgtaagaaggtgtttgcttcgatgtctgattcgtatggtgatatacattcaatgatggaggagctcatgaatgtgcatgggatgacttctgcgagtctttgtcagtatttctttcttaatggatatgattttgaatcagtgaatgaggaagtttttcttcgactgttgaagaatttgaggcttaaatcaaagtctaagaagtggtgtgacgtgtgctacaagattgatcacaatttagaagagtgcaacagaaggattcagagatatgtaataattgatgagaatgtttggatggtaaactgggaggtcccgaatcacatgacaccaaatgagaagtatttcacaactctagacagaacattcaaagctgatattggaacggacgatggaaaagttcttatggttggaggaagaggagatgtgaagatcaagatgaaggaagggaagaagaagacgatcaataatgtgatttttgttcctgagctcaatagaaacttgttgagtgtgcctcagatgagagaaagaggctgctcattcatagttggagcacgaggcgaattaattgtttacgatcggactgggcaagaatttggagaaactatgagagatgagagatctagagcactgtttttgcgtttggaggtgattgaaggtaacctcaactcttaattagctctgccttgaactttggtacaagactttaaatcgtaaggtgggacttttatgtctctatgttggttcttagtttggttttattgagttttcaatttgttggtctagttgatattctgctaatgcagtagtatgaattaatcttgtgttcttttaaccttggacggcttgttacgtattcatcaagttttctaagtactatttcgttcttcactatgcaatgcttgtgtcaagttttgttaatggtgaaaagtagacggatatgtttaaaccagtgtgtcaaatgattattagtttagtatagtcgatttaggtattttacttgtgggctgtggcagattaaatcgttcaaacactagagaaaagagctatcgtgttgggtaaatggaataatctaaccgacaccatcaaattaacgtcaaatcccaactattataaaaacgctacaaagttataacatcaataatcttttatataaactgtgttgatctttgtagagggaaacatttttgggattgttatcgatagagattatagtttataactaaaagagaagatttcaaacttggcatggaaaagcgcaaaggcaactctttaaatttacgatttggaagcacgagccaccaccatttccgttccatttttgcttacacagagtgacacaagtagcatcatcgcaatctgtttttttaataagatcatgacacatttcttgtccttgcgtctctttcgtttccagacctaaaaaaatatttgacatgtttatgaatgttaatttatcttcccttcaatataaatttatattatatggtatgagaatggtaaaacttaaaaagtaaagcaaacctagaacaaggacaaccatgaagatggcaagaatggtggctttttgggtcatctttgatgatatatacaaactgaaatgaagattgaagatttcaaagtaaaagaaaatgtatgtaatggtagtgtgtatgtaaaaaccatatatatcagcaatttgatgcatacacagtgaaaggagaaaatcatttatactagaaagaaatcagttaacagttgaatagattactagaaacggggaaatgataacataataactaagaaatatatttacaaatgaattaaaaatgaaaacaaattgttttacatttggtatatgttgactatacaaaatacattctcaaagatatatatagatactgtatgtagaaaaaatctgaaatttctgcattttacatttttagcttttaaaatataattgtagagaaagaaagttggaaaacaaattccctccaaaacgtttttttagtcaaaacaattgtacatgaatattaggtactaactcatgctacaacacggagtaatcttattttttaagtaatggtattagttaataaaaagttattgtgaatgtatcatattgacaaaacaatttgtatttatttttattttcaaaattgaaatttggttggctaatttggtaatcaccgttggtcagaaatttttatgtttccttaatagatatttcaaaagaatgtgtgtatttatagagattgtcagattagtatttactagaaatcttttaaagaatcatctttaaagttttagaagattcttataaaaagatagttaagtggataaaatatcttcaagagtctatagataatgaaacaaattcaagagtctatatattggaacggttacaagtcttttaaacaatgtgaactcaagtcaaaaggaataactatatttttttctcgaacaatgtgtgtttgcaagaatttagaatatgaacccaagctatagaatctattttattttcatatatatttgataaggataaacctataaaaaatcttgtgttaaatatatatagagattttgagattagaagtttttggtaagaaaccaataatgaactccactactcaaccattatcgaaattccttttgtttttttggtagtgtcgaatattccttttgtgaaaacacaatatacaatattgttttttacggcttcgtactttcttctaatttttatttaggtaattctattaactatttaggaatctttttataagatatcttctgttttaatgtgtagacatgacaattgggtatacatcaaatcagaaaatataggattctgctatatacacgaaattggattttgatatccggaatatttgtatttccatacttaaatcttaaaattaatataacctcttaattattagagatctcacctcttaattagctctgcctgttactttggtaggtgattgtagtttggtttcattctgttttcagtttgttcgtttaacccatgttctgcatatatactgcattaaattaagcagtggtcttttaacctaggaggctaggacggcttgttattcgttatttattgcttttgtcaagttttgttcatggtgaaaaggagacagacatgttaaaatcaatgtgtcaaatgattagtagtttaggacagtcgatttagagattttttttgtggcggattaattaaatcgttccaacacaagataaaagagctaacgtgttgggtaaatgaataatctaaccgacacaatcaaattaaacccatcgcaacgctacaaatttctaacatcaataaactttaacataaatggtgtttatcttcgtagagagaaacatttttgggattgctattgatagattataggttatactatagtctataaaactaagaaagaacattttaaacttggcatggaaaattgcaaatgcaactcattacattaaagttttgaaagcacgagccaccacttcccttccatttttgctgacacatattgacacacgtagcttcgtcacaatctcttttcattataagatcatggcacgtttcttgtcctcgcgtctccttcgttccaatccctaataaatatttgaaaagcttacgaatgttaatttatcatccctttaatataaacttattataatatgatgttaagagaatggtaaaaacttaaaagtaaagcaaacctagaacaaggataatcatgaagatagcaagaatggtggctttgtaagtcatctttgatgaatatacaaactgaaataaagattttcaaagtaaaaaccatatatataggcaatttagctaggtcacatacacaataatgacgaaaatcatttatactagaaagaaatctgtgaacagtggaaaataaatattggagatcgggaaaataatatcaaaattaagaaatatatatttactaaataaactaaaaacggaaataaataacaacgcaataaatatagatactgtatgacacaaaatctaaaattcatgcaaaataatttacatggttagcctttgtatccgttcttgacccatattgttctttcgctgtaattgatatttgggttagttgggctttaattttgtgtaagtggggttcctttcacaattcctttaagagagttaaggatgtccaaaaaaagagaaaatttacaagtttagcctttaaaatatttatatactgaaataaaattgaatttccctccaaaacattttttagtaaaaatatatactttgccatctaaagtaaattaatatatcttatatcaagacataaaatcacaagtcacttaatagaaatcataagaaatacttacgaaatattagaagccttaaccaacaatagtatattcggttattccccaattacattaaaccgaatcaaatgtagaagaagcaaaaccaagcctaaaataaaatttatcagtccctgaaccgctgatttggtgatttccaatttagggtttaattaatgtaactatataaacagaaagtatttgggttagtgatcgctttctccaggagaaagagaaaaaagaaagtttaaagaatctctgacagttacggttatggcgacggcgaatatacgcgacggcgttgtttccgatcaatttgactatgaaatctgggctccgatcacgaaatctacactaatcgagcaaggactttgggatgttgtcgtgaacggagtcccgcaggatccatcgaagaatccagagttagcggcgacgattcaacccgaagagctttcgaaatggagagatttcgtggtgaaagacgctaaagcgcttcagatcttgcaatcttctctcacggattctgttttcaggaagactctctctgcttcttcggctaaagatgtttgggatttgcttcgaaaaggtaacgaacaagcaacgatacgtagattagaacaagtaacgatacgtcgattagagaagcaattagaagatctcaaaatggttgacaaagaatctggcagttcctacttggataaggctttggaaatccttgaacgattgggccgtgcgaaacttgagaaatctgattacgagatttgcaagaatgtgttcacgacactctctgggtcattcgatggtctagattcaatgttggaggaactcattgatgttcataagatgactagtaagagtcttgttgagtatttttactatcgtgtacatgaatcatcgacagaggaagctatctttggactattgaaggatttgaggcttaaatcaaagtctgagaagtggtgtggcttgtgctacaagaacaatcacaaccaagaagactgcaaatttaggattcatacagataaggaggagaaagaagatgaaatcgtagttgattatcgtctggaaacggtaccaaatttaggggcaaaaacatatgatgatgatatttggataatacacaagatggccccgattaacatgactccatatgtgaagtatttcaccactctagacaggacattcaaagctacggttggaacggtcgatggaacagttcttttggttgaaggaaaaggagatgttaagatcaggatgaaggaagggaagaagaagacgatcaggaatgtgatttttgttcccgggctcaacagaaacgtgttgagttttggtaagatggtatcaaaacgctactcaatctcaacgggaatgcaaggcgaatgcattgtctgcgatcggggtgagaataaattgggggatgctatgtggatgacggatgaaacagagatggctttgcgtttgaaggtgattgaaggtaaactcacatattaagtagctacttttcatgatggctacaattggtagtaggcttaactcgtcaggtggacatatcagtcttctatgtggtcttttttagtttggttttattccgttttcagtttgttcgagctaatacatattctgctactgcagtatgaattagtctttaacctaggaaggcttggttttaatctagtttttcaaaaactatttttgtcatcactgtgcaagtactattgtcaagttttgttaatggtgagaaggagacaaattctagtggaataatgaaagggttttatacttgttagaaaattgatcaaatgtatatgatatagcagaccaaacgtgagaaagttatccacatagaaaggagacaaacatggaaggatagattttagcaaatatacattttgatacaaacttgaaagtattcattattgttggataatgatatgaacttgttatcactttttgaatattatttgaatcacgtatgttcattttcataaagtggtataactccaatattctagataaccgataggcttttaaatcaaatgttgaaggcttatataatatgctttaaaatcaatgtctgaaaagtcgtgtggcgtgtgtaacaagcacaatcacgagttcacgacccttttctttgacaatgaaatgaacttgctattttttcttatcacatttttttatatttttcgaatatcacatttttcattttataaagtgggtattctctagtaatttagatcactgtatgttcggatgaaaactcaacgataactaaaaattatattcagatgcatcggttcatcttttcgtagcgtgattagttctaatagggtcagatcactgaaccggatcaacccacttaaattgaaccagatagaaccactaacaaaagaacttattccagttatatccgaactagaaccgattcggaaaccgagccattactgatttggtgatttcaaaacgtaattagggtttataatttggtttactgagactaaataaatagaaagtgtcactgatgtgagaatagtttattcgcatttcgcctctctccaggagaatatacagaaaaaggtttaaaagaaacactgacagttagggctatggcggcggcgaatatacacgacgccgttgtttccgatgacctgaactatgaaatctgggctccaatcgcgaaaactacactaacggagaaaggactttgggatgttgtcgagaacggagtcccaccggatccatcgaaggttccagagttagcagcgacgattcaagccgaagagttttcgaaatggagagatctcgcggagaaagacatgaaagcgctccaaattttgcaatcttctctcacggattctgctttcaggaagactctctccgcttcttcggccaaggacctttgggattctctcgaaaaaggtaacaatgaacaagcgaaactacgtaggttagagaagcaattcgaagaacttagtatgaatgaaggagaaccgatcaatccctacatagatagggttatcgaaatcgttgaacagttgcgccgtttcaaaattgcaaaatccgattatcaagttatcgaaaaggtgttagccacgctctcaggatcatatgatgatgtagctccagtgttgggggatctcgtggatctgaagaatatgagtcttaagagttttgtcgagttgttttatgtgtatgattcgataacagaagaatctatccatctaatgttgaaggctaataggcttagatcgatggctgaggaggagtcttgtgtgttgtgcaacaagaacaatcacaaacaagaagattgttcttcttcaatccctaaggcagggaagtcaagtggagccaggcaatctaagccgaaaaaaggcaaatgctttcaatgtggagaacgaggacataaagccaaagattgcaacaaaaagattcagcaaccagcggtgacagaagatcagattgagatagttgaggaaaaagaaatcgaagttgattttctactgttagcagcgttgaatttgaatgaattcacatatgatgagaatatgtggatgatatacggccatgccacgaatcacatgactccatatgagaagcttttcaccactctagacagaacatacaaagctaaggttggtttggttgacggaacaattatcatggtagaaggaataggagatgtgaagatcaagatgaaggaagggaaacagaagacgatcaacaatgtgatttttgttcctgggctcaatagaaacgtgttgagtgttcagcagatgaaatcaagaggctgttcattcataaatggagcacgaggcgaatgcattgttcatgatcggactgggaaagaatttggggatactttgtgggataagagaggattatctctgcgtttgcaggtgattgaaggtaatgccacctcttaatcagctctgcctttctctttggtggtagactttaactcgtaaggtggacgtatgtctttttagtttggttttattctgttttcagtttgctagtctaattcatattctgctactctagtatgaattagtattgtggtcttttaacctaggacggcttggtattaatctagttttgaaaaactattttggttgttctctatgcgtttagtatgctatgcttttgtcaagttttgcttgtggtgaaaaggtgacaacatccattaaagctatcgtgtgctgtggccgtgtcagtgtggggttaatcacttaaccggatcagcccatataacctgaatacttgaaccagacttaaccaaattaggttttatagaacaaataactcattcccctattcgaaaggtgtatcatgtgcgtataattttaggaaagacaaaatgattttaagaattaggacgtatttagaaccgggccgaataattaaccgaaataatttgggttcaaagtatatcttccaattgcggtaaaccgaaccaataaccaaaatatttacacctgacagactcattttagtgatcttccaagcactagggcttgtttggtttaatactttaatgtcactgtatatataaatagaaagcgttcagatgagtgaatagtttattcattcgctttcttcaagatatcccaacatttagagctatggcggcggcgaataaacaacaagtcgatgtttccgatgacctgaactacgaaatttgggctcgaatcgcgaaaactacactaacggagaaaggactttgggatgttgtcgagaacggagtcccgccagatccatcgaaggttccagagttagcagcgaagattcaacccgaagagctttcaaaatggagagatctcgcggtgaaagacatgaaagcgctccagaatttgcagtcttctctcactgattcagctttaaggaagactctctatgcttcttcggctaaagatgtttgggatttgctcgaaaaaggtaacaatgaacaagctaagctacgtaggttagagaagcaattcgaagaacttagtatggatgaagcagaacagacaaattcatacttagataaagtcagaaaaatcgctgaacagttgcgtcgtttgaaaaatgggaaatctgattatgaggttgtcacaaaggtgttaggctcgctctcagagtcgcatgaagatttagctacgctgttagaggaacaagtagatctgaagaaggtgtctcttaagagtcttgctgagtttttttaacagatatgaatcagaaaagagagagagtcaaagcagtaatgaattacctgtgtatgaaatgttatctctcgctcttggtcctgtgacattttatgaggatatgtggctattatccagcggtaccacgaatcacatgtctccatatctgaaatttttcaccactctagacagaagacacagggctccggtgaaattgatcaacggatcaattatcatgttaaaaggtagaggagatgtcaaagtcatgaccaaagaagggaagaggaagacgatcaagaatgtgctttttgttccggatctcgacagaaacgtgttgagtcttggtcagctaggacacttaggctacataatgataatgaatagagacaaatgcattcttaagggtcagagaactgagaaagtatttggggaagccgtgaaggaagagggaggttttgttctgcgttatcaggtgattgaaggtaatttcacttctacttaacgagctgctttgccactatgaataaattggtagtagacttaattagtaaggtgtggacaaatcaagtgtttcatttgtttgtttgttccattttctctaagtttgttcatctaagaaaagctgattcatattctgctattgtaatatgaattagtctggttggttttactctagtagtaaaaaactatgttgttattaacaatgcagtgcttttgtcaagttttattaatggtgaaaaggagacgaattggaagggtttttagtaaatttatcaaatatatgattacaggaccaagcttgagataatttagcgaaatagaaaggagatagacatggtagggcaagggcatttttgaccgtagtaccattgtgacataaatttatgcatgcatatcaatgaaatggatttggtagtttatcacgtttttcatcattacaaggggcaaaaattgcaaatactaaaacagacttctatgttaagtatactttattcccttaacaggatcaacccacttaaattggaccagatacaacgctaacaagtaacaacaataactaacccgattcgaaagctatgattgaccaaattagcaaatatggaacttaacgttcatctgattatctaaagtgagccggtttatatatatttctccaattgcgctaaaccgaaccaagaataaaaccaaacggagccacaactcaatttggtgcatttgcaattgaactctagggtttacggttaagataaatagaaagtgttggggtgaaggattagtttaatcgctttgcttgatccaagagaatttttagagaaaaagatttgacaacatttgcggcaatggcggcgagtctaccagacggtgtttccgatgactttgactacgaagattggtctccaatggtgaaaactagactcgtggaaaatggagtttgggatgttgttcaaaacggagtctcgccaaatccaacgacgaatccagagttagcggcaactatcaaagccgtagatctagcacaatggagaaatcttgtggttaaagacaacaaagcgctcaagataatgcaatcttctctcccagattcggttttcaggaaaacaatctcgattgcttcagccaaggaactttgggatttgctcaaaaaaggtaacgataccaaagaagctaagctacgtagattagagaaacaattcgaaaaccttatgatgtacgaaggagaacgaatgaaattgtacttgaagagacttgagaaaatcattgaagagttatttgttttgggaaatccaatatcggatgataaggttatcgcgaagctgttgacttctctgccacggtcgtatgatgattctgttcctgtgttgaaggaattcatgactttgcctgaactgactcatcgcgatcttcttaaggcttttgaaatgtttggatcagatcctaaaactatgcctcaggagttgatgaagttcataatgatccttagaagagcctggtctgagcggatgtggtgtagtgcgtgcgagacgtacaatcataaccaagaagactgttattacaaccctagggtagtgtacttgggtggaggcagaggccaatgctttcaatgtggagaaagagggcattttgctagagattgctgcaatactaggaatctgcaaccaatagatcggaagagagaagtcaaagatgattttacatatgatgaggatatgtggatgctatacaccacctctgagaatcacatgagtccgtatgagaagtttttcacatctttggacagaacatacaaagctggtgttcaattacccaacgggaatgttgtcatggtagaagggataggagatgtcaagttcatgatggagggagtgaggatgactatcaaggatgtgcttttcgttccttggatcaacaaaaacatattgagttttagtcggatgaaaaagagaggctattcaatggaagtggatgacggtgaatggatcattcgggacaggactgggaaagtatttgttaaaaccttgcgggaagagagaggcattgctctgcgtttgcagatgattgaaaggtattcactttgaataaatttagtagtagacttactctttaggtggctctttcacgtggtttcagtttggatttattcgtctaagaaaaagctaattctcatattctgctactgcaatatgaattagccctggtcttttattgggggtttaatctagctttttggaaagtactttgtattcactttgcattgcttttgttaacttttgctaatggttaaacaactaaataatgaaaggatttgctttgagttttcaggtgattgaaggtaatctcacttcttaactagcggcttgcaccactatgaataattttggtagtagacttatctcgtaaggtatggacaaaccaagtgttttgtgtgtttgtttgttccattttcagtatgttcatgtaagaaaagctgattttaatctagtagtcaaaaactatgttgttattcacaatgctgtgcgtcaagttttgttaatggtgagaaggaaacaatttctagtcgaataatgaaagggttgttggaaaattgatcaaatataagataacataccaaacttgagaaaatttacctaaatagaaaggagatagacatgaaagggctagggcattgtttagccgtaggcattgtgacataaatctgtgcattcaaattcacacttaatcattggacaatgaaatggttatgtaagtttattaatatgtaacgtttttcgtctttacaaagtgcaaatactcaaatattatagatcaatgtaatactgttccggtcctataaatagattttatatattcagtgctatgttatttgaagtaaaccaagttctaagatgactcaacgaatgctttaattatcgttcagaataaattctgctttaattatcattcctcttagattagttataatctcagaagtccaaaccaacaacaactggtagtattattcatggctgcagagaagcttgcgtgtggtgtacggtttaatcacttaactggaccaacccactgaaattgaaccaggcttaaccaaaattgatttccctaacaataataactaaaccgattcgaaaactccgtataattagtttttgagaaataaatttaacatttactatattaatttggaagggatccgagtcacttttaggtttattatgtattatatgtctgtatatattttctccaatttggttaaaccgaaccaagaaataaaccaaaaccgagccactactcaatatggtgattttgcaattgaactttagggtttatggttaaagcataaagtcactatataaatagtaaaatagaaagagttttggtagtcgctttgctttctccaagagatctacagagaaaaagctttgacgacagttgcggctatggcggcgaatctacgagacggtgtttccgatgactttgactatgaacattggtctccaatcgcggaaacgagactggtggagaatggtgtttgggatgttgttcaaaacggagtctcaccaaatccaacgacggatccagaggtagcggcgactattaaggtcgaagatcttacccaatggagaaatcgtatgattgaagacaacaaagcgctcaagataatgcaatctgctctcccagattcggttttcaggaagactatctcggttgcttcgtccaaggaactttgggatttgctcaaaaaaggtaacgataacgaagaagctaaaaagctacgtagattagagaagcaattagaaaaccttacgatgtacgaaggagaacgaatgaagtcgtacttgaagagagttgagaaaatcattgaagagttctttgtttggggaaatccgatatcggatgagaaggttatcgctaagctgttaacttcgctgccacggccatatgatgattctattactgtgttgaaggaattcatgactttgcctgatctgactcatcgtgatcttcttaaggcttttgaaatgtttggatcaaatcctaaaactatgcctcaggagttgatgaagttcattaacattcttagaaaagcccactctgatcggttgccgtgtcgtgggtacgataagaacaatcccatcaaagatgctaagctacttagattagagaaacaattcgagaagcttatgatgtatgacggagaatctatggattcttacttggagcgagttttggataccattgaacagttccgcgcttcgggaaatccgttatccgatgatgatgttatcgctaagctgttaacttcgctgtcatggccatatgatgatgctattcctgtgttggaggaactcatgaatttgcctgatatgactcctcatgatcttattggtgttttggagatgtttggatcacatcctgaaattatgcctcaggggttgaaggatttcgtcaaaagtcttagaaaagccaaggctgagcagttgtggtgtggtgtgtgcaagatgtacaatcactaccaagaagactgttattacaaccctagggtagtgaacttaggtggtggagaaagagggcattgtgctagagactgctgtaacacaaggaatttgcaacccggggcgacactacaagctcagaagagagaagtgaacgatgatttcacttatgatgaggatatgtggatgctatacaccaccactgagaatcacatgactccatatgagaagtttttcacatctttggatagaacatacagagctggggttcaattagcgggcgtgaatgttgtcatggtagaagggataggagatgtcaagttcacgatgaagggagtgaagatgacaatcaaggatgtgcttttcgttcctcggatcaacaaaaacgttttgagttttagtcggatgaaaaaaagaggctattcattggaaatggaaggaggtgaatgcactattagggatgagaagggcaagatatttgttcaaaccttgcgggaaaagagaggcattgctctgcgtttgcaggtgactgaaaggtatttgctttgaataaatttatttggtagtagtagtatcaagtcttttatgtcgtttcaatttggatttattcgcctaagtaaagctaattcgtatactgctactgcaatatgaattagtttggtcttttattggttttttgaattagtttggtcttttattggttttttggaaacgcttttgttaagttttgctaatggtgaaaggagacgattctagttaacaacttaacaatgaaagggcttttttattaaattgatcaatatatgattacaatccaaacttaattgagaaaatttaccgaaatagaaaggagaataaattctgctttaaatcttagattagctataatcacacaagtgacaagtccaaatcatggttagagagaagcttgcgtgcggtgtacggacgtacggttaatcacttaaccggaccaacccacttgaattgaaccagatacaacattcgttaacaaaaataacttaagcgattcaaaaactccgtatgatcaaccaaattcacaaacgtatttgaaatatgtatgaatttaacattcatttggaagtgatgcgattcattggtttatagtttatacatatttctccaattgtgttaaaccgaaccaagaaataaaagcgaaaccgagccactactcaactaggtgattttgcaattgaactttagggtttatgattaagcgcactatataaataaaatgttctggagactggagagggattagtttagtcactttgcttgatccaagagaatatacagagaaaaaagcttgacgacagttgaggctatggcggcgaatctccaagacggtgtttctgatgactttgactacgagcattggtctccaatcgcgaaaaagagactcgtggaaaatggagtttgggatgttgttcaaaatggagtctcgccaaatccaacgaagattccacagttagcggcgactatccaagccgtagatctagcacaatggagaaatcgtgtgattaaagacaacaaagcgcttaagataatgcaatcttctctcccagattcggttttcaggaagactatctcgattgcttcagccaaggaactttgggatttgctcaaaaaaggtaacgataccaaagaagctaagctacgtagattagagaaacaatttgagaagcttatgatgtacgaaggagaaccaatggatttgtacttgaagagagttgaggaaatcactgaacggttcgaagttttgggaaatccgatatcggatgataaggttatcaccaagctgttaacttcgttgtcatggccatatgatgattctattcctgtgttgaaggaattcatgactttgcctgatctgactcttcgcgatcttcttaaggcttttgaattgtttggatcacatcctgaaactatgcctcaggagttgatgaagttcattaacattcttagaaaagctcactctgagcggatgccgtgtggtatctgcgtgaagaacaatcacaaccaagaagaagacttgtattacaaccataggcctagggtagtgaatttaagtggagccaatcaatttagaggacaagggcattatgcaagagattgcagcaacactagaaatctgcaacaagctgagaagaggatccaaaaacctgagcatctgatgttaggggtaactgttggtggtatcacatttgatgagggcatgtggatggtacacaccactacaacggatcacatgactccatatgagaagtttttcacgactttagaccgatcatacagagctagggttggactggcggacgggaaagttgtcatggcagaagggaaaggagatgtcatgattatgacgagggaagggaagaagaggatcaagaatgtgctttttgttcccgggatcaacaaaaacgctttgagtgttgctcagatgacagaccaaggctgttcagtaacatttggaggaggcaaatgcattatgaagaatcacactgggaaagtatttggagaagccatgttggaagagacaggttatgttattcgtttgcaggtgattaaagaagttatctggcactaggcttaactcgtatggtggacgtattagtttggtattcttctgttttaagtttctttgcctaagaataagaaagctactgctgctgcagtatggattagtgtggtctttttttaacctaggacggtttggaatcaatctagtttttgggaaactgttttgtatccacaatgcaatgcttttgtcaagttttgctaatggtgaaagaagacgattcttgtagaaagataaaagggcttttggtaaattgatgatcaaatatacgattacagaccaaacttaattgagaaaatttaccgaaattgaaagagagagatagacatgcagaaggtgggttgttgaatcagtagcggcagatcttggccgtaggcattgtgacacaaacttgtgcgtatttcttcttggccgcctctgtccctcgcttgggctcttcttcttcagccatggctaccttagccaaagaacaaaccgctgcagctgcagccgtgaacatgaggtccctcctcattgtggtgctgctctgttccttgacttctaagctgggtgtgttgtcgctcgtggaggctctgactacggagagccttcgtccgccggtggctgagggaaccttggcgacggccgggaagaaggtagcggtcatggtcatcgatgccattgcttgatagttgattctactcgctagttggctctcggttaatggtttgtgaggtgatgggaatgtgtttaagaagttgggtaatttgagtttgtggaattgtggagaaatgatatccatttccttatccaaatatgattttcgtgcaaatgggttgtggccacgtgtcatgttctatcttttgttaagaaaaaaaaccatgagaggttctcgcaccaaaataaaaaagtgtacagtgtagatacttttgttgtggagtcccacatgtaggtcccatcttggatttaatttaatgaaacagaataatgattcgaaattacaacactggttaaaccccaacccttggtctaagtctaacgccgttagtcgttcttctctgttctctccatcaaattcgtcagaaaccaaagaagattcatcaattctcctctaacaccaatcctgcttgctttcactttccttctccgatttcgttctcacgccttcgcattcctttttttaatttcgtttcgaaacgcgtttcaaggttacgtcgatctcaaagtaacatcgccttcagagagaaattgataaaccttgctccaattccattgttattcatggctcttagaaactttacctagattactcggattcaatcgtcaagtttatattggatcgttgtgtcgtaggaaccctaatttcgagggcctgtgcactcactcactcactcaatttgcacaacaccctcagagaccaacaagagcaacatgaacgctccgatcataggtaagctctattttgcacttgggcttcctttcccattgttcggttcttcatcgatggtatttgtttacctttttcctgtgtagatccattgcaaggagattttcctgaggtgattgaagaatatctggaacatggtgtcattaaatgcgttgcctttaatcaccgtggttctcttctcgctggtaataattttcttcccaatttagcttttgctgtttcgttatctatgaatttggttaaagtttggatttttatagtacttacattgatggtgatatcttgcattgtttatttgttagctggatgtgccgatggtggctgtgtaatctgggatttcgaaacaagaggcattgcaaaggagattcgtgataatgattgttctgctgctataacaagtgtctcctggtccaaatatgggcaccgcctgcttgtctcagctgcagataagtcattaactctttgggatgtctcaaccggagagaagattgctcgtacgattcttcagcagactccgttgcaagctcgtttaaaccctggcttaagttctccttctctctgtctggcatgcccgctctcatccgctccgatgatagttgactttgacattgattgtacaactttgcttccagtctctgtgcctgagatgcctgatgtattagctcctccgcaacgcagtaaatgtcctgaatcaaatcctcctttctctccagctgcagcgtgctttaacaagtgtggggatcttgtttatatcggtaattccaaaggagagatacttatagttgattataaaagtgttcgagttcttgctttggtttctgcgtctggtgcggcacctgtgaagaacattgtgtttagcaggaatgggcagtatcttctcacaaattcacatgatcgaaccattaggatatatgaaaatcttctcccagcaaaaaatgtgcttaaatcccttgaggacctggggaagaacatagatgggcttgatggtattgagaaaatgaagacagttggatcaaaatgcttaacactcttcagggaattccaagattcagttacaaaaatgcattggaaagcgccttgtttcagtggtgatggtgagtgggtagttgggggttctgcgtgcaaaggggaacataagatctacatatgggaccgagctgggcatcttgtgaaaatattagaaggtccaaaagaagcgttgattgatctagcttggcatcctgttcatcccataatcgtttctgtttccttggcgggtctagtatatatttgggcaaaagattacacagagaactggagtgcatttgctcctgatttcaaggagcttgaggagaatgaagagtatgtggaacgcgaagatgaatttgatttgatacctgaaacagaaaaggtgagaaattgaattgatagagacttaaatcattttctttctgtcacatgtttttctgaaactctatatggttgtatgcgtgtaggtaaaagttttagatgttaatgaagatgaagaagttgacatagatacggtggaaaaggatgcttttagtgattcagatatgtcagtggaggaactccgctaccttccagctgaacctattccagatacaaatgaccagcaagacaatttggttgaaagcataaagttaattgaaggtcagatatctgcatctcctgcttctgaagaggctggtcagaatggacaccatgcatcaagtccacaagcaggtaagaaagatagtaatagcgtcatatgaaaaacacagtttatgaatctcctatagacgttagattataagtgcaaaaagtaagaagtctgctagataaaggtctgatttgtagattagtattgtgaatgtatgatgtgttatgtcacagatatagatgctctcgttactaatacatggctctctattgcagaagaaatgggtgagacacgaggaaagagaaagaggaaaccatcagagaaagccatggagctgcaggcagagaaggcaaaaccattgaaagggtcaggcaaaacagtaagagcaaaaaacagagcagcgtttgatcaagaaaccgatgacagtataaatggtggtgatgatgatgatgatgcatattattaacaaattaggtttactaacctttatgtatgcaaaaagaaaaacaaacgcagtaagctaggacatggaatgatatttgtttgaatttttcttgttgttggaggcaatgttgtgttcttcttcattacctcgacgcagctatgtgctgaatcaagttggggtatgcacaataggaaattatgtggcaagtagcttaaatttacgcataacgtcagttattaagacaactgtttagtattttggacacaaaattatgcagaaatatctttgattcattaactttgagtgattatcacatcaacagaattatgggtcatagcagctacattattacattctctacacaacaatggatacagaccacattctatcacagaacccatcactttccatttcacatttatctatatgcatatagatagatagatagacgtcgagactatatatggttattggttaagaatgaaagagaaaaaagctggaggaatttgtttctaaggtccatcagcagattgagtctttcttaggttccagtgaagaccatcgtggatgctgcgtaagaagtcgttagtggattcaacttgacaagcggttgagacgggccatggtgccatgctacacactagtgcatcccctgcttcaagctgtttccggtctttcccatcaaaggagacccaagcggagcttctgctgttgaatggcacttggactctcactgtcacgtgttccggtaatattagtgggcggaatgatagagaatgcggacagataggcgtgaataagatcccaggaacctgcaaaacattaagttacaatataatccattatctgttattgtataatgtatataacaccaaagctattgtgcaatctctcaaattcttcaatggcatatgaatttggagctttaacattttcgactttgttactaatatttgaattgtgaatcaaagaaccagcctcgcttgttgctacagatgtaaagatcattttggaatatttacctgaggatggaccattgaccctccagcagcaagtgaatacgcggtgctaccagatgttgtagacagtataagtccatcgccttgcacacatgtgacgaatgagttgtcacagtagcattcaaggtttgtgaggtaagaagatattccacggtcaatggtgacttcattcagaacaagcatagtctcctctggttcatattcatgtgttgctttatctctgatgatgtgacactgcaacctgtgtcgtagtgttatactgataggacccttcaaaatcgcttcaagacaatctcggtattgttcgctgtctggattggagttaaagaaaagtttttgtaacagataatgtgtaatacagcttaactaactaactgatataaacaagatgaaggatacgaaaaggagtcataaatccaagagatcccatggagaatggaacaattggaggcactggtcctttaaacatcgatgcagcctgtaaccgttaagatacttcatgttaaattgtatcggtggtaatataaaaagcaaaagatggaagatgatataaaacctgagtcatagaaatccaagatttacttacccatagcactgtgccatccccaccaagagttataagaaggtcaacctttgtgtgtagaagtgaaatttccttgtctgcatcataaatcataactaggagttgactacaaggtctaagcaatcgatgtggtctacatgaatttatttcacacttctgtgctcagacttttcattagcagagaacaatctgaaaagaagatattatatattaccatcttcccaagtttgtacgaagttgaaggaacttgattctgataagagttcttcctttactcgaggttccacataaatatttagtcctttttgcgttctcaaccatctgaaatggagacaaatcaaaatctaattacttcatctgaaccaagaatctactttccaaataagaacatacataagctacagtagtttgtgagacacataaataaaagagatgaagcagcaaagcagaaattcagagagagattcagaaactaatcatgtggttaggccgttagggtagcatattcttaacaatggagccgatttatctttctcgaagagtactgaaactcattgtagaaatgacctgcaaaatataaacactgacctgaccatatccacagagagaactcgcacggaagttgaattaggcttagtgataataagtacagtttgtggatcagactcccatgtcagtgaaatctgaaattagaagttgttaggtttagtctacaaaacaccttaccaagcaactaaagtaatatgaattgagaacaaatattttccatcagttgtaaattcagagatgggaaacagaaagatagagaagatgaaacaatagtcctacctgtttactactgcgctctgctgtgctgatattccctctctcaaacgaaacaatttcttttttgtgttgatcattagccatccccttacatccccatgaaagtttaaatgatgcctgcagccaatttcatagatatttcaatattagaatagagttttcattctttccttattgttttaggcttttagcctaatcatttcctgcaacagcgttgccagttttgaatgtcaaagtaattgggacacagcaaatgcaaagatacattaacaactctgacggaccaatattcgtcaacatctgatactagaatgtgttagtccaacaaaggctaatgtaagattcatcacaggtacataaattccagaggacttattcaaaaaatgcacagaggttgatatttgtttacttatgcttactgacttgcatagccaaaaatataaaagcaaggatagtaacagtcaactatatattaccttcctcttcaatttgttattaaaactgttaaatccaccatcttggagcacttcatgagagcaaatagtctccatgccattagaactgatttcctgagcataaagccgcggagactttgctaagtgctccatcctttgaccattagattcatcggcacacactccatttgacagttctgtaaaacaagccaggaattctgttattcaaacatatccatggccaaaaacaccattcaaatcaaaattactagaactaaatggtgaacattttataacaaccctttgaagttagtagagaacctttatgctgcaactccacgttcttagacctctctaactcgtatctacgcttccattcagcagcctcagcttgagccaacgcctttccttcagcagctccccttagtgcctttgcaacagctacaatatcccagaaactgaaaaattaaatcccatatccaaaggatatagtacagctcatgttacacatatcgaaatcttgcttacttctcaaagcctcagagaactcaacgagatggtcgtcagtagcctgcataggagtctgttgaagaagaagctcctgaacagccttctctgattgagcaagtgaagtcaaatgagtgaaaccattctctgggttcggcaacaaactctttgcatctccatttgcaaatgaatcctgccaagaaatcaaacaaagttaaaacctttttgatataaaacacacacaaactcaaaagagtctcttcacattctcaattccgaatcaatttcaataaacgaaatctccggcgattactacacgatcagaaatccaaaaatgaaagatttttgttgaccagctcaacaaattcgctattaaatcccccaaattgaagaagaagacaaaaaagcagagagatttaagaaaaatgaatcatagaagcccaattcatggaccacagagtgaaataacaccgcaaaacagagcaaagagagtgagtataacagaatcggcaagagaaggagagattgaagtacagtgtgattgagcttgtaggtcgacgacattgaattctgtcttctgtgatcgaagacgaagaagaaagagagagagagaagaagaagaagaaagtgcgtaacacgaagaagaagcttgagatatgtttccaatctccaagacggcagatttatgtgtaatatatatatataaggaaatcgaagccgtacgcgtccaagcttctgtgaataaacagtaatttgctttgaagttaacggatcacaacatatatttgactcccacatcaactcttttctctcatactaatatatcaacataaatatatatttttttaaaaaatagagagagtggaaaaaaaaaaatattattatgaagtataaaattttaatacaaatattaaaatattcaaaaaaggttttagtacaaaatgtttttcgtaaaacaatttcagaatgacttgtgaaatatatcttttttttgtgtgcacaatttgacaatatatctaaaggaaataaaaagaggtagagtagtgatgtaggtgtctaaattatatgaaactgacatgtaacctaaatttctcattttgtatattgttgtttatatcttatatagtactattttcaaatactcaaaatacacagtttatgattttttagattttatgtggggactaaacaacatctatcggtatatagttaatcaacaaatcttctggtgaagatagttgtaaaagtatctttcaaaatgatcaactaatcattacatgatcatcatgattcgtgatctaattattaaatagtactagccgactgcagataatgttttataattttgtacatattagcacggcaatgtaataacaataacataatctgcaaaatatgtagatgtttgaacggtatctatttaacatgaaaattattaatttcctaagttcttaaccaaccattttaccgatcgatgacatcacacaaatcttaagttttcaaatattctttttgtaagccatttattaggaaaacaaaatctatgagaaaatatttattctgtctaaaaggcaaataaagagagaataaagcatttatatagttttattcttctcatttgatgattagttgatgatttgggtcttttgataacatactttaagaccaaatagttgattactacttaactaaattacaccattagttacttcggcagcaattacaaaatagaagtgggtggccaaataacgcgtgggctgcttttgaggactttgaacactctggtccttcgatctcgcatggtgtgcggtcgtggtgtttttgattccactagagctaagtgcacgctattaatgcgtcaagatctcgacacgtgattcatctataaaccattactctgatgaacgctttagatttgattttcccaagttaatggacggtgtggattagcatattgcagttttggacgtggacggcattttctgtttcatggaaatattcaacctatttgactttatattccttttttccaacgactaaagtcttattctatttgatttcacaaggccgcatggatattgcaacatttttcagcattatagtaaggtcaatgagaaagtttacactttagcggatttattagtactacttatttagttactacaataagatatttttattgcatgtccttttttgcgtacttttgtgagagactaccaattcaatgactacttactctcgactttaatttggtcacatagagaaatatatttggaaaatgaatggtaagaactaagaagtcagcaaaatcttactttttgacgcatattttgctaattttgtcttctctcaacgaaaaaaggtcatacgacttttatagacttttgcgagagtctttcttgacccgaggtatttggtaatataagtttcgttttcacactgtgttttgttaaaaagattatttctttctttttatgtaaaaacttaactacaattatcgattctaatctataagtttagacacccatttacatttgatcatcttcaacatgcattatgcttcatataattgatatgtaatttgacaccagaaatataatataagatatgtaattggcagagtggtcgtgtttgatttttgcacgttctaatcattctctcttttcgggtctatccaagttgatcgtcctctccatatgtaggaacaatgtgatataaaaagcttatcttaaaattatttctgatgagtatttggacatgtttgatagtctttcactttcccaatagaatattgtcccaaccaaacatttttagatggaatatttattactaaagatatattgggtctagaaaactattcaaagtcttccagagagatatatgtagttacgttgactctgatataaaaaaggacgtgtccgttttcttcttcatttttccacaaatattaacggttatgtttttcacctctgtctgtttcacttccttgtaaagggtttgcgagtaattaaaaactaaaaaggccaataggctttgttggaaaaaaaaaagtgttgcgttttcatttgtgtctttcttctgtctagactctagataatatactgtagtagttaaaattttatttgtctgaaatttcgtaattttgactgccctttataatattccacgacaattactcttaaatcttattcttttgataatgaagtttttggtatataaatctccaatttgcatacctcatacctggcccaaaatgtgtttaatttcttccacggaccataagatcttaggaaatgtatttttttttttttggatctttcactaatacctaaattattagatttggtttgagaagtttagaaaaaaattaaaatttataatggcctccggccctactcatttgggccggacctgttggtgccttgttagttttctaatcttgttatggaaataaaatattgcatggtgaatggttatcataaaattgtgctcactgttagcaatactgcctttcttcgtaacgcaaagactgacgtgaagttttttttttttttttatatatatatatttttgtttgacatgaagttttaatagtgggacatttggcatttgggtagggtacgaaaacttggttcctattttttttttttttttatcccacaatgacaaagctgattagctaacagctgcagaaatactaacaattttgtttattgtgtagttgtgtcacataagcatgacgttttgttgtaaatctcagtttttctctataattcacactctttttatcgtttgtgttcacttgttctagagagaaaacaagaacacatttaattactttaatcttctacattgataatattaattggattttcttttagctcttacaacacacaggtatttataccacatacaagacacacttgcacttaattactaatgcattagaccacacccctagacctagaaatcacatcagccactctactacacttgagactgtaactccatgttttgctccttttagacacttaacatcaaccttagtctaggacacaacataattacctacttgggccctaataatccgtttggcccattatcacaaaacacaacataacaaagcaagcccactctctttagttgactgttccttcctcttcatgtgtcgttgaccttcttgtcacgacatcttcttcttccttttgctccttcttacgcttgaagcttcttctctattcttctcttcttcttcttctcatgatgcttttcttcttgtaggatttaaactacgattctcaattccaacacgtttcaatatcatctcgtctgcagtgaaagatatgccacaacctgatcctaccggagctttgtcgtccagattttgtcgtccagaattgtcgaaagcttcctcgtgttgcatggagctctggactctggttccaaatcagtacttaatctctatcggcctcaagctattttcaattctttgtttttccccccaaagtaattttcaattctttatcttcaatttcgattttttatttaagttttccttcttttagaatcatatgcactaatacactgttaatctctcccattatgtaattttttgttgctaaataattttgacgtcattgtaagtgtaaagcctcaggcccaacaacaggaagcccaaactcttccccaatctcacaacgggacaaagttacagagctcccctctgcaacctctgcaacaaaagaagacatacacacaaaaggaaagaaacagagcagctacttcttcgccggttgtactctcaaaccgtttcagtcctatcatctcagaagacagtggctagatggtcgacacttgtaaacagatccaatgttgctacaaagatccagaatgttcttttgcttctataagtatgagtctctagaatcaattgtaatattgagttggtgtatcaatcaaagtaagattgagtacaaatctcttttcttctttattcacagtcatcacaagaaaaaaacagatatccctacattttgttgctaaaaaacaggaggaaaaacaaaaaaaagtttcaatagtggaacatttgggtttagagtttggtaaagaaaacttattccaacaatgacaatgctgatcttaaatagataaccagatctcatagatgataatgctgatattatgaaagctgcacattaaaataaactttcgcctgaatcacccttgaagctggtcgtgctctctccttcagcttttgggccacgaagaaaagaagccaggtacacacaaggattgctatcacaatctcagggaagccccaccatcctgaatgcgtcacctttactccaaattcattcatattcatttcttctcctgtcattttcggctcgtccggtgatagaggcccgagaaaattgttgttgtgccctagctgtattaataataacaccaatgttcttatgtttaacaacctctaagattcaatctttttttgatagctagaaaacattattttatgttcttgaatagttcttgcgagtgataagctcataaagtcaagctattgacttaccttgatggcccaagatccaaaaatcatgtaagaaatcgtgtaggaaatcgagaaacggcaaaagattttgggaagatcaggaagaagacgggagaatccagaagacgtcatgatgattccctttccaaaacataaaaacagacatcagtttattcaagatctttagtagctttctttgaagttagttaaaaagaaaacagaggtcgctctgctcgtacaataaggccagctccagtgaaaagaccagtcaagaagtttggaacaaacgaagccacaaccatcatgagaatctctattacagagaatgacaaaacaccgggcaagttccctgatttgtaagttataattcctctaatgcgagtgccattatgctgcaactcttggttcccccatctctccaactcattccactcagcagcctcggcttcggcagctacaaatacgcaagaatctcaaagagtaagtcccaaaacggcaaagaaaacaccttttgtttcaaatatccaagcttacttctcaaagaaggcagactccgatggtcgtatttagtctgttgaatagaaagctcctcaacaacttcctctgattgagtaagtgaagaccaattattgaaatagttatcttggtttgagtacaaactttttctatctttatttccatagggatcctgccaagaaatacaataagttaaaatgttctgattcagaacaaataattggtctattcagaacacataactaccagtaccactagctcaagaggaagtaaaaaagaagaagaagaggaatctactctaaatctttaactgaagatgaacgcataagccaattcatgaacgctaaggtgaacaaatagagtgactaaaacagaatcagaaagagaaagggaggaggttaatttacagtgaaatcgaagtcgtgtgtcgccattgagttctatgaccgaagatgatatatcgagagagagattaaagttcattaaaacaaagatatatatactcaaagccaaagatagtcgtgtaattacaccgttaattacttgggcatttacagatataagttgggtccccaacaacgcgtagcagcttttgaggacttcagcaattctccataggcatagtttatctaagaaaattggggtcgaaacccttggcccttaatgaacaagaggccttgacacttgactagcacgtcttcgtcctctttcatggcaataattcaaccaagttgcctttatttttgtattttcttttgcctacgtatttactttactttattgaggtttatagttatgcttttagtatgcttttttttttctttcgaacgactaaagtcttcttgcaatcatgttagaatgtttaaatggtgatcagtatcgaatttatgattaacactagtactttttgattggatgtgattgtgaattcctctttcgtagaaactgactctactactattgtcttttacgtagagactaatttaataactatcgactttaattcgggcacaagaaaatgtatttgggaaattaatgggaagagagtcagagtcaaccaaaacataccttttgaagactattttgccaattttgtctttggttaaacggtcctgttctctctgtgtcgatccatatcaagtcctccaatgtattggacgaacaaagatcttatataaaaaaaaacttaacttttagatactatcttatgagtatatggacatgtttcatatttgtttgtgttttactttccttttgttaaatggatagttttacagtcctaataattgctctaaaaacattatgcattttttttattttggctaaaaaaattatgcattttattagaacactccaactaaatttataaggagaattttgataactaaatatatgcatgtgggtcttccagagagcttcattttcgttgactaaaggacaacgtgtcaatttttgcttaatttcacacaaagatggcaaattaataatcgaaatttcttcgtatgttgttttcttaactattatcaacttatataagtttttcatttccccatttaaattacctagtctttctttagtccatctaaaatttagttaaatttgagtttccttatttcatgtcggaaatcttgaatgatcacgataatattgtacttgtaaattttagttttactcatgataaaattttggtatcaatatctccaatttagtatatactgagttactgactgaccgagcccaaaatgtatttttttcctcatgggatctcaagaaaatgttctttctttttctttgaccctttacacctaaataaactacttttggtcatttaaagttgactatgggatccgggtatctctgcgccatacttatttggaccaaacatgttggtgtaacaaggttttcgtttttatttggccatactctcactgtgcgcaacactgtcttacttgtgttacataaaccttgaagtaaagtttcaatagtggaacatttgggtagggtttatcaaacgaaactttgttatcagtttgttctttttcttcaacaatgacaaagctgattaagatgagatcttgatgaaagcttcagaacacatgcatacattatattaagtcttttagtagtggataggagagttaaggccttcttgagaagaaagtgagcggagaggttggtgtctccttgaagacattgacgacagtgaaagagacagagaaggcattctcttaaaagaaggtctcctatcaagattcctcatcgttcttttcgcctgaatcgccttcaaagcaggtcctgctctctccctcagctttagaaccacgaagaagagaagcctgtaacacacaaggattgctactaccgcagctaagtcccaccattttgaatatgtcaccttcactccaaagaccttctctatcacttcctctcctgtcattttcggctcacccgggaacaatggctcgaactctagccctagaaagtcattcttgtaccctccctgcaacactcccaaatgtattatttttatgttcttgaatcgtaataagctcataaagttagtttcttgacttacctggatagcccaagaaccgtagcttatgtaagaaaccgggtaacgccaaaagattttgggaagatcaggaagaagacggaagaatccagaagtcatcatgatgattcccttttccaaacacaaaaacagaaatcagattcaagatcgttcaaagcattattagtagaaatgaaaacagaggttgctctgttcttacaatgaggccagctccagtgataagacccatcaagaagtttggaacaacagaagccacaaccatcatgagactctctatcacggaaactgagaagaagatgttgagacagaagaaagcgtaatgcgagaacccgggacgaaacttcaccaagttgtaagtaatagttcctgtgataaccgaaatcgcaaccaagaaagggaaagaagagatgtaattcgagaggatataaaccgaaacgccgtagtatccacttagcctctccttatagaacacctgaaacaaagcaaacccgcattttcatcgatagagcaattcaagatttgtgagattataagtagggttttattatttaccttcatttcttcgaggaaagaagggaagcctccaatggacatgaaagtcatgaaaccagtgatgaatccgccgcaagaaacacgggctaagattgatgtgtagctatagccaacgtcgtagaagatggttcctacgcttatagaaacaacaatgtagcttattattcgtgtccaatagtaaccgacatcacgacacatgtttatgaatgatcttgctgttaatgtcctaagttgtttccaccaggttgcttcacttccttttcttatttccatctcgagcccttcctgcgaaaaaagccagttatggaatccaagcaagcctgtgagttaacttgaacaagaagtttaaacttacgatgttagatagttctcgaatcctagattttgcggatttcgcatactttgaacgcttgtaattctcaacaagccttgctttgatcacagatgttgctagattcattagaggatctgatgtagctggtgtttcctgtagtagagtaagtattaaccttagaaaaattgcaataaaaacttgactatgtatccaaaagactttaatttgtgcaatgttcttgatattgataatggttactaccacacctgaattctctgagatcctttgagtgtagctgtgactgtatcaaagtccgagtttatacatcgcagaaaatgatcggaaggattcctcttcttcgggcacgggaaacccgattctgcaaagaacttcattcaaacaaacaaaagcaaaacagagttttcttcactatcaaggcaagaaaataaacaaaagaaattgtgtgttttttgtactgcaagaaaacaaagagtgtagggctttacctcaacagcagacttggcttcaccaaagtagacagactcaccactcgaaagcaagaaaagatcatcgaacagcgcaaaaacctcgctgctgggctgatgaaccgaggagattacggttctgccatcgcgtgcaatgttcctaagcgcctgaataacgaaaaacgcagaagcactgtccaaaccactagtgggttcgtcgagaaaaaggatttgaggacgagtgaggatctccaaagcaatgctgacacgtttcctctcaccgccactaactcctctggcgtgccagtttccaatgactctgtctgaacagtcttgaagaccaagctccatgattgtgccttccacgatgtcactcacttcctctttagacatatcacttggaagtctcaagtgagctgagtatgttattgtctccctcactgttagtgtccccaacaatacgtcctcttgtgtcacatatgcctatatatatagtcacaaaatgcatacacttcaagagcaatcaatgtaaatacctagtcataaaaactttaggtttttgttattttgaatgtaatgttttattgttatacatacatgggctataaatatatttttaatgtgccaatattatcacacatttataagaaaataatgtatagatctttgacctttgcaccactatgtacttaggacggagctgtctaaaatttgttgccataaatgaaaattgataatgtttcgccaccacaagtgacaagccacaaggacgttactattatatattgaactaacaaattagctgcatgttgtgaaattgtgggtagaaatattaacgaggaaacttactacgagaccgtagtctaatctagctttcttgccgttcagtagaagattaccggtcatgaccacgtttcttgcgagtctacctgtggataattcgggaaactttattttattaatcgattacaaattttatctatgatgtgaaaaaaaaaacagtagtataaaattgctttctgtttgtattgggatgtggaaatgaagacaaatatcagaaaaggcagctccagaaatcaattttgcatttatgaggaaattttctgcagtacttttctgccattccttgcatgcaatgcacccgaagtaacaatacatatagaattatagatactattcaataatcaaactttccagtatatatatcataaggatgatcgtaacaactagaaaaaaacaaaacaaagggctttataagttataactttaactagcaggttaaagatgatctaaaacatagttacaaataatattatcaaaccaagatatgtgttatgcatgcaggctgcagcagttaaatcatataactgcaagaacgaacctgcaagagagtcaagaagagtggactttccggatccggaaggacccattatagccatgatccgacccggttctgcataaccgtttagcctttggagcaaccttctggttggaccatcactgaaattgggtattaccaccgtcaagtcttcccacgccaaatacgctccacggctcatctccaactttgacggcagctgcctccggccactactcgagccctccagttccatttgtttttagttttgtctctctaactagctataacaatgctatagagagaaagagagattttaatgttttgtttgtttctttttcgttggtcggagagtgaatagtaagaaggaacagaagaaacaaaacaataaaaaaggatttataagcttttgcaatcaccaaacaactaaattcattaatggactgtctttaatacggcaacatttacaagtgcgcatgtatatctacaattttgaggagtaaaatgtcaatgctagttatctacgatataatattagtatttttctcaatagtaaatgcgtatagagatggagatagatcgatggcacgcgtattaatatacgtacaatgcgcttttattggcttatgatgggtatgtaatagtcgtatatgtagatcctattcatatagtcgtgtagattgagattacattttgaaattagttttgcaactaattgtgacattaaattttgtaatcgtcggacaaaaactctaaactctcatagcaaaataagagaacctctgcagtctgcatcctcaaatattaaatcagttaactgagttaaacctctttttcaaaataaaaataaaaatcagttaagtgagttgattagccactaaaattgaagcaagtctacgaaatctgacatgtttttaaacgcgaaaatgatgcagctttatacaaaaaaagtaaagaaatgtttcatttttcatttaattaagaaaatgagcagcttggattctgcaacagacatgagctgctttggaatcattgcttgtgccttatagaatttgtttcgggtaagctgctttggcttgtttgtagtaggtgtttttgctgttttgatgtttttttggtttagggttttagacccggtgatgtctttgttttcaccggctttttatttcaaaaacgtatttttcaagattgttaaggaaaatttcagatgacaaacgaaaaaaaatcaaacagagagtcacgggtcttaaattaaatgcgagatcgtagttgaagcccatatgcttatctacggttacacattcattcttgctttataatagtatgcttctccatttattatgctctaactttgttatggcataactttatttatcatatgatatatgacagggaattttaaaatatgaagtgataacgtaacgttgataaaagaatgaatgaagtgaaaaccttccaacaaagataagaattaagaagtaataagaacccatacaacataaatgacgttacaataaaatgtgatattataagtagtatggaataaatttaaaccgagagggtaaataatatacatagaagaaaaaaaaacagagattgaataacgatataacgtatatatatggtcacagtctcatagaccacgaaagccacctaacttacaaaaatgaaacctatcattgattggaatgatgtatttgtcaacacctattaagctatatatgatgtaataatgctctatacatataacatttttatgttgttgtaagaaaatataatttgattcaatgtaccaattacttggttttaaatgctgatatctattcttagcttagaatgattgaaagtcttaacgtttctaaagcaaagattatgtatagatttggtcgtaccaacacatcaaaagtccaatggctagaactcatcatattcaaaaacccgcttgtgggcagaagctgttctttgaactctagttataaagccatttaatatttcttttctttttcgatatgagatattttagcgatgagttagtgatcatttagtcactttccttccaaatgtgtgagatctgaaaaatcttaaaaaccattgcaggaaaagttttatgacaatcacttcttctaggttaaaatgcaaccaacaacgtaaagaatcaccaaacacatggcaagcaaataaacgtggaagtaaattacatagttgggccgccggtgggcatttttacttattctccgggttctcttcttcggaaatgtgatatatgctttacttgggcctaaatgggcttcttttattgacatgcagatttctatctttaatctcggaagaaacaattcgttttagattacacggattggaaaacagcttacagattagagtgaccagacttgcccaaaagaacaaaagtgtgcaacatgatttgttttcttctttttttctggcattcatgatgtgacacctactcatacacctaggatactaaaacttattgccccatttttaattttaaaatgttagatactagtccttgatagtcatcattgttttatccatttccggaaaagttttaatacagtttttaaaatcttatttagtcaaattaaaaaaccacataaaaaataacgaaaatttgtttattttttggcaaattgataattctcgttttccatgaagagcatttactttttgtttcattattgtctgatgcatggttctgccaaaaaataatacgaactctggtcaaattgactatgaccattgagaacctcacgtgtccccgtaaagcaatcttcgcagttgacataactgctgctacagtttttgacggttgagatcagacgagagtattcaagattcggtgcactcgtcgtagtggaatttgccaactgatgaaaaatttatgtcacgcgcgggttttagtgagtcagggcaaagtaagcgctcgtatcgaggcacggtttcagttttttttgcggtaaaaacggaaaaaagttaaagaggttaaaatttgtttggttttgttttccaaacaagaatactaatttatagtaatttcttctagttacatggttgttacaccgaatatatcacagtcaattctatgttctttaaaattcaaaacacaagatttttgcttagttttatatagtggtcgtgatcaataataatatctttggcaatctctttcatgtacttttttcacaccttctcaaccaaatatgcatcttggacttggacacatgggaataaacaaaattgaggagtatttcttttgtataccatgcatggattggattatagctatgaaatacattaaatctaagacctttgaatgacatatctttttattaaactaattttttaaaacaaaagtagaagtttgattgaactttataaagtagtgatctcataacacaaaatttaatcaattttaatcgattcataataaataacttgtaatccctaaattagtaattttaaattatgttatagacgacaaaagtacgattgctagggtaattttctcgttgtcatatttcgacaataaaagggagacacgtgaaatcaacgtagaatcaacttttgactactccgaaaactaatgcgcattcggcatctatacataggttacacatataaaaccaaatccgaataactcgcaagcgcataaatatcaaatattcttggaaagttgtgtttcagaatttatttttgttttaatacttttagatcgctagctaattaatattttaaattacaaaattaattaaatctaagttatttgtagaagatatcttcttattaaactaaattgttcaaataacacatagattgaattttaattaaactttatatatcagtaattttgtaacgtgtatatttaattaaattaagaaagatttatatatatataaaaaaaagtcaataacacataatttttagtaaaaataattaaggtatatgaatgaataataacatacttcccatagaatcaaatccaactagttgactaagaaattaagagttaaagttttctaaaccaaaaatgttgcatccaatgggatgtgtatataaacaccctaggttggtcaagggagaagaaaaatatactattgttaaacaaaatcttaaagactaatttatctttttagcaaaaaaaattcgatttttaactataatcccgctcctagtcttggacaaacttcaaaaaaaaaaccctaaacccaatatcacaacaacagaacccgaaaaaaaagaccacattacgaaagtagttttttttttgctttaataaaatggttcattagaagacaaaatcatagtctcaaatctcctaaaaaaaaacatcacatttaacgctacaaaaaaacccaagttagtacccactactctctcacaaaacaaaagagcctcttcttcttcttctcaatctctctgatagagaaaccaaagcaaaaaaagaaaagaaatttactgtgaccatggatccaggagatcctacttcgatacttttcacaaagatcagaactttagaaccagatttcgcttccaaaatcattggttacttgcttttacaggacttgggtaagacagatttgatgcgtttggctcttggaccagagactctcttgcagtccgtttgtctcaaagctaaatctgctttaggtctttcttctaatggatcttcttctgcttcttcgccattgaaccctatctccagacccattaacatccaccgtcattctctctctcactcttcaccgggaaatgggttttcgaggaaccctttgtctccttcttttgctactcctggttcactcggaagtaaccctaacatgatttcgagtccgtttcaagcaagttcgtctctttttgcttctgacggtgctgctgctggtgattccactggaaacggcgatttcctcgatgagcagcaactagggaactacttgtcgtttcttaacgaatcttcttcgaagaataacgacgaatctctggatccgtttgggttctcggctgataacggcgatgcccatttgcataagaggagtttctcagccagtgatgcttgttttgggtcagaggagcccggatttggtggcgggggttacaacaggttccttcacggtggtttaggtgatgattttgattctcctggtggttttggctcgccggattatgtttctagacagcaagaggagattgtgaggatgaagatggctcagagacagcgaatggctgctgctcagtacttggcggctactggttctccaatgtcgtatgagaaaggcctcaattttctcttgcatcagcgtaatgcgcataggtaattatgaaatgaagctccttttttttgccttagaatgtgtttttggttggtaaagttttcagattttacaaaagaaatgtgttggttgcagtgaatcatggaaaagtttgtatctttgagatttgttttggtctgagatgtcaattattgcttctcgaagtcgttttcgtatggttttactacttttggtattcatttacataccaatgattgttttttgtttttttttattgcttacggctctttagtcaatcttatgtttgaagtatgattgaagatatcttcgtgtctatgatatgtgaattcatagttttctgtttccggtggtgttttgtttttgcagatcaggagcaggacaatttggggaagagggttactggtttggtagtccaggccggcatgaaagggatgagtttatggggatgggagataaatctaactctgcatctaaacagatttacttgacatttccagctgacagctccttcacagatgaagatgtctccaattattttgggtaatcttttacaattgtatcaaagctgttatgtgtttgtttgcatcattaaaagtttggtggatgtctactaatgtttgcctggctctgttattgtagactgattatgtttgttgttttcttgtagcaattttggaccagtgcaagatgttaggattccataccagcagaaacggatgtttgggtttgtcacttttctccactctgaaactgtgagaatcatattggccagaggaaatcctcatttcatctgtgactcacgtgtgcttgttaaaccgtacaaggagaagggaagaatccttgaaaagtatgttgaaaccactgctcatgccttgtctctccttcccatattcttcttctctttttgtgttccctttttcttataataatccttattgaaccatagcaggaggcagcagcaacaactgctgcagcagatggagagaggaaacttttctcctggttcaagtccatctggaatggattccagggatctctttgattctcatctcggttagttgaatttatttcctatgcttgattccccttgtggatatggtttcatcagagctcaacctcttctttcgatttttttgttatgggttctgagaccagtcttgttttgtttgctaccagcaccaaggatgttttctaacacacaggagatgatgaggagaaaagctgagcaagctgacctgcaacaagcaatagaattccaaaggagaagatttttgagtctgcagttgcccgacatggacagtgaatcgtttctccatcaccagcgtagtctttccattggatcccccgtccatttttcccctcgtgtcaatcaaagcatgctctttcgatcagaaagcaccagtgatgaagtcttcgaaggtaatggtgatcaagtctatcttgcctacatcgaactttgactttatatagcttttatttacttttgccctcttccgtgttacctcttagcaggtaatggtgattcaggacatcagtctgaagcaacccgagcttttctgagtgatactggtcataacatcagccaagaacgtggttacaatagccatcttaacaaagggtatggctaatatgataagaattagtttctgatcattttcagggctttaagtattttttatatggttacacatccactcttatctgtgcttcttttattattgctcaaggcaagagacaagtctggagaatactctgcctgatagcttctttgcttccccatcaaagacaggtgaaacccaacaccccgagtttgagaaagagaattgtgctactatctctgttactacagaaaataaggcagcctcgtcacttcaatcagcctagcaattggtaggtggaaacttccccttaattcaatcacatcatcacataacaatcgttaacacttgttaatacctcttcctggaactttccaggttcgatagaagcagagagaaagcgtgaaaaggtaggcactttaagccagactgaaacttgaagaccctcttaaaggttattgggttattaagtgttgaccatggttttagtttctttggttgcagaaaagtagagactgataaaagcaggaagtagaagaattttgtctatatgtagaagctaaagccggttatataacatggaacagaaagaagggtagggagaccagttaggattttacatatctcgaaaaaggcagttgtggaatgccaatatgcaatagaaattacagctaagtactaacctcgacaaaagcattgataggcagaacaatacagtgactgaaaccttcaagttttaagtttttcgtctgttcatcgatgattgttttacctttttaccgggtcacaagccctggtttgggacaaggctacttcagttgtcaatatagatgaatgtcttttttttttggctcgtcttcagtgagactatcttgtttatagacatgggagatcaaaagcaaaactgatcctttctcatctgatcaactatatattctaattcaccaagcctgtgtcaattagtttttttcatgtttattcgtttgttgctcaattagaacttaagttgtctttgattcataatccatgaagacaacaatagaacacatatgaatgcaaaaagaaacagacttatgctctctgcatccttggctaaaggttacattaaagatcaaagttgacggagagatgaaagtgcttggcttgtgttccttgagattcggtcatgtattggttcctgtcaacaaagctagagttcaatacacttgaaactccgataaactgagggtgataaagtagatattttgggcttgatcaggatcatacctgagtcggaataatgtcaattcttgatccagtgatagtttcatacaagaaaatgtacctgccatcacggtttcttgcatcagttttcaataccaagactatagcgaaaactaacgtagaccagcgaatctctgatctcacagagccttaaagcatgtacacacaatgtttctttccatatcgaaaacatgaactagaacaatcctattataaagtttacagatcaaaatacattaccgccaagctaattcagtcacgagttctgctggagcagcaggcaggacctgacaaaaaccgacgttcgagacaccacgaattttagcaggggttctcagatagagcaggaaaaatggaaattacattgtgaagatgtaagcatacctcgtcctcatacggattgcagttctctttgaaccacaatcttaggaactcctatttggattaaaaaaacgagaacatgtgagtgaacaaagtactgcaaaccaatgaaacctgactgagagcaaaaacaggcaaaatcactaaccttatcaacattttcaggctccaggcctttttggaagcgctcttcatatgaacccgcaagccagtatctgctggaatcgggtgtatgaatctatgaacaatgtgaacaagtggatgatgattctaatcagtgattttggcagtagtgcagatatgtgttcaactttgcattcaaagagagacagacatggaaacgaagagaaaagataacagacctcatcaatcaataagattgagccatcactacttcttccaaactcatactttgtgtccaccaatatcagtccatgtttcttggccaccccctgaagcaagcatgatatattaaaatctattagaccttccaacaaagcacaacatttgaatatagaaaccagcaaaaatatatcaaaaaactgatttcttgtggtctgcaatttaaagattatgaaaatcgcaaaagtctatggctttagacggaggagttgtaactaacctgcccaaactcaaacaagctcaaagctttcatacttgcttcatcaaattcagcttgagtcatgaatccaccttcaactatctgcatgaatcatctggagaattagaagaaacacagaactacacaattgtggcttagatattcttgtcttacagctaagatcacaagaagagcaaacaaatgactcaaaaacttttctatagtttctacatttatttactgtctcagggttattagacctcatttggagagatgggcacatcatgatccgcagccttagttgttggtgtaagtatattagctggaagcttctggtttttaactaatcctgcataatttagtaatcagcatatcagtgatcttctaagatgcacttaaagaagaagacaactaataaatggcaataaagaaactgtaccatctgagagctcattcccacagtagttccgaacacctttattgtacaccgtccataaagatgtgtcagtacttccagtcacatatcctctaactacaaataacaaacataagagaccagcttagaactaaagcatatagagactgcatagggaagcgtctgacaaggtactctgtatcaagatccaatacacactaacccacaaactctatgggaaaaaccgagcatttctttgcgataacaacatttctatcaggagatgaaacgattgcatttggagttatgtgctgtgtgttattgaaccaccacaaacttgtctcattaagaacctgaaagttaagcaccactaacttattattcgttgcagtttgatctacagaccaatgtagagaagtttgtcggtaacactttaaagctatccaacttgaatagcacaaacatgaagaaaaacaaacctggcctttgaagggaattgaagcaaggtttctgtcgaatgcactcaaccgatcagttgtaataagaaccagataatcaccagcatcataaatatctctgacctgcaaaatcaaatttctgatcagttctcaactctaaacttattgtattggtttagcacaggcttggtcttttcagacagatatgaaacaaaaaagaaacattactaacctttcccttgattctagatttcagaccaggaacagtggcaagaagattagtctcagagagacaattagaaagcgagtctttgattgtgccaagaacctcccctttccggttactcgtgactaaatcgtcaagagacagttgtggtcgctcctcctgctggttttgagccttgccctggcaagacataaccaatgaacaaggttttgggtatttgttgaactccggtactgctcgaaggaacgagactgatgcaaaagctgggcttttcacatacgctttcctagtaaagctctggggtgttctcacaggatttagagttgacctcacacactgagccattccagaaacaagagacactaacacctacaccacaagtaaaccaaaaccttaaattgttaaaacaatcttgaacccgaattcagtagcagccacagaggcaaaacaagaagataggaaggattctaaacggaacctaagaccacctccaacgggggatgcaaagaggagtctaaatgccaaagtgtccaaaaaataaaatcaaaaacaaaataaatctttagactcgggtctaattttagatttttaaactctcttagaaacgcatacgtgtcgttggtggggggaagtgtagagacgaaatttttgtttttcacgtgtttatctttcgtttctcgactctacaacaacaaatctctgtttttttatttttgaaaaaccatttgcggctgtgtttcgcggagaggttgaagacaggggcaatttcgtaaatacgaaatcaggtttaataaatgggccaaatttattttcctacgttttctggtgtagtaacttgggctgaagcccaattgtgtgtgtaagatatacaattactttttgttttttgtgagcaccatgtttagttagttcaatataatggctaaacacttgtaaaacaaacaactaatagacattttttcaaaatttgaaaactttagatcttcactttttggatctcaccattggactctctcaaaattaaaaaaatactcaaagtgtctaaatttttgattttctatttttaaaattacaaaaattatttggatcctaatttttaggatcctaccattggtgaagagcacctccaatgggaggatgtaatccaaaatttgagatgttctcttgaattattggcaaaataaaaataaatcagaagtgattaaaattgacagagctcggctttgtgaagagagattgttgagaataagaagtgtcccaaaagcccaaatttagctgaatctaagacgaagcccataaaagaagcatatatctaacttaaccctaatttctaagtattctaacttaaccctaacctcaattcccaagtgacattcgctttcaaggcttcaagcacaatgcatcttccggaggatttggtcctggagatactctctaaggttccggctgtatctctggcacgatttcgatcgacttgcagaagatggaacgctctggtcgtcgatggaagctttgctaagaagcactatgcgtacggtccaaggcagtatcctatagttattatgttgatcgagtttagggtttatttagtgagtatagatctccatggaattaacaataacaacggtgccccatctgcgaagctaacaggtcaattcagcctaaaagaccctctttctaattcttcagaagaagttgatatacgtaacgcctttcactgcgacggcttattgctatgctgtaccaaagacaggagattggttgtttggaatccatgttcaggggaaaccaagtggatccaacccagaaattcctacaaggaatcagacttatatgccctaggttacgataacagatcctcctcctacaaaatcttgaggatgcatcccgttggtaacccatttcacattgagtccgaagtctatgactttgcttctcattcgtggagaagtgttggtgtgactaccgacttccacatacaaacgaatgagagttatggcatgaatgtcaagggaactacttactggtttgctcttagtaaagactggtggtcatctgacgatcgtcgtttcttactaagttttgatttttcaagagagagatttcaatgtctgcctcttccggcggatgttaaaaatctacatcttactgtggttttatcggtgactagagaagagcaacaactatgtatgtttgctactcttggcgctggtaatgtatacaaattagatgtattcgtagcaactaagacagaggagactacgggagaactgacatggaccaagttccgtcgttttcactctaagatttgtataaatgtctcggccgaccatgagaagaaagttttagtgcctcaccatatactcctaccctactacaacatcttacacattgtgggagaggatatatacataagacaagtgaataaagatggagatatcggatgcccaattctccttacttatgttccaagtttggttcaaatccagcaaggtatctagtgctcttggaagaggctagctagtgatttatacttgtcacactaatttatgcattctctatccttgtcttgatatataacaggctttgctgttttattatatcgattccagtttcttttttcttcagcgactggattaatataatgttggttatctcttattaaaccagggcatatattgtcgtcagagtcaaattattctgttttccatcaaattaatctgttttctttcctataaaccaagaacatcaaattaggtctaggtcgctataggccaagaacaagctccaccatgaaaagctctcccttaaacctaagacttggcgttaaagcaacataatgtcgacccgcaaccactagtccagtcttattagtctcttacactctatctctcttattcttacaagttttatcgaatttaaggagttcaaaatttaaggagtgaacagtggctacaagctcgccgagagaaccaagaacgaagactgactctgatattggacaaaaaagaagacccttgagaacaacactctgtttctgaatgaatctaactctggcacaactcattctacgttttttatttacttgtattaaaccaaaaattgactttggtcaagcttggtccagctagaaatatcctcggcccaagccttcaacccaagaaccggttttgacccattgtctccttgatttaggtcacgacgatgaattgttgttacaaaatctgtagaaacgacactcgttttggtgcgtgagtataggttttaggtctaaaaacttccatcccaagtaaccttaaaacagaactgctgtaaagatgatgaagaagagaaacacagtttatctttcggaggatttgatagtggagatactctctagagtttcggctgtatctttggcacgattacgaactacatccaaacgatggaacgctcttgttaaggacgagagacttgctaagaagcactctgcttatgctccaaggcagtctctggttatcacgttgattgattccagggtttatttaatgaacgtgagtctccaatatggaattgaaaaggttgatctatctgcaaagctaacaggtcaattcagcctaaaagatcctctttcaaattctttagaggaagttgatatacgtaacgtctttcactgcgacggcttattactatgcagcaccaaagacaatagattagttgtttggaatccatgttcaggtgaaacaaggtggatccaacctagaagttcctacaaggtatcagacatctatgctttaggttatgataacacatcctcatgtcacaaaatcttgaggatggatcgatctgaggaccgtatcccaattcaaactgagtaccaagtctatgactttacctctaaatcgtggctagttgatggtgtggctggaggcttgttcataccaagtattgggactcggagacgtggcttgtctgtgaagggaaatacttactggcttgctcttactgaagacggaccgccatttgatatgttcttattatgttttgatttttcgactgacggatttcgacgtctgtctcttccgacggatactccttgtacttattatgatgtgtctttatcagtgactagagaagagcaacaactttgtatgtttaagagtcatggctctgagttatggatagcaactaagatggagagtaccggagccatttcatggagcaagtcccatcgttttcactttagaattgatgagatgactgtcttggctgaccaagagaagcccgttttcgtgtatcgcttcaaacccaagtccaacatgttacacattgtgggagagcatatatacatcatacaagtggatcagcatagtgcagattctaaatgtccatatctccttacttatgttccaagtttggttcaaatccaacaaagtatctaaaagtgtagttttcttttaagaggctaaaggaaagtactagagctagtgtgatttatgattgtcccactaatttatgtaacgattttaaatatcggcttgaaaccttccagaaatatatcattaacgctctaatattgttcattagaaactcagatatcaaccccatatttccagattgacgttttttaaacctccaattttgatactctacaaaagggaggtcaaaagataaaagaaagaaactacaaaatttcagctagtcaagaagaagaaaagaggaaccaaacaacattttattggtcctactattttaaaaggacccgtataaagtagcaaaaggggcttgtcatttctgcaaattcagcttgaccttctccaacactttccataatgcagacttagcttcttctagtgtctcaacaccatgaccttcctcaaatgctagcctttgtatgttaaactgcaaaaaaacaaaacaaacaattgaacaaagaaagataagctgagaagcactgtgcatgatcataattgtgtcgacatcaactggacaaaactaattaatacagtgttattttacctgagcaccttgacgaacccgtacatctattcctttgctatctattgaaatgagagcagcatcgtctacctctgattcagtagacagtagctctctcagcggtttcgagaagatggcatttagttcctatcagaagttttagggaaaatacgttagagcacactcgaatcaaatccagcttacaaaaggccaagaatgaggagcaagtttattggagtctctaaggcgaccaacagggatttgaaacaacgcaccttgaggttccgctcaccaccatcaacagctatcttatctggttgtaaaccttcatactctttgacatcaacccaagcgaccgtgccaaagcctccaatgaaatatatatcactgccaattgtcacattgagtgtggagtggataagtaataggagacaaacaatcatccgacaagtattggtaacttggaaggcacaagttttggaacaaaccttatgttctgcattctaaaataatgaaagtttccccattgctctgaaggcccgtgcgggtgctttgcaatatattgcttatgggcccactcctaccaagccacaaccagagatattacgagccattactcagacatacagatgtttggctggtgagattcatgcatcgacaaccataaatagaaaaggaaaaatgtaactagacacccacctgttcatcctctgacaatgggtacacatcaccaaataatgtcactcttgcattcgataagccactccatccgggtatctgccagccaaatcaacggttacataacataaagggtaaaccttttgctcgtataatttaaacacaatagccaatgttacctgaacaacgaggctgcatctaggttcattcaagagatttcgtgtgtggatggccagcggtgaaaacaaaaatattggatctgataagaaaaagtagaagccattcaagaaatgagcatctattgtatctcaaaacattaactgtaccattataattcagtattgccttcaatacacagatacaaaaacactcctacatgtacacctctaatgaaatttaaggaaaagagggaaaaaaacaactttgacttcacttcctactatgcgttcccacaaaaatcaaatcaattttacagttagaggagttatgactaagaaccaattgtcgactagcaaataattaaactgatactctgagaaaaattgagcgtgcaacaaaagaagacactgtagaactaggagcagtcaacaaagaaagaaagactcagtgacttacgccccatccgatcaggtgcaaaatctaccaatgagccaaatgggtacccttccctgcggtggtgcattttggacatcactgtgcacagatgagcaaacctagccttgaatcataaaaacacaagacaagacagataaagaacttaaataatcttttctcattgaagtaaaaaaggaagaatacaaaccatctaaaggacaaacccttttacctgttccaacaagttccgtacagctaaagcaggccgaggtaaagcatgagctgatgtagcattttgaacaccaccagatattggagttctaaaaagcccagctcgatttcctccaccaccttgaggatgtgcaagagatgcctccacatcgattacactatgagaagtttcaccattgctattactcccgagcttttccttcacacaacattacaagctattaatctctatgtcaaagcaaaccattacgtggtatcatctttccgctaatctaagattcgattctacacaaactctgcatcaaaaccaaagttttgtgtccaaaattgtaatcttttgctgaatttttgcatacccaaaacaaaagttataatctttagttgaatttattcatcacaagacaagagaaaaagtacctgtgataaagagaagatatccccaggaaaaaaaccaaacccattattatcttcaccttcacttggcgtctcgttacgtaagagagcttgtatacgaagcccgtgacttgatccattactgagtctcagcttcgggaattgcgttttgggtagcgaattacaaaaccaacacgaagactgggaagaagtgggcagcggagatttgaggagaggcttagtctgtaaattgggtgtgtgtgttgaagtgaagagagcttccatggtggatgagaataagattttggttgaagagtcttctgatctttcactataggcagatgcttcaggcgtctttgttgaaagtagctttaggaattaggacttttccagagtagggtttgtataacacacacatacatataagggtttttctttttcttttggctttttttttatagttggattacgattacttttgtccttaggaattacttttgatgtattttctattctcttttgttttgttttgatgttgataataacgaattttccttgaaataagaaaatcagtttcttttcaatttacaatttttattgataataacataatattctaagaaattatctttgtttaaaaaaattgggaaagaaaagatttcaatttcatctcaaaagaacctgataatgactattggattaccattattccgtttctaaaatcttcttactgttgattaaaaaaattaaatctcctctaaagaaatatctatcatctcaattggttcagaccatttttagtttacgttgaaaagaaagatcaaacagatcaatgacacaaactataattaaggcactaaacactaaatgtcctaatttgcataatgcgggacccatgtcaataatatttctcaaacgttgtcgttttcagcccatccttcctccgaatccacgcgccaccgtctaagctgctgcgtcattgcacgcgccaatttgctttcaaccgctcgaatcatcccagctgaaactccagtcacatcttctactttctttaaattctgccacgtcgtcgtgttcttaacgccgaaccaaaacgccgccgctaagaacactctcttcgtcgctcttggcctcgtctccacagccaaagccaaagacgcatatgaaacgacagcgtttgttaaatccctgtttagtcctaacttaccacaccaatttacaaaaatgccatccgccaccgtaaccgcaacggccttggcattcactctgttttccctccctcgcgctctgtttacgtcacgcgtcgttgacgatagctcggagcttgagacacagtcaagagacgagcagcaagaagaagacgacgattctgaacaacatgttgttcgtggaggccaaggaagaagaggaccagaaacgaaattttgagtaagagatttgcaatttgggcagatgacacgccggaaatgacgagcgaagagaaaatttgaggcatggaacttagcgtcacaagaacggcagaggaaggcagagtccgcggcacaatggagatcagcttcggcaccacaaagctcgcaaaagctcaccattgagtcgatctctctgatcaccagaaagaagtgagagagaattggtttggaatgatgatggtgggaagagagatttaaggaagagatgtaaatgattgagggagagaaagagcggtggagtttttatggttcatggttgatgagagtagtctcttccacagttcacacatcaaagaaacttacatgagccataattttttagggaaatgaaatgaatggtgtttgtagaattggagagaatgacgtgtcgtgaggttttgaggctggtgagattatgtggtcatttttaaaactattacactagccgccaagtcattcgtcttccttttggtgtgacgtggagatttagtcaacactaatgtcttttcagagacttggtctcattgcaaattgcttcttcttcttttcttggttgcttccattacatttcttctgcattgttgcagtcttttatataaacttttatacattgatcttttgtcgaatacaaaacagaagataatactcttaatttataatctaaggagtaaggatacaaaacacaaggtgtaaactgtggtgaacctgtttgggttctgatcccaactagtacaacaatagtctatatcttgaaatctttccaaaaatggtttcttaaataaaagggtctttgaatagccaagctaaatccaattgctctgttaagatatatccatagagcccctcctacgaatcacactgtgacctctccagggagttttacttctttgttatccgaccataatgcctctggcgtattctaaatgccggttttcgtagcagtactttgttggattgtttgagatttacctgatcgtttcgagacttaatcttaagtggatgagcttcggtgttgaatacccactcgtctaaaggaatgactgttgtcggcgagaagagtagatagagatacttgagtgtctctgcaaggaagaaactttgcatcttgttgtccttaacgcctgtattaacctggaaatgattgaaagaaataagaatctaccatcagttacactcaattactaatatagatggtggaatgatataattcaattcaccaaggttttaacaatgcaggatctaattaagcgcctacggaaaacttacatccttcaaaccaacatatccagactctatgcgcgagttcttctcaaatgcttcaaatatattccatccccactcttgatatgtcttgtttccagttaaccgccagaggtaaaacagtgattcgacagtttctggtctcaagatgttccacgacgttccaacactcatgtcctgaatcatcatgtatactaaacaataaataacgcataaaataaacaatgtgtttgaaaaagacaggcaaatgacatacactcccagagttgaagaaataattctccccagccagttttgttggagttgattggtaaaagttataacatgtccacgcaagctgcaaaatatgtggaaaatagcaataaaggctatatctcagcagcctaaatcagaaaagcagagagcgaaaaattcgaaagatctgaagcacttacgacgctatgatcaaagatcattcaagtcataagtttacctcttcagcgagtgtgagaaacttctttccttcagcaggatcactatacccagatgctcctaaagccaacattccaggagcaaagcatgccaattcatccatcttaatatatatgagaaataatgagattggaaatgccaggcgatgaagaattttcacgtaatacaatggaaacaatgaacagatgggtttaccttatcgatcaaagaatttccactcttctcacagatatatgtaaacgacaaaggtgttgatttcttaaccaagcttagcagaccattcattgacttctcccacatatctctgatgccaagatgtcaagtaataacagtacaaattattattgttcggctaaagatgttgaaactaaaagaccagaaaagaaaagaagaacatagatatcaagcagaaagataaatgtgatggcagctggttgaacttagcggacttgaatcaatcagacatatatacactcagtagactagagttaaacttacctatagtgtttcactgctgaagttttgttcccaaacacccaaactttgagcaaatattcgtaaaagctgtacacaaaatattagccgtcacaaatcaaaccaaagcagaaccagaagggatcagactagcagtaatataaaatgcaatcaagttggaaaaacacctgtctcccatggcaccaaatgttattgtagactgcgatggattagctgtatcgggatttatatatatcggaagtaaaccatcagcagggaagttcttatttagcactgaaataaccttttctacctgagacacgagttaacaggtcaaccattgaggtgcaatttgtttacaccgaattatgacaacatgcatccagacattttgccaactttaatacctaatcagtatataatacaacagaataagctaagaaatatgtattccattcactggtttatagatataacaaattcgctgataagcagatggatatgtaataagtcagcagtgctacaagttacggagagtaattgcaccttttgctgatattttgggtcccctgtcctctgggaaagggcaataaattcaagctgctcagtaccagaatctgcaagaatactgtctccctaaaacaagaaagaagtaaacaatcaactaaaccgaaagacatatgtaaatagatcagatggtacccattccacattaaacatgagcttgctagtgaaacaatacctagttgataaagaatctttactttcatcatgatctttacaactaaactctaaaacagtgtagacacaaacagaatactaattgtcacataacttgaaaaacagaacagttcgttcctggcgagccctgaaacatctaagaaaacgactggaacttaaatctcaatttttcagtggcctcttaggagctcctttagaaacatgttcaggaccctagtggcgactatctcgataaagttttgcacgcatatgaaaatctgggcgagaaaagaagagaaaatgtatatccaatgcctaaagctttgaaaagatcgacaaggaatatgacagataggacttacccccgcccatgtaggattgtgagcatttccatgcttcaagttgataatattatatggtatacccgattgagtgtcccatgcaggcaataatctgtctgcaatatccatagccttttcaaggaaaattttatccccagaaagatcatacgcactgagaagccctcctaccactctgaaagccaacaaagagaaaatatataagcacagatgccacacttccataccacatattttgttaactacacacaacagataacctaaacaagatgactcttcttagtacatgtagaaaaaaaacatggtaaacctgttaaatgcaaccttatggttgtctcaaacatactggcagcataatccttgtcgaaatctaatgagcttgctacccacctgaaaatgaaagacaataagtaaatgaaggctgggaaagatgaacaggaaaagttgggaatcgaacttcagttaatggagaagaaaacaatattatttataggaggttgcagttttagccagaaatatttaatgttttctatataatcttgaaacagtttaaaagtgaacattgcacaacagatacattacaaagacgattcaatagccttttccatttcattttcttcactacttatatttttctcaataagatgagacaagcctgtttagaacaagtcaagccagaaagaatcttcctaaaaaaggctaggatggaagaaatctactcactctctggctttctgaaactgctcatctagacccattatatatagtgtgtctaatgcatctatcatagttgcacccaggccaccaaagctgtcaacaccatcctttgtctggggctgataatgcaaaaaaaaaagttacacaaatagcttcacagaaatatatttatcgcaagtagaaagtgttctcattttaactagttaaacaacccaattattctctgaacaatggtgaacgttaacataagctgtcagcattgtagctaaccatacaaagataaaactgtacctgaagctcatcttgtccccaggcatacttttcatatgaactccaagcatgaaccattgcctctttaactctctgcattcgctgagcatcaactggatcttcctgaacatccttcaaactattgacagacacatcctcagtgacgctctttatctcttccaactagcagaaaacacaacaaaatttaagatcattataaaaaatctcataactttctcaagatttaaaaactcatagtaaatcaaattcttgcaagaccacgagacgcgtaatgccacatcaatatcagccactgtgtaattaagcaaatgcaaaaaaaggaggaaactttgggtataatcaaagcctcatagggaaaagaaataaataacttaccatctgctgcaaccgcaaaacttcttcatttaacttggaaacttcaaactgcaaaaagtcagcatacattataaacacacatatgtgaaagaaaaatcctatcttcacataacacagagactctcctttatccaaagattgaattttgatttcctctacagcccagtataaacaatttcataaagtctagacctttagctgcctactttaacagattcgattagcgcctctcatcaattcaataacgtacctggtagtctcgggaaagagattgac

SEQ ID NO: 447 - DNA, 85599 bp, Arabidopsis thaliana
gatcccaaacaaccattgaaacagagacgaagaggatgatgagcaaagcaagacgtcttggtcttcggagataaaacgctgggttgaaatatttccatatcccatgactaccacttacaagtttattcctcgccatctcaattccgacgatcagatctgatctcggaggtgacaaatttttgaaaaaggagaagaagaagaaattgaaaccatgaattaaaaagagaggaagagatcggatcagagtaaagagagggaatgatccggtttaaatcagttggtttgggtttggttggttattggttttggattttggtttacttaaaaggaaaaagtgaaaaacaaaaagtaatttattgttttagaagaggcccaaatttaatctaggacgaagcccacagtaaaagcatgcgttgtgacgtcacatgaatgagaataagttttaggtccaagaacttccatcccaagttatctgaaaacatgcttttagagatgatgaagaacagaagaagggaaacattgtacatcttccggaccggaggatttggttgtggagatactcactagggttccggtggtatctctgaaacaattgcgatcaacacccaaagggtggaacgctcttatcaaagatggactctgcttagacacaacggcagtctcctctggttatcaagttgattgattatagggtttaattagtgagtctcgatctccatggaattgtgacaaggtgtcttggagaaggcaaaaaggtaagtaccagaccagagctagtgtcttgaaacagttgaaagtcacaacaaatagttgtgtaatgttggttttcttttgtgaaggaagcatacatatttcttttataacaccatgaccagtgaaacacttggtgggtctatgaatgatcctaattatcacattggctttgcgtcttttgtgtaatttgatatggttatagagttgcatgtcacataggtttcattgactcggaagatgatattttctggataggttttggttcctggcctcatttacattttgatcaaaaatcttggttttcaaggatatactagtttgtaaaatttcataaggccaattttattttacaagtgccttgggactataggtagatagattcaggtacattagcaaatgcaaaatgagaattgatttatcaaacttttagtgaaatacacattttaatttattagtctattaaatatgtaagtatgatgacttcatgaaaaattaaaggagtagggcagagatatataatgttcaaagatataaccccacaagtcaattattacttagaagcattttgagttatacaatagaaatatattaagtatatatatgatcttcccatatttattgagtaagtaaaaagaaaaaaaatgatcttcccatatttatataaaattatttacatttaattttaattgaatatgcttttaatgttacaaaattataaccacagaaatagaaaaaattaataatgataaataaatgttgagaaaaaagaaagatagtaagaattaaatttaggaaaaaaagaagttaaaaatctgtgtggacaaaaagaaaaaatctccatatttattagtgtaaaggataaaataaaagacaattacgtgatctcctccttcctatatatataaatgatcttcccatatttatagagtaaatcaaagaaaaaaaaagaagaagattaaaaatcttgattctatcgtctctccatcttgattctttgaaaattggtttaatcacagtcgtgtgagagatgatgacgttcaacgaccttccggaggatttggtagtggagatactctctagagttccggctgtatttctagcacgattacgatcaacatccaaacgatggaacactttgatcaaagatgggaaactttctaagaagcactcttctaatgctccaaggcactctatggctctcgtgttgattgatcataaggtttattcagtgagatccaatctccgtggaattcacaatagcgttgctccatatgttaacataacatgtcattttagcctaaaagaacatctttctaataattattcaacagaagtcgatataggccacgtctttcactgcgatggcttattgctatgcaccaccaaggactatagactggtggtttggaatccgctttcaggtgaaacaaggtggattcaaccaagattttgctacaagaaagatgactgctatgctctcggtagatcctcttgcaacaagtacaaaatcttgaggcagggtcgtcttatcaatcctagcgaagaacgttacgtgtacaacatcgtgggggaggatcttgttatcaacaatagccaagaacgttacgagtacgaaatctatgactttaactctaattcgtggaggagtattggtgtgatcaccggcttgttcaatccaaatatcaccagtggcgtgtctgtaaatggaatcacttactggtttgatattagtgaacaattcttactaagttttgatttctcaacagagagatttggaagtgagtctctcccagagggtgatagtcatttggctttatcagtgactagacaagggaaacgactttgtatgttatctactaattacacatacgtaaccggaacaaacgttaacttatggatagcaacgaagactagtgagaacaccagagcaatgtcatggagcaagttcccaatactgcggggcggagttggtctacgctatcgttgtcattttagggaaggggtgagtttcttcgcataccaagttaaggagaagattgttgtagtttcttgtcatagacccaaccggcactccaaggacatcatacacattgtggaaaatgataaattcatagaattggatcatcatggtgcaaaacctacacatgaattatctcctaccccacgtctcctcatatatgttccaagtttggttcaaattcaacatggtatttagttctttggaggaggcaccaagtcagccagtgcatggccttgtaattgtcacactagtctatgcattatctaatctaactcttgatattttataagtaagatatatgtacgcatttctaagttataacttgttgctacccttttgctagtggataattcgaggcacatggcattttcataattggtcaattagttattaagtaccaaaattttgaaaaggaaaaaaattagaaatgcttagaacatattagagcaaaacatatgtaaattttgtgcaagaataagggaaaagcaaataaaatcaaaataaaattgtatattgtggaattaagaaatgaaagaggaacgcaatttagttttaaaatctgacatattagatatagttgagtcaattgttttccaccgaagaattggttgtggttccatctaacttaagatattttgtgttaagatggtttatttgtagagatatattataattatatatgatttctaaccaaaacaacaagaagtttttaaagatgggtacaaattgaattaactaatgtaattccacattgtcatttggtaaaagaaagatatcttgacaaaagagattaaaagaattatgtgaaaaaccttggcgaccttaaaccatctccaatgtctttatatctttggcatcattaagagtaaatgtgtatcttgatcaaacctgaaaccactaaagaaaaacatatgaactcaaatagaggccaattaaagatgaggtccaaagaatagggagtgtcaagcctttcacaaagacgacgccgtttggctaaaaaaggcccaagatcacaacgacgacgtttgctgaagaaaaatgaaaaatctttcactacaatcattagaccaaaaaagaaaaaaaaaatcaaaggagcttccttttttcgctctcgtctccgtttacccttttgggatttttccctaaacctttttctctctttgtataatcaaatcctctttatctttcattgtttcgcgtgaattagctctgcaaaggctcttcattcttctcgcttggattcctctgcacaaaaggtacccatttgatgtcaattttggtttattgttttgattgccctgtccaagtgacaagtctttgtatgtatgatataggtagtgggttctagtttgtagatgaacttgtcgaatttggagggtttttagttggaagcatttatatgtgggatttggaattgttctgtctatttgttcttagcttaaaggttgggacttagcttaggacttatgagcatgagagaaggagactttttttccaattcgaatctgattgatgaaactttttttactggatttgggtagatattgttacgttttaaggtagttgactgttgttagttgttgtttactcgagattagattattgtcatctactcttgttataaaagaagctcctttgtactatatcagtgctgataactattaatgaagttcctttcccttaggtggagatagtttctttgtatttgcaaactcaatttatgtgagaatatatccaccattattgagtttcttcaacctataccgtctctgacaatctcgctttttcgttattaagaacgttccagtcttaattaatgttatcttcctttggatgtaattggtaacaaattgcagaaaaaagaccatggatgatcttcatggaagaaatggtcgaatgcacattggtgtagcgcaaaatccaatgcatgtgcagtatgaagatcacggtttgcaccatatcgacaatgaaaacagtatgatggatgaccatgctgatggtgggatggatgaaggagtggagacagacattccttctcaccctggaaactcagctgataatcgtggtgaagttgtagaccgtggaattgaaaatggagatcaattgacattgtccttccagggacaagtttatgtttttgaccgtgtctcgcctgagaaggtaactttaagttaattttggttctttgatgttttagttttggatacatatggtcaacgtatccacctggttggttttgtttttcgcttattgaagtgctgctcaatattatgcaggttcaagctgtgcttttgttacttggtggaagggaagtaccacatacactcccaacaaccctaggatcacctcatcagaacaatagggtactggtaataaaagatttaataccatatgggaaatcagtttattccccagtttgttgctgactaataaatgaaccagggtctatctggtactcctcaacggcttagcgttccgcagcggttagcttctttgctcaggtttagggagaaacgaaaagggaggaactttgataagactattcgctatacagtcaggaaagaagtagccttgaggtacgtttatgtcaagtactagcttttgtgtatgtcgagcttttgagatacgtctgttttgcaattaaggttttgtttgttcatgcagaatgcagcgtaagaaaggtcagttcacgtcggctaaatcaagcaatgatgattctggatccactggatcggattgggggtcaaaccagagctgggccgtagaagggactgagactcagaagccagaggttttgtaagttgaaaatgctttaaatttcttacaacagttatattaactttagtgaactcgttataaaacctcaattaagtctaatacatggaaacaatttatttggtaaccatttaatgacgctcttttcacttccataaactttgtctatatacgtcaactctgaaatttatagttatacttatcatgatggcatcactcattcgatacctgcaactgataacttatacttgtgagaggataaaaataactgaaccgactatgttgttgcatgttaagtcattgtagttgatatgaacttatttatagcttggtatacttggaaagcttgtctctgttcttattcttcgtcaaatggttgtgaacatgttaagatgtcgacactgtggaacaagtgagaagtcaactccaatgatgcgacgtggacctgatgggccaagaacactttgtaatgcgtgtggactgatgtgggcaaacaaggtaagctaagagtttcttagttcacattgatcacctcgtctcgtatcacttttttgactcattgatcaggcctatatatccgagtatgaacctaacaataacattccctttgactttataatatcaggggactcttagagacctatccaaagtccctcctccgcaaacacctcagcatctatctctgaataagaatgaggtgagccgtgagcgcagtatttcatagagctggagttttgatttgcttattaagagaacatacattcattttttttttctcaatcacttttgttgcaggacgcaaatcttgaggctgatcaaatgatggaagtaactggtgacattagcaacacacagtgagaactgagaaaccattggaagcaagaaaggatctcaaacaaaaacagttgttatcatttcatttgatgatggaatcgaatctgagttgtgtttagggtttctctgggttaatctcagtctatgtgggcacattttagtcttctacaaattataagacactcttcacttatttagaagctcactcatcagaaaagaaaaaaaaaactttgctcagtctctcatctgtgtgtttgattatattttcaggcagaaaacttttttttgttcttgtatttgattacaattagttaaatatttaagacttagtagagataatgcaatctatgtataaaaatagaaacaatgattggttatgtcgtgcaacccaagtgaccttaatgtcgtacacacgttcatcaggttaaaacgaaatttctcagcaacttcactattctctctgtcacattgttttattcttttccattatctttattggaaacttgattagaaagaactgattaaggtatgaagataattagtgtaccattcttcacatgatacgaggtgaacaatagtatatcagaatactagaataattttataagttataaagatgaatggtataccacttattacaaaacgaaaacatagttagatctgagaagaaggaaagatttttgttttaaaaaatgagatggttagatatatgccatgttaagagatgccaccatgttcttcttcttcttcttacccggaaaaaactctttcttcttctctttcccataaaaagaaacaaaaaaaaactaacttcccacaaattttgccaaaccaaaccaaaaatagtaatgatctcattcaatttgaaccctctctccattttctttcatagtttttttttagggtaaatcaaaatattaatgttggttagaaactcaaaaattagtttctcttttttttctctgtgattgacagagaggtaagagaaaaaaaagagagaaagtgtttcggtttttgttgccttctctcgagttaggccttctctcttccgtcacaccatcattttttttctccataacgaccaaatcataaaaccggtcgttcctattttttctttctctgcgttttttgtttcgaattcttcaatagaattttaaaagaaagaagaaagctgggtgagacgaaggaaggaagaatgagcacttcgtcgagcaacggattgcttctgacgtcaatgtcaggacgtcatgacgacatggaagctggttctgctaaaactgaagaacattctgatcatgaagagcttcaacatgatcctgatgatccttttgatattgataacaccaagaacgcttctgttgaatctcttcgtcgttggagacaagccgctcttgtgttgaacgcatcgcgtcggtttcgatacactttggatcttaataaagaagaacattatgataatcgaaggaggatgatcagagctcatgctcaagtcattagggtatgtattttctttatataattcttcctatcatttcaacaacaatgttgtttgtttaattgaatctcacatcgataaatcacttttatgaatcaggcagcattgctttttaaactggctggtgaacaacaaattggtatgatctcttataagtcaagcaaatctctgttttgttttctggtttcttgttgaataatctttagtttcttttggtatcaattagcgtttggatcatcaacaccagcagcttctactggtaactttgacattgatcttgaaaagcttgtgtctatgacaaggaaccagaacatgtccaatttgcagcaatatggaggggtatgattcaagactcacacattccataaataggaaggtttcttgatgctgacattaatatatctttcaggtcaaaggtgttgcagagaagttgaagtcaaatatggaacaaggaatcaatgaggatgagaaagaggtgatagataggaagaatgcttttggatctaacacttacccaaaaaagaaggggaaaaacttttttgtaagcaaagagtcttttacaacttcttcgaccgtgtttttatcggtttgtggatactcatatgttttttttcaactttctgtttgtccaaaagatgttcctctgggaagcttggcaagatttaactctcatcatcttgatcatagcggctgtaacatcattggcattgggaataaagacagaggtatacatgctttcctttcgataagttcttagtttttcgaaatcaggaatgtactaattttctgtcttattacttcatgatcagggtttgaaagaaggttggcttgatggtggaagcattgcctttgcggttttgcttgtcattgttgttacaggtatatacatgtttctttctgtgataaattcttgaaaacattctcaatcttgctcttaatccatttaagataaatctttctttacactttatcttttgattgtttcagctgttagtgactatcgccaatctctccagtttcaaaacctcaacgatgaaaaaagaaatatacaactagaggtgcttgctttaacatcttagtttgttttgcaattacatgtttttgagctgaagattaaataaacgaaaactcttacaggtcatgagaggagggagaacagtgaagatatcaatctatgacgttgttgtcggagatgttatacctcttaggataggtgaccaggtaggtatactttgtctttatattccatctaatggcttcagagttaaatgactatatggccttatttattgttgtattcatataggtccctgcggatggagtgctaattagtggtcattctcttgctattgatgaatctagcatgaccggtgaaagcaagattgtgagttcattatggttctgcttgtgcaatttttatggtcatcttccctttctatttgctaacacagacctttgtttgcaggttcacaaggatcaaaaatccccttttctaatgtctggctgtaaagtagctgacggagtcggtaacatgctggtaaatctttgaaacttttgtcctgttcttagttctgttttcacatagttgttcatacttcctagtagttattctttgtgagtgtttcaataggttactggtgttggaatcaacactgagtggggattgttgatggcaagtatctcagaagatactggtgaagaaactccattgcaggtatatcatcttgatcacttaaggtctccacaatgtgttgaagaaggctaacatttccttttggtaatcttgtaacaggtgaggttaaatggtcttgcaaccttcatagggatagtggggctctcagtggctcttgttgtcctggtggctcttcttgtgaggtaatttcatttaccttggtcaataaatctcttggcttacaaattcatgccatgttgagggctataaccattgagttttttcagatattttaccggaactactcaagatactaatggagcgacccagtttatcaaagggacgactagtatcagtgacattgtagatgattgtgtaaagatatttacaatcgccgtaagtattagttccatatttttgattatgttattcgatagacatatcagttaactctggcatttgtttaggtgacaattgtggttgtagcagtgcctgagggacttcccctagcagttaccctcacgtaagtcgtacttgatataatccactcagaagataactaattatctacgtttcaggtgttgatatactttttcttgacaccatatttgcagtttggcttactcaatgcgaaagatgatggcagacaaagctttggtaagaatcagaaggagtgttctcgctttagttctttcttcttggttattgtctgaccatttttctcaaatgccaaacaggttagaaggctttcagcttgtgaaaccatgggatcagcaacaacaatctgcagtgacaaaactggaactttaactttgaatcaggttagtatccagtaaaatgtgagcttcttgacatgaaaaccatcatacccttctagatagctaactttacccctcacaaaaatacagatgactgtggttgaaacttatgctggaggatcaaagatggatgtagcagacaacccttccggtctccaccctaaacttgttgccttaataagtgagggtgttgcacaaaacacaacaggaaacatttttcatcccaaggtagtttttgttactctgctattgttgaaccttcctatggattttcaaagaggaacaatgttactctaagctcatcatgttatcatgtagttatcaaatgattgatgtttagttgtcatgtttgttttactataggatggtggagaggtggagatttctggatctcccacagagaaggctattctgtcttgggcttataaggtatcaaatgtttgtttaccctggtccatctttgacatattcttcctctgtatgagcaatatatttaaagaagttgttgttgcagttggggatgaagtttgataccatcaggtcggagtctgctatcatccatgccttccctttcaattcagagaaaaagcgtggtggtgttgctgtgcttcgagtaatttctttatcctttctccaatttcaaaatacataaccttttttactttggagtcattacagttagcggctgcttcagttaaccgctatgttctgctgaattttcagtaactaaacacataaacatcttctcgtgaagctgattatgtgtatgttaattcactgcagggtgattctgaagttttcattcactggaagggagcagcagagatagttttggcttgctgtacacaatacatggactcaaatggtactctgcagtccattgagagccaaaaggtgaagtgacaaaaagagtttgaaatcagaaaaatggtgttaaattttcacttagacattctctgttagcctaggaagaccaattttgtgactatactatgcattttcatctcaaatttcaaaaccatttgtgtctgcaaattgttttacaggaatttttcagagttgctatcgatagcatggcgaaaaatagcttgcgatgtgttgctattgcatgcagaacacaagagctgaaccaagttcccaaggaacaagaggacttggataaatgggctttacctgaagatgaactcattttgcttgctatcgttggcataaaggtaggtattctgaaaagttttggtttgttttatgtgttcactatgtgacgattttgctctcttccaaaatttaaacctattgttcttttggtaacttcttttggtaacttgttacgcaatctaggatccttgtcgtcccggtgtcagagaagcagtgagaatctgtaccagtgctggtgttaaggtagactcctagcctcttcgaagtttacagttatgctttctagttttctatagagattacatgaaatgatcatcttgttcatgatataggtacgaatggtgactggtgacaatcttcaaacagcaaaagcaattgctttggagtgtggtatactttcttcagatacagaagctgttgagcctactatcatcgaaggaaaagtgttccgtgagctatctgagaaagagagagaacaagtagccaagaaaataacggtatgaaaattaaacagccaaggatcatatatacgacttggcggctgcttgctttttcaaacattaacttaggttgtgaaatgcaggtgatgggtaggtcatctcctaacgacaagctcttacttgttcaagcactacggaaaaatggagatgttgttgcagtcactggtgatggtactaatgatgctcctgccctccatgaggttctctaacaattctacaggttatgtattatgtgttgtgtgtcatctccaaatctgatttttcttttgttgctttggactataggcagatataggtctctctatgggtatatcaggaactgaagttgcaaaagagagttctgacatcattattttggatgacaattttgcttcagtagtaaaggttagtctactacatcaaatatagaaacatgtgatcttctacattatccttcatctttatgcttttctaatcaataaactctgtttactcttccaggttgttcgttggggccgttctgtgtatgctaacattcagaaattcatacaattccagcttactgtgaatgttgccgcacttataatcaatgttgtagcagcaatgtcttctggtgacgtccctctaaaggctgtacaggttagtaccttgatgcttatttgaatggttgaacttttaagacaaggataaaagatataatggtgttctttgatgcagctgctttgggtcaaccttatcatggatactcttggagcacttgcactagctacagagccaccaaccgatcatcttatgcatagaacccctgttggaagaaggtataaacatgttgcacatgatgttttcctcatacttttagtgaaacagaatagttatattgtggtttcagtcgtatggttcgtgatggtttgtttcttgatttgcagggaacctcttataacaaacatcatgtggaggaacttgcttgttcaggtgacttgctcaaaaaccaacttgattaattattttaccaaataattttactagcttgcatgtgtctgaaaatgaaatctggggatgttgcagtcattctatcaagtggctgttctcctagttctcaactttgcaggcttaagcattcttggcttgaaccatgaaaaccatgcacatgctgtggaagtgaagaacactatgatattcaatgcctttgtcatgtgtcaagtaagcaaatcatctcttctttcatctatatagtcttaaaagatatggagttgtttttaatcttgcaagtcttccagatattcaacgagttcaacgcaagaaaacctgatgaaatgaatgtattccggggagtaaataagaaccctctcttcgtagcaattgttggagtcacttttatacttcaggtaagacaataacacaaagccactttaacctttttcctctttcttgagactatgatagtaaaatgcttctggttgaaaaatgcagatcatcatcgttactttcctcggaaagtttgctcacaccgttagactgggatggcagttatggcttgcttctataatcattggattggtcaggttggtccagtttctccaaacttagttctcagtgcttatgacacatgtatgaatgaacaatttgtttacttgctctgcagctggccactagcaattgttgggaaactgatccctgtacccaagacaccgatgagcgtctacttcaagaaaccgttccgtaaatacaaagcttcaagaaatgcataaaacatacaactaggttctcagccttcctcatacagaagcaataacagatataacctgtgacaatggcctaaacctctaacctttctttctatcttttttaaaaatggtaaaagtattttcaaatgtatactgcaatgagatccaattcttttgtcccttttcatatttcttctttttgtatgatgtaaaagtgcaactgtgaattgaattggatttgtggttgtactaacgagagtttggctcagtcatggttggttacaaaagtgttgttgtatctacatggaggattctctgtgtgatatcactatatttgagttaacaatggttttagagaaaagaatgatcacatcttgtcatagttcacatggttcttccttcaatagaaaccctcaacactaaaatcaatcttacaaacaatatatgtgtttcttactatagagcaaaatttatagaatgcaaaagctatgagccaacagattcaaactgtaaacctcactgcccaaaaaaaccaacttatattgaaacaaacttacaaattaaaaacaagaaaaataattaaattgcttacacttgatgaaaactgagaaggcccttccatggaagtatgcgtggagattactttagaaatgcgagaaggtcagcaaaagcatgaataagccaaatggttcttctttgagatgtatggagagatgaaatctgtagcaaggccagatgtctctgagatttctgctggaactaacacttgaggcttacctaaagctatccttttgccaacggtgtttgcataaaacagaccggagatggctggaacaaagacatcgcttcttgagcttatgtagaagtcgataacattttcgtactcggaactcactgattcaaggtactttgatctcttacttgccggcattattgcctcctgccatagttaagtgacaaatcaagattagcaacatggtcaaaactttcttggactgaagaatgttttctgatcttactcaccttagtgaatgtttttgggaagatatccttaaggatattgaggctactgtcccatcttggctgagtcagatagatagttgtgtcgctggcaaatccaagctttctcaagaataaagcaatctcttgagcgttgtaacatgtcttggaccctactacaccagttgtatggcaatttttcttctcaagtatgtcgattctaaggtctactgctatgaaacggccaccggatttacggctatgagtcctcaaccgctcaaccattgattcagccactgcattcacttcaggttgcaactccaaagacccaaacattgctaaacaggctacaggatcagtttcgccatcttgtgaggattttctcaagtttacagaagggaagtatgatgcaactcgaatgtttcctttagatttaaagatgggatcaatgtgctctttaatgtaatcttctgtaactctggtagggaccttcacaatggccatgttccttagagaaacttcttcaggcaattttttcacaactttaacgacattttccaagcttttaatcagcttatccgcatcatagatatcttcaaaattcctagataaagcagttaaaattagtttagaaatctaagaaacaaattagtaaaccaaaaatgaacatacaaaaaacaaccctaacctttcatcaccaggtttgcttcctcttatatcaggaagtactagagttgctccaagatgcttagccaccattacagcatcagtgatctaaaccaagattagcagaattaaccacacaaacaagaagaagaagaagataacaacacatctaaagaacaccactttagagttgttataaagcatacctgagagatatggtactcaggaccattggtaagtgagaatgtaacataccctttcgatgatacagcgtcatctgcaacaatcaagtccttagtaaaaaagtccaaaataaatgatgcaaagaaaataagaaagacacataccagatagtaatgttggccaacaaggagtaagatcagtgttatcttccatccaaagtcctttactgccttcaacggttccgacaagaccatctttcacagagactttagatccttcaaattcaatatcttgtgcatctccctgagctttctcctgtacaaaaatacccaaaatgacaaagatttagagtaagattttgagttttggctacagaagtttcactattagtttacaccaaacgagatgaaatcaatcatgtcctaaagatccgcagaaaaaaacagttgagtctaatttgggtttcttatgatcaatgtccaatccaacttatgatccaaaaatggaaggtcttgttttgatcaagtaaatttcacagaacaactaaattttctaactttgaattagatctaacttcaaaaggcatctaagataagaatcaacacagaacctatctgaactaagctgaaatgagtatcacattaagagtgaaaaaagtgtcggcaaagaagattacctgaagagaatcaaagtaatctctatgaagcatctgtccaagcatcacaaacatggtaatggtgagaataccagcaactacttgcctcaaatcaacacccatttcttacctttctctctaacaaaaaaaaacagaggtttctgagttaaaatagactaagggaagaagaaagaaaaagagagtccaacaaagagaggtgtttgtggggcagatagagacaagctatcttcctcaaatacgaaatctcagttctctttcaattaatgttttgtcaaaaaagctctttttttttttgttttaagggagtgttattgtcagtgtgttgattgttgaagttgaagtcttacgctatcttacacacaaaacagccaccgacacttctgtcatggattttggtataaacactaaccggtggctggtttcactaaaccggtcaaactaatacaacattctaaattatttttggtaatctttacagttacattacattttagagtttaacagtttatactttagttctttatactatgtaaagaattattagaccttacactccaaccaaatgaactatagttccaaactaagaattcatgagagtcaaaatttttgttttaaactagactaattgtaaaattcaataaattaagctgttaaataatttatataacttcgaactcacaaattgttgagctcgttcaattggtttttacatttgttagtgttacattagcaactataaaaatattattttaaacttcaaaatgtggttgatgaaaaaagaaaaagaactttaaatcacggactcatcactaaccgtatcaaaaagaggagttggtaatgacacaatacataaactaaaatcccctttatatataataaaaatagttatttaacaaacaaattataagcaaatgataaagcactggattacagataggttttgaaacacattttaaacatatcataatgttagacatgagactaatttagtaattatactaccccaaaagcaattgtaatgatgcataattgcatatagtttttgttagagagcccacgtacgagttcaactttttgctaatcacacattgtttactaatcatttaattatcaatgtaccgaatcattagtagtacattagtcatatcccagaaaattggtggaacatgaggaaaaacacacatgctgatcaatgattataatccatgcatgagtcgacctgtttttttttttttttcgtgtcttctaagtttgtgaggggatcacaatgagcacttgattgattgttgaatggtagcgtaacgctgtgtgcaattactacaccacttcataactttttgatgtaaatctcttcttcttctttttttacccaatgcaggcgtcaatatatctatctacgcaatcatatactatcgttgtatatgattttggaaacacatataagcaacaaataaataatgaacgaaatcctattttcaagctaaaatagtctcggagacccattaaaccggggaaattttgaataaccggggaaattttgaatttgtttcggttaacatcgataccgtaccgatcctccggtttgttctttcggaaggtttatcttgttttcgtcaaacacagcgatcctctctatcagagcaaccaaaatgcaactccaaacccaatccttcgctctcaatcttctgccatctccaaatttcgccaaacccatcgagagacgtgaattcatctctctaaaacgagacccatctcgtccaatttcactccgatgttccgtttccacgactttggatactccggcgaccgcttcgacccacaagccctttccggcggaggtttcaaggagtatcatggagctttcatctgttggaactctctccactttgacccacgacggttggcctctcggcgtaggagttcgcttcgccgttgacaaagatggcactcctgttctttgcctcaatcgctctgtctctcctgacaagaggtctgctcttcatgttcaggtcctcatttgctaattccactctgtttcttctttgaaaaaatggcaaagtttacttctttttgaaggaacaatcatgaattgtgtttgtttatggaatcagttagaacaatgtggattgaggactcctcagtgtacgatacaaggtagcattggtcgacctggagacgatactgttctaaaggtatcattttttaatgaatctctcactccaaagaactcaatcctgaatctctcatatacattggttatgatgaacctttgtatggacgataaggtttcttgattggcctgttactgtttttgtccgtgctactattatgttggactagaaccccaagttcttagggtaaagaagacttgcatttatattcattttctctgtgtgtgtgtttgtgctagtatttgctagttgatatctattgttgagtagactttaggcgttttttctatttccattataagagctgtttgtgtgtgtagttgaagatagtggtgttgcgtttccttgcctctaggagatatcctgtggaaaacagttggttatttcttataatagtgattttaagatgctaggtttcttgcccttttcatgtgcttttacttgaattgaatcgaagtctccatgttttttatgtagcgtcttagtgctacatggagggaaaagtttggcgaagaagttaaggaagacagtttatatgttgttgcagttgaccgtgttctccaaatggaagatttcatggaggtagaaaacgcaagctcttttagtttcttgtgacaatcaattctctcttatgttagctgatttcctctcaataattaagtagaagaaactttgttgtaattcaaactttaacaacggcgtctaaaaacttttacaggacggaatctgggtggcgtcatcagattacaaaaatgcaagtcctgaccctcttcgagatattgcagaagatattgtcaaccagattaacgctaacaacatggaagacatcttccgtttctgcaatgtatacgtggatctagactttgtggttagtattattcaacatgctatgcaactacttcaaagaatgttcaatctaagataacatgttcagtcgattaccaatctcaagaccaaaactactactaatgccaggtttcagaaacaaagatgatatggatggataggcttggattcgaccttcgggtatggtctccacgaggtgtatatgatgtgaggattccatttccaatggaagtaacagatgaaaagggagcaaaatcatccttcaatggaatgtcacagctcgcttgggaagtagagaaaagctattgccctgcagatttcaacaaggtcaaactacttaagcaagttgtgggatcatctcattctcacaagggaggaggacaataacaatactaatgacttttttttgcttgtccccattattctttatttacaagttgatgccaaaattgtgcattggctctcgtggaatagtatatgtttacttgaagtaatgtttgtcatctttttttatatataagttcatatatatatgccccaaataaacattagttatgagaaggaagcaaagagaaagagaaagcaaatagatacatagaaaagagcaacatatctctatgttcagcaaaagagacaagaacaagtaataacgtaatcaaggaaattttcattttagctttctactatttcaaaccaacgtcttaagcaagctgtccataactctattaccgacaacgatctagtatgttcataactctattgccataatcgtttcgtttggactatgtgtctctgtccacccaactcttcgtcagacaacaaaacaaagaacataaaaatgttgatctgtcacgtgctttgaagattatttttccttgacaacgattatggcaacgttggcatatgttgcgagtgagacgattattgggaagaatatcaacatttacgttacgggaaatgagccctccaataggcatcatatacatctcctttccaagaagacattcaacatgcagtgtgacgttacaatcattgcacatataaactccattcttcggatttgcttgtttttcacaaacttcacacaaatgcggaccactttcttgtgaaccactgaagtcttcatcataagaaaatatgagaaaatgttcatcatgcttatacctcaacttattgggtaaagtggcgcacccaaaacacaaagcaaaacgacattctccacagtttagacgatgacctatgagttgtccgcaaatcgaacagaactcttgcgctgtggattcatgtattaaataaataggatgcggatgaaaccgatgaatcaatgactcagctatagaagcgcaagatacgtctaatgtgaagttgcaatccctagcacaacatgtgtacgcaaaaccattgctttcacgcttacaagcagtgcattgaaaataatcttcatgttcctcatccaccagtagaagaaggggatgaggatgtgtcgcatgttgtttcctcggaggaagatgtgcacatgtttgatggaggataaaatcacattgcatgcaactgtaaataagatcatcacagataggaaacgtgcatgctcgacaacgtttatcctcgtcaaatgctctgttggtatcctcgtccagtctcatatgatgacttttgtgacgaaaatattctataattccatcacttatctcattgaacgacttaaaaatatatagagattcatcttcttctggttctccctcaagttcttttccgtcccatacatcttttcgcgttgcacatttagaatgaaccgcgaaactgcaaccctttacgcaagaatatcttgcaaaatttgtgtctatgctttcacgacacactccacataaccattgttcaggagtaagtgaagaattgaaggagagacgatgttcatgacgtgatatttttatgatgcatggaaaatagacacactctttatggactacaaaattacacttgacacaggaatacagcaaagacctgccatcactcaacccacaaacgtcacaaatcaaggagcctttcctttgaaagtagaagagtgtatgctcatgcctttttggatagtctattgcaaagagtggtggctctctagcacaatcttgacacatggtaaaattgcatatagagcaatggtaagcaaaatccttaaaagttgaacaagataagcatatctgacctgattcataacgaaatcggagagcatgtttaggatgatatgggtgctttgatatcggctcgatacaggcttcgtggtagtagcctgaagagcgtgataatactgaagattgaagaggggaacatgaaggacggagacataacgtgcaggaataaaacgtggtaccgagtaatgacttggagcatatttcacattgtttgttaggtctatggcctttaatgaagcccttgccatgtctgtcgtagtagtatttgcgtgttatgttaaagtcgttgcccaaaactaaggaggtgaggtgaaaagatggagatgaaagatttggtggctctcggaattgcatcgcgcgaaaatcttcttcattgttagtaaaatatgcacgagggcaaaagagaagaggctgctttgacaccgaatccatggctaagacggaaaaaaaaaaaaaaaaaggaggacatgaaattttttatgatggatagatagagtgctttgcaagtaaatatgaaaaccacaaggaaagaaacctttgatgtgttgatgatgaacagaagcagtcagagcagtcttagccttatctatctcttcgtcatcatccgtacgtgatttgaaagttacaataggcgctgcccgagtaccttcaacactgccaggaccatcagggtatctaaccacaacgacttgacaaacacagtggtgaacacagaaatcactaacagagccatcaccaaatcccataatcagagcagtgagattgagccgttgagtctcaagacaaagcctctctctcttatcgtaatctttgactgtatgaatcgtgtgagggaatccagcttccttcaatggcttcccgagatccgctactttggagaaaatagaagcggtggtgtaaggaggttgagtttggagagggtaatatccccaatcggctccaaagagaccggcggttggagagacgtgtagaataatgatgtcgtctccctgacggatgtagttatcaacagcccaacgaacagtgaaggcactttcttcagagagctccacggcgattccaatcttacgttgacgaggagatgaaggatgatcggattctggattcatcatttcttcttcttgcttccacaaacttccgatttttttcttagggtttttaaattatgtgttatgcagcattgctaattatgggataatgaggtttatatttatgggttttgtgcaaatgtttctttgcttgtaaaaaattatactttggttaatgcgtttgttatcccttgcatttttgtcaggtttccttagcttctcgacaaggaaaatgctacatcgttttcttttaaaaaaagcaaaatagtagtctctgtcttgcttgatgagaaaataaacaaacaatttgtctttgacatgcacgttgaaagttttcctctaaaaacacgtaaacgtatttgggcctaattcagaaaggcctaaaatgggctgagaacgagtatggggacggcgtatatccgtctcaaagaaccattcaaagctgaaacaatcaatcgcgacaaggttcacttctccctctccaaaatggtccgatggaaagcctcagaaaccaggcacgttactcacgattctcctccctctccgtgcgtttgttccaccaatttgatcgacatctctaccttttgcttgatgatctttacttgaacaacttgaagaggggtttcaatcttttacctctcagttccgttttatattttttttcttctttttattaacctcccaactctttatcttgtttttcttgacagttctgcgctcagacacacctgacgtttaagaattttcttttaagaccatggttttgtggttttagatgttttgcttctctggaaagttggtctaaggaatgcacaaacccttttgtgcaacaaatctttttctttgttgtctacagtgatgaaagcttgagactcgccaatcataataatgaaaacatgtttcttacttgagagttgagacactcctttatcgattcttcttgggttgtctcttgggttaattatattacctacctctctttacagcaaatttaccatggttcgaattcagagaaacaaaacatgaaactaggccctagagatcctatacctcaaaatctgataagtaagcgaccaattatacacacattgttcttgaaaatggaagagaaactttctcatttgaagaatcactaaattcgcttctggttttcacatccagagtcaagtagcccaaagccgtacagaaacatcagttagaaaagagataagttggattggataagtagactccattgtaaaaagataggctcttaggaactcctggctctgttcctggacgtccgaagatgaccttacctcaactttgtaggtgaaacgcatctctattcgagagcttgggctttctctttacggattgtccctgcataaggccaagccagagctgggaatgtatatatgtttgctcaactataataaacctacaatgtaatggaatgcctatcttcaaatgttatatcagctgtcaacttctgacaaaacggatgtgcttgttcatcagcctaagtaagaacagagaatgatcgacatgggaaatgctgaagaatgaaaccgatgtgatagatcatgagagtaatattccatgtctatgcagtgaaacgaagttgatcaaacccctctggatgttatcatgttatgatctaatgtaatggtatatcagctaacatagcaaatggagtttcgttaggatgaatcaatcatgagagcaacattccgtgtccatgcagtgaaacgaagttgatggaaggcctccggatgttatcatgttatgatctaatgtaatgttatgttttttcctagctaacgtttcattaggatgaatcgatcagaatgatgaaaatgaatcccacaaagtgatgtattaaagccgcaataagataaacaaatagcaaaccaaactcctatataattcaaacaatcatcaaaaaccacactgcgaatgcatgtagcagagctaatagaaactgaaacatgttatatgttgatgaggtcacactatatgcacccaacacatgacaaagcaatgctgatgcttaaaaatgtcgagaatggaaatggatgaaatgcagactgcctggaagatgcatcgtattcgtgcagttgttgggagataaggaagagagtacgtcccccttcaaggcctactgatatgtcagggctccttgggctccattagcactcggagaaggaaagaaagaatagccgccaccttcctttctcttcccatatggattctttgaatatgtatcattgggttaagaagaatcaaacagaaaagaaaaaagaacttggcatactggaatattaaataatcagaaagagtaaaagtatataaggatattggatcctcatgccaattgaaccagaacttggaatgacagcaccttgcaaattatggtgaacatttgtggcactattgacatcctgcaagtccagatagaagaatttaacaatatgctagaagaatattttctgtcacatatacacagatggtgaaggtctcagagttaacctcgaattcaataaagcaaactgtatgcctttcttgtctcagaatcttcatttgtttgaaaccaggttgcctgcaaaatgaaagtacagtttaccgcagaattcttgagaacacaggtctacaaaaaggccaagatctcaaggaaagcaatggacaggagtctcactaaagggaacagatactcacgcactcaacaggctcctcaattcttcttcgtttatattctccccaagattaccaataaatagggtattgcaaggtggattatccttaatattctgcaattgaaaaaaatttgaaaacaacatgagacatatatcagatcaccaaacctaggctagatattcatcaaactaggtacaaaatttatcaaacaatcagaaactttagcaaattcagagcagtagacaatgcatttaaattaggcaacaactattgttccacaacacaaccaccagagagtatagcatgtaagctaattagaatgaagttcgagattgtaatttttaggcaaggagaggcaagtacaatatggattccgggtatataattgcacaaccaccatatgataaataaaatgatgaaaacagtgcaacttcacctggacaggcacataagaactaggagctgctataggtgggggcgtaggcattggtacagggggagcatgataacctgcatagggatcatatggtggaggtgcaggtgccatatatctgaaccaatttatcttcttgtcaaataagcaacttaacataaaacggtgtaccaaatacacatcgtccaatttctacacagcatatgaaatatgaaggagaagcaaatgcctaacccatgaggaggtccccacacaggaggaggtggaggatggaaaggagatggactatacacagagtgtgtgcagtcaccaccagttcgtaggcgcttactttgatcataagcatttgaatccccaacaatacctacagaataaagattgagttcaaaggttatatatggtttgtgatattaacaaaggaagtaagaaactagataaaggggagagtgtagtgagaccccgtataaatgcacaaaactgtatcaaacatgcttcagtaacatgactaatgcttaagatagataaaatacagccattttatgtcataaaggtagagctaacctcttttaacaaaaagattcttcttggccatctctgtatgtatcacagactttgactcagcatcaaacaccatatgctgcatgccaagaacaacatatgtcataatgtgaagacaaaaaaggatctgagtcaacaatgatcagaagcagacagacctgaagggtatctttggctgccattgcaaactgagctgtggagaaaagagcaaaccccatgggcttttctcccttgaagttcacctgagaagcctcgtaaccaggcaaccatctcaagagattcaaaagctctctctcttttacatcatcgggaagccctgcgatgaagattgtccgcagctgaacaacagattcaaacttgtgtaagagatcacgttttcccaaaatcagaaaactccaactacatgacaagataagagaacctttctcacttatgcaacaggtcataagtgagattttagtaacaaacttaaaaatcattcttatcaaaaaggtcataactttggacaatttatcgattccgtagcaaaatcaagctaacattgtatatcaaaaagcaggcaaattaaaacctcaacgtaaacaaaaatcaagcaagcccatctcgacaacacagcacaagaatcaccgatatgtatagagagaaagagaaagagttgaacctcgtcataaggaggacgattatggttgtcaactaaaacaggaggaggaggaggatggtgatgaatgggcggcggatgtggtggagcagctgatgatactgcggctggaggaggcggcgcacctgccggcggccactgctggtggtatgggtggattccggcgccggccatgagataaaaaaaaaacctaattactcagagagtcagagattgattgttcgaaaaaacttctgcggaagaattgacggcaaagaaggcaaacttattttttaagtcacatgcatcgcacgtgaacactgtaccactttaattttatttctttctttttctgttaaaaactttaaaaagaaaattagtttttaatttttttagaattataattactttaagtttttcttttttcaattgtttttattggaaagaaactttaatctgtattttcttactttctaaaaatattaaatacctaacaccaaatttatagtatctaaatccacgatcttaaacactcttaatgatattataatccaattcagacccgaccaaacaaaaaacatggttaacgtgtaacaacacagagccacacaagtgcgagtgtattccacgctctttccatcaacgcgtaccttcgtcttaccattttaactttttttttttttcttgtttcttacaatcattttcacaaatctcttcgatgaagcttcattctcctcttgatttgatctctttgaaaaacgacgaatcaaacaaaccctagagtcaagtcaatcatgatgataaatacaaacctggaagataaagaatcaaccttgtgaaaaaaaaaaaaaacttttgattccctcttcttctaaaagccatgaaaccgattcaatctccttctggagtagcttcacctatgaagaaccgtttacgcaaacgtcctgacctaagcttaccactcccacaccgcgacgtcgctctcgccgtacctctccctctcccacctccttcttcctcttcatccgctccggcgtcttcctccgcgatctcaaccaacatctccgccgctaaaagcttatccgagctagaacgagtgaaccgaatcggaagcggagccggaggaacggtttacaaagtaatccacactccgacgtcacgtcctttcgctctcaaagtgatttacggaaaccacgaagataccgtgagacgtcagatctgtagagagatcgagatcttaagaagtgttgatcatccaaacgttgtgaaatgtcacgatatgtttgatcataacggtgagatccaggttttgcttgagtttatggatcaaggatctcttgaaggagctcatatatggcaagaacaggaattagctgatctctctcgtcagattcttagtggattagcttatcttcatcgtcgtcatatcgttcatcgtgatatcaaaccttcgaatcttcttataaactcagctaaaaatgtgaaaattgctgattttggtgtgagtaggatcttggcacaaacaatggatccttgtaattcatctgttggtactattgcttatatgagtcctgagaggattaatactgatttgaatcatggtcgttacgatggttatgctggagatgtttggagtttaggtgttagtatcttggagttttacttggggaggtttccttttgctgtgagtagacaaggtgattgggctagtcttatgtgtgctatttgtatgtctcagccacctgaagctccggctacggcgtctcaggagtttcgtcactttgtttcttgttgtttacagagtgatcctcctaagagatggtcagctcaacagcttttgcagcatcctttcatacttaaagctaccggtggtcctaatctccgtcaaatgttgccgccgcctcgtcctcttccttctgcctcttagtgtttctaccattttcgtctttcttgtttttcaatttttcgtagtttttcctgacatttttccataagttttgcataccccaagcaaagataatgagaagagtagaagaacaatgtggtttgtgattggggtatgagtcgtcaggaagaaactcagtttgtggttagggtttattgagtctttatcttatgctgctaagcttgatttgtcttatgggtaatgaagaatgttttgctagaaatggaaacaaaaaaatagacaagaagaattcttatggtttaagagtgattttagctggatttgcttatattattgtttatataaggaagtaaatggaggatctttcattggataattctcattaataaagcttcttcctttaattctctttatggttttctagtttccgtcttgtgaacattacaaaggctaccctagtgcctactgcgttattttttctttgccagttatggtctaattattgcggtaaaagttgaaagcttgtttaggaacttttgtttgaacgaaatcatgtgatgctcttgcaattggtcaaattcagaaagctttcatttggttccatctttgagcatgcatcatgcatgtaaacatcagctattcaccttgtttctgcttctcgttctctctctctctctctctctctctctcccaatggttttgtgttcagtatccgtcaaattgccttgatgttttagtgtgattaggaatgtaactctcaactgtccaggtcagattctaggttcttcagcatctactcaaaaaagtctaccttatggctaggaatctagctctcaagtgtcctattggtcttgacttctaaccacattagacctttccgctgggcggctgggccacgtctttctctgcaggtttgctgaagtttgtgctgattgattcacctgaatacttgaagcattcagcttgcagaggaggataactttgagtgtgtgtcccagtacataagtctacccagcgtaatcacttctcattgtcgcttttgtgggtatgtttctgttccttaattctctaaatttataattcttcttaagaaaatagtgaaatgatgattataggaaatgaatttatgtttctgagggtagcttagctttaggtttcctagatttgttgactttacatgattgatctcgtgaaaaccaaatcaaataccaaatacttgcttcttactccttacttcttagagactataatgttcgaatttacacatacatttgaaactctcttgtgtctatttagagcacatggtttccaatttagctcgcagatccttcctcagaatcttgcccgaaactgcttttggtataacttctatgaaaaacaccatcttaatccgcttgtagtgaaccacctatataaaccatcacaccattgatttaagacatagacagttttccatcttgtgtgtgtttcgcattgaaaaaccgaaagcgaattcgtacctgtttgtttacgtaactcttgacatcatcttcagttaactgagacccttgagatcttgctacaaatgctactggaacctcatcagctacttcatccttcattctgaaaattcaaatatcattagagacaacaaccattttagtgtctcagtttggaagtttcagatttgttttgaactcacgcaacaactgcggcatcatcgatagaaggatgagaaataagcaatgcttcaagctcagctggagccacttggtagcctttgaatttgatcagttccttcaaccgatcaacaatgaagatctcatcatcatcatccacaaacccaatatctcctgtatgtaaccacccgtctttgtctatggttcgtgcagtagcttccggatcattcaaataacctaacaacattgcaccatgttttccctatcaatgtttattctcccaaaggaaaaaaaagaagggacatagcttgatcgtttgaccctttttacctttcatgagctgatgacctcggacgcagatctcgccagatttgttgcgcggcaaggagattccggtttcggtatcgaccactttcatctcggcgtttctgatcacagtcccacatgcaccggacttggttttaaatgggttctttgcaaacgctaatgacttagctaccgttccggactcggtcattccataaccctgaaacagagttttgtttttttagttttagtcaatacgaaaatgtaaaaacgacaacagtcgaatattgtccaacatgataataacatcgccagtgacgaagacatgaaacggcattctgaaaactgtaattaagtaaacgagatattaatgtataacatgtgctttgttgttgtgggtcgtggttgacgcttaattacttttatgatcccacaatctatcaataagtcaacacttttgttgtttcttgtcaaatcaataagtcaaatagttatgaaataataaatgaactaaaagactacttgaaattttggatgggtgattcgtataaagagacacgtaatgaatgtttacccaataaactaaactatgcaaaaacaaaaaataatcatcacttagtactgttataaacctgtatatggatcttcttaaataattaaaatgtgtgaattcatttcataatccaaaaaatagatcattatataaagataaaaacaacacggcaaaaccaaccttaaagacaaagtggagaagctgtcctctaggcaatgggattaaagtgtttttgcagacattatcgttttatcgtgtgtgtcagtgtgtgtgacttaaactctatttaaaagcaaattattgtactatgtatttcacaaatgatgatatgtttgtttatctgtacgtctatgatatgtatctttcttatctttatgatatgatgcaaaatatggatgttagaagaacttttcatttttctttttctttttatgggattaaagttttttgttcgcactattttttcttttactataatatcttttcaattggaattcaaattattcacatataaaattctacaataaacaaacttaagtgaaattggaccaatcttataaaaccacacaactagaatcccttgttattcctttagttaagcatttgagataaatcttagcctaatataacgacctacctatatttcaattatttggctttaaatagcttggtaaattggacaaagcagaaatcgatttgatcgtctagctcaacgtgggtgctaccttggtttttaagattttagcttttaagataaaataatactattcatactggtgaaatgatttggattttgtctttggataaaatatactactgtattaatcgtttaccaaccacgagacactaaactttcacctaattgatcgacttgtatatactcaagataatgacaacgatatgtcatcaatgtctacatttgataaagccaaaatcttttagtttattaagtcaaatattggtactttaacatctcaattaccaataaatattcgaaatgtggtgtcacctaagatctagacaatgacattaatagttttgatgcctagatttggtgaaccactcatccatttttatttgatatttagaccacgaaattgttactcaagttactagacaataatagtacatagcgacaaatcttcacctaccgctagtattttctactaaactattcttgtagtatcttttactacttatacgaagatgacaaaaattagtaactctcaagtaccacatgaaacgtgtgtatgatcaaaactactctcaagttcgtctcagtagtcatgtttataggattctgaacgttttcactagagtccatatagtaatttgcattaaaactcatgaagaaaataacataagtaattatgaaagtacatagaaaattaagggaagtaaaactgacctgaccaaaaatggcattaggaaacttgagtcgcacggcgtcttcaagctccttctttagtgtagctgcacctgatagcataattctcaccgagctcaagtcgtatctctccgtctcaggggatttaatgaatgctaaaaccaccggaggagccaccggcacaaccgtgactttgtacctttgaatcagctccatcaccagattcaactcgaacctcggcacgatcagtaacgctgcaccggttctcatcgccgaaagcatcaacgcgtcgagagcgtaaatgtgaaacattgggagaaaacagaggatgacgtcattggccgtgaagttaaggttagggttttctccgtcgactttctgagcgatgcttgtaactaaacccttgtgagtaatcatcactccctttggaagtcccgttgttccggaagagtacggcatcgccaccgtgtcttccggcgatattttaggttttagaagttctgtttcgtccgcttgagtcagttccgtgaaactcacgcaaccatcatcactcgacgaaacaacgccgttgtcaccgtcatcgtctaggcaaacgatcaaaacgccgtcgtttttgaggtttgttagtttatcgactaaacatttcttcgtgatgatcatcttcgcggcggaggctttagcctgtttagcgatctccggctgagtgtagaacggattcgcggtagtggaaacggctccaaggtaagcaacggcaagaaaagacagagcaaactccggcgagttcgggaggagaagcattacgacgtctccgtggcggatcccgagccggtggattccggcagctatcctccgcatgttggtttgtacatcggcgtaggtcaaaatacggccagtggcaccgtcgatgatacaggttgttgaggaatctccgtcgccatcgccggagaacctttggaagacgtaatcggtgagagggaggtggttagggatgaagatatcaggaagcttagatcggaaaatgaaatcatgagaaggttcttcttcttcgtcttcttgatctatcttctttgtgagaaaatgcgtttgttgttggagcaccatttgtgtggagattctaattcttctttacttctttcttttcaaaatgtaacacttgcttttctttcctttttttttctgttgtttgggtttttataatggtacgtttggattagtaattattaattaatggacgaaggctgattttgttttatagtaatagtgatttatttcccattagatgcgattttcttaatgattttgtatataagccattgctacgtagttggtgagtgggccatttctacgtgtcttcatcaaaaattgtcaatattataacttaataagtattttatatcataataatcggaaactatttttaattaacactaaaatttgttaatatatatctcagtgtatacttaatatgttatccttgtatgaaatttaattttaatataataattagttatgaaattgacaacttggcttataaaattaataataccaaaatttatacgagaatattaagaaaggcgcgtagtagctaatagctatatacattccgcagttgacctccaaaaattctccatgagcataatgtgaatactcatatttgagcatgcagacttcatactattgttatacacttatactttaaacgtgactataagttttgtacgatattttataaattatagagttgattgtgacttcatcttcgaaggataatctatttgcatttcttggtcaataatatttgctgttttttttgttcgtttgtttgtttggtaggatattatttactgctctctggacaatttaaaaaacaccccaaaagaaataaccatacaaaactgtatttaccttactaatcttccaaagtagtagtgatgatatatctaattggccttttgtaaacgcaggactgataatctaaaataattcatatctaattaatataagaaaattgcaattaactcttaattaaccatctttttaatatagcatgagataattttacatatttgattatgcagagtttctacgaaatgttcacaagcgactaacgcgtattcgataaccaaacaaaacagggacttgaagcaaaaaaaaaggtcgcaagtcgttaccaagttgtttagttttttatagtgacccggatctcatttccatggatgtatagttttgactattgcaaaacaacttggagaaattacaaactctgcattagatcgggttatacttttcaaaatattcaccatttgatacaatagattaaaattaacctaaatcttctgataaaacaatttagaaaatattttccaaaaacaattgtgatagatttattatggcaaatgccaaaaacataagaattatacggatagctaaaacataagaattctccaaaatataaggacaaatgtaaagaaaatatgaattagccttgcagtagtttccacctttttgtattttattggaacggttgttgccttgaaataatgaaatttaagttgctaccaccgttcctgctaggtttaaaattgtagttgtatgtctttgatttttataaatgatcacatgattattctctaactcgtcccaatgctcataaattcgcgtcttaggtgcataccttaaggcttataagttctcaataagtcatacttaaattaaatctaatactggatatcgatttggatgagtgattcctaaaagaagaagaggaaacaataatgaatggatccccaataatgacgacatgggtgtaaatagtgttgtatattaaaaaatgttataaacatatgtatcgccttttcccaaaaaaaaaaaaaaaaactgtttatgtcactatagttttggtgtcaccaaataattaagtagaattaccaataaaatattcggaattttggtggcccctaaatatgacattgactcaaaagttgcaaatataagacttatagaaccaccaatagtcaaagaccacgaacgtgttgtaatttctctatcatataaattttagtgtcattttgattactataatctcaatggattgcaatagcgacaaatcttcacctaacacacgagcatattctgcttaccggtccgattagatttaattataggaacacgacaaaacctcagtaactctttaagtaccgcaaatgaaacttattgttcagctaaccaaattatccatctcacaaatgggcatcttcccttggattgtctctatgcaaattgtaactccaaattctgatatatcacgacttcatgatcacttgattctattctctatgggtggccgtctctagtctttgatactcaagtatttccctcccctctaggatgcttattcctgttgggtgaatgtagttttgcttactttttaaggcaattattgattatattcgagcaatatgccacaatatggaaaggttacatcattcccaccaaacaaaagatacaactatttatccattacatacacataaaggaaaaagcacaaatattattcttttacgtgtaagtttaattcctttgttcacaaaacgaaattttgtttcatttttctgataagattgcattcatatacgtggatcatataaaacctagttcattaatccatttgctagtcttgctcttagatccttcctcaatatcttccctgatggagctttaggaatagagtcagtgaagaacactttgttgattctcttataaaacacaacctaaatcacacacacaattaaacacactatgaacgtcaagatccaaaattcatcgaatgatttataacatttcattattaaaaagaaattgataattagttcacctgttttgacacgaattgcttgatttcatcttcggatatatttgaatctttcgatctcaccacaaacgcaacaggaacctcaccagcatcttcttccttcatgctgcacattaaaaaaacaaattgaggaaataagaaacggtgtaaaacaaaagacattcgaaacctagtggtttgtgttagtgtcttcgttgtttaaaattcacatacgcgacgacagcaacatcattgatttctggatgacctatgaggagagactctagctcagctggagccacttgaaatcctttgtacttgatgagttctttcaatctatccacaatgaaaagctcgtcgtcatcatcgataaatccgacgtctccagtgtgaagccaaccatctttatcgatcgtcgatgccgtggccaaggggtcattgagatagcctttcatgatttggttgccacggatgcatatttcgccgggtttgttcctaggcaaagaatctcctgtgtctggatcaagtatcttcatctcggcgttcctcaccaccgtaccacatgctcctgacttcactggaaacggctctttagcaaaccctaacgacattgctagcaccggacctgcttctgtcatcccatagccctgctcgtagtaaccaacatccaaaacgttaagtttagaaacagagccgttttagtcttcaattttttaaaactttcaaacacaatttgtgtttgcatgataaataaaaaattcaaataaagatcgaccaaccacatgacctataccacaaaatcttatctcacctacccaacaaatatttcaaaatacatttataacttttgggacaaaaagttattagaattgtataataatctttaaatcaaaaagttcatagcctataggtggaactaaggaaatgatctcgagtggtattcattatgctaactaagtggcgcaaataattatctcaaactcgaaattggtaagtccttatcatagaaagcttatatcttaatttttagctaaactaattttatgaacgctgaaactagtaggtgtggctttaaaaattaaaacgtttttaaaaagagagttagtagacgctctaaaagttaaaacagtccaaaatcaatttaaaaatgttcaaaaatctttcattaactttggttgtgttgatttcatatctagttcaaacaaaataaaaaatagtaagtctattaatgtccatattccaaatgtaaggtttcatatagtaaataaactgaataaaatgcatccatccttctggagaaaattagtatggcctttgtgcagagagtacaaatcaagtaatatagtccaaaagttttaaatcatttaccaacaaaatttgaataaaatgggttcaaacaccataatattcattgtccaatatttcggaattcaggggccacaaatgtaataaagttcagaatttgcataacatcactaacaaacatgaaatattaaatttcctcagaaaaataaaatataaatgataatcaaaataaccaagaaaaaaatatcaataagagctcaaaaattaggaaaacaaacctgaccaagcttggcgttaggaaacttagcactaatagcatcttcaagctccttaccaagaggagctgctccagacttaaccatcctaaccgagctcagatcatacttctccgtctccggcgacttcgcgatagctaaaacgatcggtggcacgaccatagccaccgtgactttacacctttgtatctgctctaacaagagagtgatttcgaacttaggcattatcaagatcgtggcaccaactctgagactacagagcatgatggagttgagagcgtatatatggaacataggcaagacacagaggatcacgtcgtctctgttgaagtaaagattcggattctcgccgtcgacttgctgcgccacgctcgtgactagacctttgtgtgttagcatcactcctttggggagacccgtcgtgccggatgagaaaggaagcgccacgacgtcttctggcgaaatcttctccggtattgagtccactcgtggttcttcggactgagttaactcggagaaacggaggcagttttcggggatggcgtcggagtcggtggtgacgatcaaaacgccgtcgttttggaggttcttgattttatcgacgtaacgggattgagtgacgatgagtttcgccgcggaggctttggcttgtttagaaatctccgccggagtgaagaacgggttcgcggaggtggtgattgcgccgatgaaggaggcggcaaggaaagtgaggactacttcaggagagttcgggaggaggatcattacaacgtcgtgttgcttcacgccgaggttatgaagaccggcggcgagtttccgagatgttacgtggacatcggcgtaggtgtatacttcgccggtgggaccgttgatcaagcatggcttagcggcgaactctgagatattttcgaagatgtagtcgtggagtgggaggtggttagggatgtatatatcaggcaatctcgatcggaaaatgacgtcattactacactgtttctgatcattctgatcattgactatcacatcttgtgtcgtcatgaatcagaagttaatatcaaatttttatctaaaactgaaaagattgttttggaaagtaacgtttgagcctgaaacagagcatgatgatcagtgtttccatataaaagaatttgtggttggtgaaatgttattattgtaatatgtttttttatgtaggggtagttttgtctttctagcaatgattgagtattggtcgtaatcgctgtctcaaagttcatgtaggggttggtgagctactctactatcattatccatgcttgaatttttattttacatctttttctcaaaactacaatggtagatgaagaacgtgattaacaatcactgacacttcagtttcagtagcagctggcttataattggagattctgagaagagtttcctctgcaactagcccaatactcagcaacaagcttagagaagtaagaatcagtctccattagcttcgaaggctcgttgtactctactaaatcacctatccaaaaccaaaaccgaaactcattcattggtcattatgagtaggtttaagagatgaaagaatgagagaaaatgttgtttaccaaaagagagaaccatgaccatgtcactgtctatgacagttggtactctatgtgcaactgttatcactgtacagtctgcaaactcttctcttataattctctgaatgattgcatcagttgctgaatcaatggaagctgtagcttcatctaacactaatattttgtttctctttaacagtactcttccaagacagaacagttgtctctgtcccacgctccagttttctccttcatcactcacttctcaccaatgaaaaaacataaacctaagtgtcatcaaacccatttttttgtgaaatgaaaatattacagcttttttaccatttacctgaagaatcaagtttattaggaagattgctaatcgttgtcttgagctgacacttctctagagcctgcaaaaagaatggttttatcagaaagattttatatcttttgatttggaaatctcagtctttgtttgttatttcaccttccatatttcatcgtcggagtaaacacctaaaggatcaaggtttgtccttatgcagccacggaaaagagttggttcttgaggaatgatgctcagtttcattctcaggtctttaaggccaatcttacttatgtcaatcccatcaatcaatatacaaccacttgctggttctaccaagcgaaacaatgcgctgatcaatgtgctttttccgcttcccgtcctcccgacaactcctactcttgtcccttccctgaatgtgcaagagattcctttgagaaccaacggagcattgggtcgatatcttatctgaaacaaagaaatgatgcaaatcaatgccttttgcataactattactatcatcttataacaagttatgtttacttctcaccttaagctcctgcaaatgaattgtaccattggaaggccatgaggaaggtggtcttttatcatctataattgcaggaggttcttctggtatgttcatatattgtttgatcctctctactgaaatgatggaattcgacaaagtacaataccatcgggtcagaaacacctgagtttgtgtcagtgttaatgcataggagagcgaaagtccaacgaggcctgcaacacaaaggcacaagttcatgcacaacctttcagtttgatcaaatttttcaaggaaatgctcacgctatactgacacaagctgtgaaaacaggtaagttaaaattgcaggctgcaggaagatatgatgagttataataattcatgtacctggagctatgtagcccttgggaataaggataagaagaagtgcacaagtgaacaaagtcacattctgcagagtctctatcctcaaaatcacccactccatggctgcattagacagaaagaatagcacggcatctgcatcaactaggtttaagtagtttttgaagaatctctctgcggttccaaaagctcgaattgtcaccaccccaagtgaggtttctgcagcataattcatcactggagctttggttgttccattgatcctaatcagctcccttgcagaggctaaatagtaatccttttttcaaagaagaagcggatgttaatacagacttatttgctgcataaaacaactaaaaacagaagtagaatcgaatcatgtacctgaacaactttcgtggctgccaaagcaagaagggctatgataattacttgccatgtgacatacgtcatgatgagaagagctgcagtgagctcaacagccggtgctaccacaaatatgaaggcaaatggaacgtcatagtccaacacgttcaaatcagacgaagcctgcacatgttacattcaactatatcatacattgagctgtagtgtattccatataattataagcaaagagatcttactcgggtgagaatgcggccaactggagtagaatcaaagaaaagcatcggggctttgaagactgcatttgtgaaaccagagaagaaggctttggaagcttttagtccaagatgggcagtcgtaatagctctcgcatatacaaaaccagcactaagagttgatataatgctatagactccaataagcattgtattcgtgattttagggatcccgatggcaaaagccagccagtatgttgatgcagcctgaaaaactacaaagccaacctgacccaatacgcttgaccatagaagacaccatcctcgagagacaccgatatagtccaagaaaggtttcatcccaacataaccgctctctttttcttcttcttgtgtaagttgtacccctggaatatccgttttttcgatctcttcttcgattttttcgacaaccgtcatgtttcttatctctctgtccttgccctctttcctaagatctccgaggctttcgttactcgctaaaggtaatacagttactgcatcattatgagcatttaccagctgttggaatgcagtccccatcattaagagctcctcatattttcctgactgagtgattgttccttcctccataacctgatcaagatcatcagtcagtaataatcaaacgggtaagacaaagacaatattgtttttgcatttcctgctactctcaagttttaccagaatttgatcaacttctgagaggaactcaacttggtgagtgaccagaataacagttttctccttcagcgagtcctcaacacatttctgcagtcacagttcaacataataagaagcagtcattaagaaaagcttcttcgaaagcaatgtttcaaacttacatgaaaaagaactccagctgtatgtgcatccacagcactaaaaggatcatcaagcaggtaaacatcggcgtctgcatagacagcacgggccagctgaatcctttgcttttgtcctccgctcaagttaatccctctttgtcctatttctgtgaggtcaccatgtccaaaaccgttcatgtccttatccaacgcacatgctttaatagcagcattgtatcgtctactttccatgggctttccatagaggatattgtcccggatggtaccactttggatccaagaagtctgagaaacataagcgatggacccaaagacctttacctgtttcaattggacaacgtaaaggaaacatttggaacaaacaaatgtatatctaatgaaaaaagtgaaagtcagtcttggtggctgatttgcttacagttccagaaactttaggtatttctccgagtactgcatgcaacagcgatgattttcctgctccaactggtccacaaactgcaactttttgcccatgcttgatttccagatgtatattccgaagagttggaatcttagtttctggttcccaaccgaagttacctacttgtatgtcaactgctgttccagatgcatccagaccacttctttcgatttcatccatctttagctcgtcgtcaagcaaaaagttgtttaatctttggaacgagacattgccttggatgatagcagaaattgcatcaggtataattttgacaggctctgacataactcttagtgtagctaaaaccgtgaagatggtgcttgcgttcagcggcgcactcttcaatagagcacatcccaagaaaacaacagaagaaactattgttggagacatccaatacaagaaagaaccaaaggcctttgtcagctgagctttagccaaccatgtgaattcatcatcacgacaagattctatctttttcttgaactcatcttcccatgactgcagcttaatgactttcatactgttcaaaatctctgaggtggacctcaatcgcttatcctgcgcgatcatgaactgtgtctggcagttctgtagcatctttgcaaatggtagattcagcagaccacataggagaagaagaattaaacctggaaaagctcctgcaccaaccactccaaaaagtacagctgtagaaagcaaaagctgcagcgaaaggctccatcccgagtggaaccaccataagaattctcccatacgatatgcatccaccgcgatataattcacaatctctccagatgaatgccttttcctccctaaacttgatagctttagctgttttttgtatgcagctaccattagcgctgatctaatcctcattcctgatcttcttgatgcaaaataccaatgtctcattgtcaaggattcaactagtttcagcataactagacaagctaagttgaagaacccattgcggagatccctgtggtcactgtttgcataatccacaaagacatatagcattaatggaagagaaacaacagcaaatgttctgagaaatgcaaaaactgctatgaaaatgttttctttaaagtaaactttcacaacggctctaaacaccaagtttctttccttagttgagctttcatctccaagaagagtatcccatgcttgagaaaatttcttgtaagctaattgagcctcatcctccgggactacacttgggatatcttcaggggataatggtttcttgaatcccagcgagagtaaaggattcatccaagagaaagatagaatgctgaaaaatccagctgttgctaacctcgccgattcttttctaggatttttagttaaaagaggatcagaaagtcctgttacactacaatcttgagctgctgcagaagaagatctcaaattcatccatgaacaaaggagaagcaaaagactcattggcaaggttaaaatgtcgaggattcggataccatttccctgcaaaagtatcccactctttgcaactaaatccaacaaagcaaaagacacccaccaaacagatacaagaatattcacccacttggatccattgacaagcaaagaaacagcaagtgagacccaaatgatcccttcaacaaagcaagcaacccaagagatctcagtgacgtcattaccaccatgaatcagactgtttaacccaacaccaagaaaaatgaagctagtaatagcacaacatatagctacagccacaaagatccatcctttcttacgacccctgactataaaatgtgtagaaacacaactagctatcaagaacaagtagaagatgcagaggaacaacaaatttacaaaagctatagccgttctttggaagcaagaagaggccaaattcaattcaacgtcacaccatggaaggctccctacatcatacacatacacatacacaagagataacaattagcaaatcactaacaagttttaatgcataatatgtagttatataatctgtctttttgtcttttgaggaacacaagaagccaagacatatcccaacatagatagtaatatagtatcaatgattgtacaaatatacagattatttaaaactcgttagattcttaaaaagtttgcttttttccctacacacaaaccaagaacaccacaagaacctcacacacaagccaaaaacactataaaatgggtaaaatcgtaccaataaaagccgccattgtaggagaagcaagagagctcaatcaatgaaaaaaaaaaagaaagaaaaagcttgtgcctttatgactgaaatgtgaggttgatgtttgttacctaagctaaacgatgtattgaatgaagtccacatctacttttttcgttagaatgattgaaacgaaattagacggcatttctcgtcgatctctaaacaaataattctattacgtaattgcttacgtaatgaaattcatggatctgtttgttataaaacttccgatgtgaattaaacgataatgatggatcttttgtcattttatagaggtgagaaagaaagaagaaaacaaaaactctgtttttctctttttctggctttgtttacttaacatttgacatgtgtttactgatttctttgtcgtttaaaaacgacacaaatctggcagttttggtttagaggtaggctagtagtgactgagtaagtaagagaagagaagcatcgtttaaggatttggtgtctgtgggacattgcactttctcgagccgtgtaatatgttcatcttccacactatttttattttttatatttttatgaaccatttggttgaccaaaaaagaaaaactcaggtttcacaaattgggccagtaatgtaaatgggctcccaatcttcagattttttaaaacatttatgaatcgactattcattaggtgcatgcatgggcttatatatacacggaaatcatcattgtatgcatggtaaaacagttagttagatcagtaactcgttaaaaaagagagattaataaaacttatcaaagaggagtgatgctacaagttagactttgttacaataaccaaaactatacccttcagtctttttcttcggttctcttcctcacggtgactttaatttgctcacttcgtataattcctacccaaattaaaaacaataacaataatcgaaattataaatagatacacaaagcgacaaaacttttttctctgttgacaaaaaaaaaaaaaattgcctaccaaaatagaatggagttggcttagaagtggaatgagcaacgaaattagacttgtaatatcatcttggaccatttggtgtgtctcgtctttcgccgcaagcacattgatgaatgtgttgttgtttggaaccagtttaagagccacctttcataaaaacacaaacatattacataaaataatttgagaataaattgtttttactgtcaacttataatgaccatgtaataattaccttaaaagcagcagaagagatccatccatgccatggttttatagtcaaattataacattcttctatggcttgttccatgttttgtgacatgtctttcaccagccgttgcaatagcgccaatgtaaaatccatcgctctatatatatagtttgggaatcaatagtttaaaaacaattgtgggttcatattcaatttggagtatatatgaaccaaaatgatacgtacgtacctcgttagccaaagagcagctctactacaacttttaggtttcctagaggatccctccttggcttcttttctcagtatctcaactaaatttgagtacacaagaggatcagattcccacatcttctctaacctctacaaacagaacagttaaacaaaacaacaacaacaaaaatcaataaaaataataggtcaataattgttgataattaataagaaaaatgagtgtggaggaaaaaaacgaggtccattcattcgagagagagagagagagagagtataacaaaaatgaccatgaaagcaacgtaaaggtatcgatgggtctacgtgtctaaagagatattgggagacgagtcgcaacatatacattgcatttttttaggtaacaaggtaaaataatgtatgtatacaaatactcttttttcttctaacaagataaaaaaaatggagcattctttgttttcttaataaatatgtacttagtaatttagtatatatggagtatatatctaaagagggttacgcaagagcttacgagcattgaaaatgatgtatatatattagtattaaaataaaggaaagagacaaaattaattacttgaatattttgatcaatgtcatgtcggagaacagccattgtcgggccaatcttatctgcaatgaatcaacaaagtttcaggacaaccattggaggaactaattcaagcaaaccaagcagtactagtgaacaagattcggaagagcagaaactatctttaacgttaacttaaaacatagtatttagaaataattatttatatttatggaaagggaaaaaaacgcataaggattaattttaatttatggagatttataaattaccaagaacttggactataatgttgcagaaagataggagaggcttcaaaggtaaattgatgatgttgatggcttctttttcggtggtaactattgtggtcttggctatggaaagaacagagagttcttcaatggcagatccaatctctgtcatcttcttcttcttcgttgtctcttccatttcacatctctttcgtttcatctttgtaccaattattgttcctgtctctaccttgttgactatgtgtgtatgcctctactgaactaacatatatcaggaaattcggctatttataatcggttattgaatctctctatttttgagttttttgattccgggatatttgttaatcatatcttataaaatatgaagtacgtacttaatagtagattatttgtagaagtttctcttaatatatgaagattgtttatcgaatctcttatcgacccctatgtttgacctagtagctaattgtgtattggttcctggtttatctgtttggtatattaatctatttacttcattttgatcgtttactttctcctttaatcgcagaagtggtcagaaagatacacactttagtttatttcaggtaaatctttttatcactataaaaaaaaacgaaaaaattagcagtaaacgtacggtatcattaatctatcggtatgattaattagacctgtaacgtaaatttgtgcagtaaaataaaatactatatattctagattccaagtagaaagaaaaggggaaaagaaatttcagctgcaagaaaagaaaaaaaaatcagctgaaaacaaaagaaaagtgcctaaaattttcgagtaaatgggcagaaaaaataattacgccaaaatctattactcctacttcttttttcatttttcttatcattattttgggttaccaattaataaactttatagaaagttcaaacatattagaaagaatcattaattttattaaatcacttatatactcctattgcacatgcatatgggagtatttccttatgccaaaaaaaacagacagttctggtgaataactttgggggaaaaaaaactttgaagaaatgttttacatattgcagaagttttgagtagaagaagaatgaagattgatagcataattcaatcatgtggaagaagccagagagtgttaaccatctcatatctcaatgtcgtatagctaaagaaatttgggagctttatcattgtatccattaggtgaaccttttttttttggctcaccatttgcatgatgtgtagttcgaggagtatgattttatcattcaattagaaaaaaattcatcccagtctcaaagtggattccgtattcttccaacagtcatctacttgacaattattttttgacgtagatggaggactagatagcaaatttgtacacaaattaagaaaaatgattaataacttacgtacatatacgtcatcaaatacaagaacccacatatacatttacatttataggcacatacatgtgtatgcgtgtcgttttgtgtgcaaatgtacttggaggaagtggggcagttaaggagttcagtttgtggaacgtcgtgattactgataataaaaattactaacttatttagttttattaagagttatcacttatcatgtaatgttaattaattttatttggcacgaagttgattaacattaggatgaagaaatggcacaaaggatggatactagcaaacacagctgtgctcacatctcaagtcaaaaatcgctcataagagatagagaacatgaacgtattcctaaatataatacgaagattataacttaaattgaacggtctctttgctaaacaaaggattgtccagaatctatcgaacatgctggtgggtaaggtcacatagtgggatgaatctgtttgcttatgtattatttcaaacatatattaaatacattttcttaatttaactaaatggtctgcatcatttcaactccctctaatctcatcccggttcatgaatgaccaactaataatcattttgatactataagattaacatggctaagtgccgtttatatcttaatctattagtcagtatatttttaaattattatttttggtttacattagattagaatttattaagtcgtcattaagtacggtccactctggttcctatccaaaccataggttcacaaatcacgatgtagattctaacatagaatactattggtacttcacaataatcttttctcttttgtcgtacttttttttgaggttagatgtgaattaagcttttgtcgtacttgttatcgataatatataatcaatttcttttgtaaactacctattcattgccatgttggtaaagggaatctttcccctctttatggatagtgtttatctaactctatgcaagttttgttattacctcttcttatgggtttaattcttttgtatttttgtatttgatgaagtttaaattgaagaaaaaactacttactaaatattattgcgggaaaaatctttttaatggacatggaaaatcttataaaacatagtaagactttttggactctgatcctagaattaccaatgtgatgtcttttgatggttattcgatgttagaagtaaaaacatttgaccataagacttggtcgtcggacaaagatgaaaatggagtttcttccacactataccagaaaagatggtccaaaatgtattctgctatttctgatataaaaaacgtagaatcgtgttttttgtgaaaatgaataatttttataaatttttcttttactatagagtcgaataccagataactcaaacattctctaaaactagctagcttaaatggtttaatagctaaattacatgtagactacatctaagttaagcttggtgacactaaataataattatctcaaactaaatttcatgtaattttgaataactgaaacaattcccataaacttttgtggttgttttacctaaaaaataagtatttcatcattagttgttctattttgtcctagaagaagaacatcagacaataagaataacccataataataaggtgtaaattggttcggaaagatcaaacgatgttttaacttttcgaatattgccagatatatacttcaagcttcccatgccacttctaattttatatagtgtgaatactacagattcttaattcttttttgtttgtttgtttaactaaaggaccgtttactaacatgtaactattatattgtgatataattaagtgaagcgaatgggcagaatcatgaacacgtatccgtctactattgagtcgtcattacgtttaaaaatgatgtcgatggaacaaatatgtattgggcataatctatccaaatttacgtacaaggttgcttcttttatataactcctcttgataacttattatggaattaacgtcctatatataagaacctacatggtcatctctaacaacataagtaacttatgagattcttcacgtgaaagatacaaatattgaacaaaaatggccaatgaaattatatggttcgtaacgaagtgttggaacgtctatctatctagcaatttgaaaattccattaaagaaaatatgcttattagcaagtcaagccggctaaaataacgtttatattagagataaaactattaaatactagttgacatcaactagtcaaaaaaaaaaaatgatgcatgataaactaattatattcttctagggtttggcttcgatgttgtttggtagcctggtaggtcgtatgtcatgctagggatgaacaaaggaaaccttcatactttcttcattaatcggatataccaatatatgttcttttatgtcagctaagtatccatagatacatcacaatgatcacatatacataatacattttttgagccaaaaaagtattatacatctatatatatattctccttctatatgctctgcatcatgttttaacgatcaaacacaaccagctaataggaccggcgccgataaaacgtgattttggcatttttctagtccgagactttcttaacacttaatccagaatacatgaaactcaatcatgttcaataatattagcatctacgttgccaaggatgtaagaataccaagccaaaaagttggattccgaatcaaatcctagatatttcagtgtataacatattgtttcggtgagtttctttatgcttttgaattataattaccatatatgcaatactaattcgtatgggaaacacatattttatgcttgtttaccccatgaaagacaacggttgttgagttgttcttatccgttcttcgcacaaaaaaagataagacaagaacgagccaacatgtagcagcaatattattgatatgttactataccttagccccaaagatatggtggagcattttagagacgatcgagatactactttcctcatgctctaatcaaaagatttaattagtacccttttattgaagcaaagttgtatcttccgcgagttttcaggtgtggattggagggcatcccaatctgaatgaatgccaatcttagttacaaatttgtcaaaaaaacaaaatgattgaactttcgaatattgccagatattagcctcaagcttcccatgttctagttatcgttgagtactgaatactgaagattttcttatgcgtagtttatgttttaaactctagaccgtacatttactaaaatttaacaaaagtaatattgtaaattaagtgaagcatcgaggcagtcatcttacacgtatctatctcctattgagttaattacatgttattacaactaaacgaaatagtatatatctcatttatgtcgaacggataaatttaactattaagtattaaccaatggcttgttgtaacacatcacgagcataatattccatccaaatgcatgttctatgaggtttttgttttttttgaggttgttatatttgtattcaaacagccacaacacatataatatacacatgtcctttcaatattctgttatcaatatgttttaaagttatttataagattccttatttagtggagtactagttgaaaataactaaatacttaacgaaatatatggtgattaagaaaaaagagttgttctagggttcgatgtatgtacttggtaggttatattgctggaaaaatcaataaaaaatgaaaccatccaattataagatcagctaaatttatacatggtgttttactgttttttcagatgtggataactttaaatttatgaaagatacttttctagaaatcaaaattaattaatgttttgttgttgtagatgagatttctttactatgatgtaatgaattaatgaattatatcgttactacctgctaccaccatcattagttttctcgagtatagttttgagatgtacaatagtatagatttttttatttccgaaaaatatatattctcgattactatacaatagaaaattattaataaaaaaacaaagaataagtttaggtagctgtctcataaatcttttaaagcctctgggtgatcagagggagacttatcctccttgtgtacgtcacaaacctagcgacgaccctcttgctctgtgccgcacgttacctctctcagattcctcccaagcaatctcgttttcaaattcttcgtatggtttcgtgagttgtctttgattcctttccgaattcatcgtcgatctcaaagtaaatagtcttgacctagatttattggggtacaaacatatttgttttttgttgataatcacaactttttctggtttttaattaagataatgggatggtttctagttagggtatcgtcagattattgagactatgggatttattaggttaggtagatgtgccctgtgacataacacaaacctatgactgtagaagcttgtttcatgttaattcatataggtgcttaattggttgagtcagttcctgtgctgtgtatattggcaaatttttaactttttttggatctgcaacgtctttgtaatatcaaaatgctgagttattttaatcttaataatgctaattttgcaggttattcctagcttccactgcttaatctgtaccaagaaagatgtcttagttctttgctcaaactcttagatcaagatatggtgaaaaaagaaattaacaaagaaaaagatgagctcaagtaactctaaggccttgaactcaatgagacaaagttgaagaagaataagaagtagtatgaagaagaaattagagaatacagagagtcgacagagtatgaacaagtgaagaaaatcagagaacgaagatacagaagatgagtaagatgaagaagaggttgagtttgaggaagatgttaatgtagaggaccaagcggacaatagaggtgatccctctagggaaaggataatgaacaagaaagataagtttctgcatgagttgtataataaagatcctaaagagatctcatggaactggatcaacaaaatgttcaagatatttgtggctgcccatggcatgaaggggaactacacggtctgaaatggttgattttctggctgtgccatatactagaggtccctaacatggcagcaattctaatgatcccaaacacaaggtgagtagcaagaattttttgtcgtctgctcgaggttagcgagaggcaagcattcacctctcctcctgagaggttgtgtgaccatgtcatgactgcaactcgagcgaatgttttcaaatcacttcatgtgtagagaaaatattgaagaaaagatgttatggttcgttctacttaattgttttgttctttgtaagatattggatcacatttaaggaacacattttggtctgggatctgtttctctaacttttcctaaatactcaatggaccttgtgagagattgttcttacttatggtgtagtatccatattttacatacctcactgaaattataccaaaatagaatctagaaaccaatattatgcttactatatgtagcactaaattctgtgttcatttcaaaagttggagttggatacaaacactagctagcaaggcagagagtccgggagtcgatgagaatggtaattcttttgaccatacaaccaaattgctacatctcgcatggcatccaacagaaaactcgatagcttgcgccgctgccaatagtttgtagtattgtacatgtactatgcttaaagaaaaaataaacaaacatagtactcaaatgaagaagaagctttggcacttgtgaaactgaaggatcagagaatgcttatataacaacatccatcatcagcatcttcatatgacagctaaaaactatgctctcaatttgcatcatccttgacgacttctttttttcttttggggacattcacttagaaaaaattgtttacgaattaattaacaattaggacgataaaattgctatatttaaagctaatgtctttattacgtaacttcaaaaattttgggaaaaatatagagcgacttaatttggtgtctcgtagcattactccaatatgatttggttgtggaaatatgcttaagggaccacattgaatctaagccgtccatgcgtcgaaacgcagccacaaatcgtagccgtagaaatgacgcgatgatgggaattgagaaagggaagtggagtgttagtcccacgtgttggaggaaacagaacacacgcacgccaaatggtcagctcttacggcatcttaacgctacgacaatatccttaatctgtttccatcgacacacgcacggttctgattcattctcaattctcaacggctacgattcgaatattctgaggtgtaatgatctatctcatcgagtgcaagcatacatacttgcttcacaagaacgctaactactatttgtctacttattcttgagccagagtgggtttttgaaatgatggactcatatatgacttaaaacaaagaagatattttcaatcttttttagctagctaattataatactatatgcttatttactccaaattaaaaaatgtataaagactaatcaattacttataattttctttaatttatgatttctacgtgtagggcttgtgcatggataagaagactcatgggaaatgggcgggacttgggagagaacaactcttttctgacgtttccgttgtcttttgtttgatgtcttctttggttaggtttaattaagaattctttttttgtcggcatgtctgattaagaattaaaatgagaattctcttataagcaaaatatttttagcaaaaattttagtctttgttaatatagtgagaatgtggtaaagacgtaaactcgctcccctcggtttaattccgcttgcacaactttattgctatctatctactcaattgactaccatatccgattctaatagaaaaaccctttgaccaaccaaaattttgatttcttatagatttatcagcttaccaaaatgatcaattttctgcagattaagaccacaaaaacaacaaaaaaaaattttagctagaggagacttttgctcttgaaaagaaaaaggtaattgtgtttgtttccggggtaaagtaaagtacaaataagtagaaaacaaaaagatacgtagaatcgatatttgtctaaacataagaagccaaacaaaccatcttggcacaaagacaggcgtatccaaatatgttggaaaaagttatcactctcgatttattcaaactttttaaccattcatgtaatgcttacaacttcgatttttctagatttgtaaaagctaatcgatcttgtttactccacaattcttctcattagacatataaaagtaaaaataacttccgtttcgaaatctctttatataataatactcgttccgacaaaaatgacatcaaacaaaacaactctatgatagtattagttaaagaagtcaacaagtgaattgaaaaagttcaacaccactctcttgtcttctaattaaataactaatacaaaattattaataattagtatagataattaataaaaaagaagaagaaagattacgtaagagagcattaatctcgtaaaatttgggttgccctataagactggtcacaccacagctcacacacaagcttgtcttgtcatttagaatttaacccaacactctcttcttcttcttcctcttcctctcttctctctcaaatctagaaagagaaaaagtcttaaatttgtctcatttatgcgataagaaccacaattcctctatcaaaatctctctctctgacatacccagttggaaaaattcaatcttttatccctaagattcgatctttcttcttgggaagttgataaatgttcaaggaaacataaaaaagagaagatttttgaataaaggttgaagaaaaatgcaggatccagcagcatattaccagacgatgatggcgaagcaacaacaacaacaacaaccacagtttgcagagcaagaacagttaaagtgtcctcgttgtgactcaccaaacactaaattctgttactacaacaactacaatctctcacagcctcgtcacttttgcaaaagctgtcgtcgttactggactaaaggcggcgctctccgtaacgttcccgtcggtggtggttctcgtaagaacgcaaccaaacgatccacttcttcttcttcttctgcttcctctccttccaacagtagccaaaacaagaagacgaaaaacccggatccggatcctgatccacgtaattctcaaaaaccggatttggatccgacccggatgctttacgggtttccgatcggtgaccaagacgtgaagggtatggagattggtggaagctttagctcgttgttggcgaataatatgcagcttggtcttggaggaggagggatcatgcttgacgggtcgggttgggatcatccgggtatgggtttgggtttgaggagaaccgaaccgggtaataataataataacccatggaccgatctggctatgaacagagcggagaaaaactgaagaagaaaagaagagaggggtattttggtaaattatagcaaactgattttgggtgacttgagccatcacgtagacactgaacagtttcgatcatgtttatgtcattttggtaatattattattattcctcctcctactttatttctatttatataatcggttttgtcgtaattttaatcctgtgtaatagaaagaaatttctcagtttattttgtgcattctgatttgatgaaattttatgttttatgttttttcctttttaagtatttttagaatgttagtagaatactagaaaaagacttgtagtaaagtattttagactgttttgtatttatgtatttattaatttcctcatccacaaaattcatgacgtagtaaaatggaaattttggccgtatttgatatttaaagtcgaaccgtgaggtattccgccgacgataggaggtttgaaaactatatttaaatggaaattttatagatattgcgtagagtaggtttgtataatcgtataaaaggataaattatttgtgcatgaaccgacatagatcaacaacattcttatggcatgtgacattcgtattttagttatagaattactctaaaccctaggttctagaaccatgatattgactccctacaagtagtcgtcggtttttttctttgggtttaaatgttcgatggcgtacttatgtcataattttatatagtgatgaaaaggtttaaatttcattgtcaattatttagacgaagaagacaaaagtataagtcgttaaagaaacaacaaaatttattacatataagagaaaaagtagtttcatcatactatactatttaattataatactttgttttggttccatttttctatttgtatcgttctagatttgttggatgtatattttatccttaagtacttatatacgtgtgtatattttgtattcttaatttactcgtttagaataattagttgttacgtgcaaaaggacttgaaactaagttgttgttattccctatctaatagttgaagttgtacgcacgagttttcttcagccgagaaaacaccacaccaacagtctacattatatatgtatatactagctatttttttccctctcatatcggtttgatctttatgtacagcatcttatctattcctacaaaataagtttgtttacctcaacatatataccataaagattttgggtttagtggttcgataatattgttgtggaaatggaaagatagagatatacgagagatccaatgtggtaattaacaaaatttagatcttccaatttgagatacttgtattgcaccggggagacaaagaacaacaagttgcatccctttttggtgtatttattttcatttcccttgccttgttttggagataaaatttggttcacaattttgggtttttcttaaattgtgagtggaatgcaccaaaggcgtgatttgcatgcaatgtccaatcaaactctaagagatcaaaatgcaccaaggcatgttttgcggaccatgtccaatcaaactctaaggttttaaaaattttaggcgctgattaatcaaagcaattcacatccgactaatatcaaatactcaattaattaaatataaagttattaattctcttaataaataaatagaaaagtatatgtcaaatgagaaaagtccaattctatttcaaatattagtctagtgcatatatgtaataatggatatagatagctctacccataccatgaaaatcaagttttgaaaataaattatttgcatgtaaacaagttaattaaaaaaaaaagtcaaaataaaaggtggctggcaaattaaatggtggtccatgtggctagagatactagatagcgctaagataccgaattttaataatggtccacttcttagagactaattagaggaaataaattgaaatgaagaatcaatattggtttaaagttgaattgacagtgtttaactaattgtgttaagcaatcatctctgaaatttcctcttgtgatggcctcactgttttcataactttgatgactttttttggtaatggtccactcttgttacttattacatataaccaatttccacatgtcttgtgggggctgtttttgctcatttcatgttttgcctattgtccaattctgatttttgattgatatttaacaaattaaccagaaaattacaaagataaattagttttgattaatccatatgtgtgaagcctcgacaaataataacacatttttgggaaaagttgatgtctttaaactgttgtttgttgaccttgatccgtgattgataaattgctacaactgaaacgagtactattcatctcactgttgtacatgtgacatctcaatcaatccagattttttcttatgatctctttgataaacttataacatatctattggtggattcacgatatccagattgggacctctacaaaaacacacttttttctttatagttttctgatttataacattttaatgacaacaacaaaaaataatatggaaattctataaagaggagcatgaagaactgagaaaagattaaacgatctaaatgtttcaagaactgagaaaataaaaaaggagagattcgattacatggagatgagacgggccttgtacattacgatgtatgccatatgccaatcacctcctccagagagtttaatgatatcttctccccgttgaagactagtgttggcatcgtcgtattgaacccacttacctgtaaaacatgagttcccaagttttaaatgagacaaatgtgtggggttttagagctacaataagtcgtttggttgggtttttaatggaactgaccactctcttgcttgacccatgcaacataatgcccagagtctgcgcttctgcctttgtgggtcaacaccgataccaggtcataaattccggtcatgtgaggcgaagcacctgttgcaaaggtctggagtaaggatatagaaactaaatactaaaattgatcgagaaaaagactccatgggctaaaagacatcaacgaatctgttagccaaaggcgacaaatatccaggttctcgagcttactaccattgattatcgctttatttgcaagtagccatctctctactatttttctaaatactcacattgggaaaactttgaacattacatataaccaaattttgaatccaacatatagaccaattacagtgcgttccaagctagacaagaaagatgttgagaaccggttcttagagaatataccttcctgttggtcaccagttgatgattcgccactttggtttgatgatccctggagagagatattgagtaaggatcttagaatattgtattgagcgcagtgttaataagaacacatattttgtacctcagcatcagtcattttcacatcatcaccctttgagctgctctttgcactggcttgcagaccaagcttttgaccttcaatatctctcagtttctgaaataaatagctgtcagttgatatggtcaaccacctaaagatgataagaccaaaaaagtagatggttgtgtatacctgtcgaggagcttccagtttctttcgaagatcctcagaacaaaggtcatatatatccaactccaacggataatccactttcttcaaatatcaacaagatggagactatcataacaatgttgtgcatgtaagttctctttaaaatacaaaacaaaatgctaccatacccggagaatttttgctttctgattactctcccgtttccagaagaatctcacaaactgaacagtcaagtaccttcaagataagcaagaaaagttaaaaaaacttaaaaagtatcattaaatcattaacatgttggttagaaagcctgtaacaagaggattgcaaggaaccaaggactgtagtacagggcacaaattataaacagagactaatcaccttggcaatgaatctataagagactcctttacgtaaaccgctgtacgacccagagaaggagatgttttttcaagttctcctttcagtccctacagcaagccagaagaattgtaactctttatataaattgtctgagatatagcgctacatgaaacatctaacaaagttggccataagtttctaatttctatgcatgcactattcagagacaaatatcaaacatttataacatacaattacaaggttgtatgataaattaaaaaccaagatgatgcaccataagtatgggacttctttttctcaaggagaaaaaatatatgtctgagtaagaacttaggaggatcttccacataatcatgttatatctcacaataaaccgaaacaaaatcttcagtggattgatatagttactcacatgttttaatccttcatgcaagtggttcacctcatgtgatatgtgacatttcagagaaaagacagattctgtctctgagctttcttcgctactttcttggcaatgcaaccttcagcaatagaaatggattggagacacaaaatcaaaaatgaaagatctaaaaaaaaaatagcatacaagagggcatttgtatgaaatttgtgttgtgacctgtttagaaggttgagaccaaaaagagccttcacagcatcaggatcttcactaggcgatggcagttttagggactgggaaagagtgtacaacatttgtgtccaacattcttcagcatcctgttacacatttaaaaggtttctggattcaaaaactggaaggttaaaaccataatgcaactgagttggcagaaagcaacaaacctgttgcatgtgatttccgttatgcaactgagcaaactgaggatattttttttgtaacacctgcatcaagaacaaaagttggtataagacatgagagagaactttatactcccaaatcttataatgagaagtttggaaattaacgatgagaactaacaagtataagtaaaagaagcaaaaaaatattattaagcattatgtgaacaaaaactaaccatccagaacggcataggcgcaacagccttgacacttttatcaagctcactaaataactcacgtgttgcaacagtgagcatgtgagaagtctgatccacatccttggttcgagcagattggtaactgtgggaaaagatcaagaatcagcttttggttataagagagagcgacagtacatagcatcagtgagatatatgagtttttagttaaaacggaacattaaaagatactcacttggataattcagatttcaactctgggacagatattaaacactgcatcgttgagttcatgtaacaggtgtttccaagattgactaggccagcactgtagccctgaaaccaattcgtaatattcgttagtacataagaagccaacataaaagattaaaacaagccaccactatttttcacaatttctagaagaaaactatgcttttcttttccccttaaactgtcatgatgaaggtggcctgtttcgggtccaagcaccgtacaacttatcaccgactaccaaaccacaggaaacatacaaacggtcctaaattcagaagaaagaataaccagattagcagcctgctgttcttcaggaagatcctccataaaaacaggacccttctctggagccttcactatttcatctgcagttcccatcatcatcaatttttgaccctagagtgaagaaaacatgaaaagttcataactatgcacctcaaaagagtataaaaccataatcaatacagggaaacattgccaacgaatccgaaagaatttacatttttcagtcccaacgtagaccaatctgcatcatcctgcgaaaattaaaagaaacctatcgtaaatcatcatcaacaaacaaatagaggaacacagcagtaaaactacaaacacgcagcaggcaagtgaatccaaattaccttcaaaaggccacctttgaccatgatcttttgccgctcaggcggaactccactcaaatcatacaactgagccttgaaaacaaaaggaggctggctagtatcaatctcgatactctcaaacaccttcttttgccacttcacgctcactgtacataaacaaaaacacaattcagaacaatgtcacattcccattcaagctcataataaatcatatcaagtaagacatatttcagaatataagacacctagatacagtaactactcagcacaacaagaacagtcatttatactataccgggttactctcagattaccaaattcaaatgctgaaaccatcgattccttaaatcagcagtggaacaacaaaagtaataacaaatacatcgagtaacgaagaaaatcgaacaagtttcacctgttaacattgtttgatgctgaagagaaacgagattgatttctttcttgaagccaaggcaagctatatcaaaaaaaaaaaacttgccttcttcttctttcttcgtctctatatatgccagtatccgaaccgggtgggtcgatccgggttgattcgggtcgggtttgatcaccatcttgcttcagaaagacaacagacctaaaacccaatacggcagcgttttgctgacataaaaataaatctaaaattaaaggaaaaaaaaagaagaggaagaagaagaagaacagaagcgctctttgggtccctctctctctctctctttcttcaaatcatcgtctctcgtctctcttctctgctcgcgcgtctcaatcagttcaatctctacaatacacgtatgcatcaatacatgttggtaacgcaattgcagtgacggcggagtaattttgaccggaattatgttcaaaggatcgtcgaaacgtggcggtagaggaggaagtggtggtgggggcagtggaccttcccgtaaccgtaattcattccctcctcctacaaaccgacatccttctcccatcgggaggatgtcttctggtggtggtggtggtggctccgccgctccacgccagcggagtaattctactagcgttaaggcggctgcgtcgactacggtgtcgtcgcggacggttgaggaaacgtttaatcttgttccgagggagagttcttcggcttttggaatgattataaggttatctcctgatttggtggatgagatcaagcgtgtggaggcacaaggtggagctgccaagatcaagttcgatgcgtttcctaacaatagcactgagaatgtgagtttctactgaattctaaaatctagagatagaggatttctctagattgagttgaattgcttcaagctagttgctcttttttgttggctgaatcttgaatttgcttcctttggtagtttatacccctcgaacatattggcaattcactggaatcaaggtaccctagataagtgaaattggggacaattgttcctatagaaattagatggtaatgtgatattggacaagaacccaatagtgtttggcatctctatagctgttcctatcctgtggaaaaccttttacgccattctaaattatagccctggagaagattatttgttgcatagaattgttgatgaagattccgttgctacttgggtgactattgtatcataaattccttggccaattctttgtagacgttgacttgcttattggttgagcatgtattgtatggtatgttggtttactcattgaattgctgctttggtgtctctttactctactggtaactttgtttctttgtataactgtggttttgccggtagtactggttgtcaattgaatttatcaacgcccttctgcatttcttttggtcatttgtctcccactgcatctgggttttgttgttactatgcctttccttcaggtatccttttgggtttttatttagttttttttgaattttgacaccgtgaagctgttttggatcttgatataaacagataattaatgttggtggaaaggagttcaaatttacttggtctggggagaaaggtgagttatgtgatatatatgaagaacatcaaagtggtgaagatggaaatggtttgctgattgaggctggatgtgcttggcgaaaattgaacgtcctacgaactctagatgagtcaaccacaagccatatgaagatgcgctcagttgaagctgaacagagaaccaaatcacgcaagtacaagttctaaccaaacatttttgttgcatctcaatgtctataactttttatctgcatagcctgtcctttagctgcaaaggtgtctgctctcttagtttttctggttttgcagtcttctataggtagggtagtctttttatgggtcttggcacagtagcatataaggatataacctttggtggagttgtgaacaaactatcggtatacgcattgttcatcttattgcagctaagctgctgtggatgtcagtctctacttacatttggagttagttatggcttaaatgggtttctcttttagcttactcatattttttcaacttgaggtattttgagctgtttcgtgaaagccagactcacagaaaatttctcactgtgtgtaacaaattgcatacttttgtgtccataactttagtctaatcaaagtggttgtgcctgaaatacccttatacttttgcttttgtcagggccattgttttagatcctgggaatccatcagtaacgaagcagttagctcatgctgaaggtaacatttctccttttcttttcaatgcggcggtttaagaacatgagagtagatagccattcttgtttgaaactgaaacccatgcgcttaattttactatgtggcaggttttcttatcttttgggttcaaaactttttattatctagcatgtgattatatttgggtataccaataatattgtaacatctaccatgtactttcaggaagtccatggagaatgtcaaataaacagaagaaggaacctccacctaagaagcggaaagttgatccaccaccaggtatatataaacaaactttgcaacgagcctgtggtaacacattagggtttcaaatactgttggatgctatttatattcccttgctgtttttctaatgctacagtttttcacttgtggtactgtgacagttccagtcggaggtccaaagccttctttcagaccaggggcttctacccctactatgaaaaataggctatcagcttcacccggaccgtctcctagtaatcaatacaatacccctccatatgggattgggaatatggctaaaactcatgcagctaacgagaatgtcacaccagtccagacaaagggcagagtgaacatgatcgaaaaagaaccatcagcctggaaaaataatgtattaagggacacatctgggcgcgaagcaattaatgttaataaagaaattgacttgcagtcactgctcgttgatatcctaaaagaggctccaatgagcttgaaggtaatacattgatgaaacaccagatttatggctattttcgaatccaatatgtgtttcctccgcgattaacgccactctctccatttctctctaggctttagagaaagctgttggagataaagttcctaatcccgcaaagaagattgaaccaattttgaaaagggtaagtcttgaaaagattggtgtttttctttctttggtatgtattattgtgtccctaattgttgttgataaccagatcgcaaatttccaagctccaaggtatttcttaaaaccagaagcagagttggaaagctataaaaaacattcacctgatagcggaaggtacgtgtactgtagatgatagttttgaattttccctgcagaatatgacactctaaattctagaaagtagaatcggcatattcgcataaataaaacgtatttacaaaattaagtaggtgcatgaggataaaatctaaagaataatacgaagcaacattgcttcttttagtgtagcttgaactctaattgaataattttattatccaatttagtatggagtgaactcgagaagctataaactacaacatatgcatcttctatacttctactgtgtcgtcttcccctttttgctgtatctgttcttagtagaatttttatttttcagttcacctgaacaccaacaattgctgccagtcactgagtgcagtcgcgatcagttacctgttccaggaagaaataacacagagaaattttctttgtgcgagcagaacggagaaggttcactagactgtttacctgtgcatctagtagagcaactgagtacgcaggaaaatgttgacattgagcatcattcacctggtatttttcatgaggaaaaacgatctgagaatagagaagcccaggctcgtagctctagtgatagtgacagtgatagtgataacagtgacagtgggagtgacagtaaaagtgcagctggaagtgacagtgggagcagcagtgatagtgaggcttcttctaacagtaaggacggttctgatgaggacgtggatatcatgagtgatggtgacagagagcctctactgacaacacagtcccttgaacaggatgcaattgatctcccaggtcatggttctagtgcagttgaaatcgagggtcataattctgatgctgttgacattgacggtcatgattctgatgcagttgatattgatggtcatgggtctgatacagttgatgtcgaggggaacagttcagatgagggtcatggttctgacgctgacagaaaaaaaaattctgataataactggaaaatggaaacaacaactggtaccagtcccactgcaaatggagaagttggcatttcagggcaggaacattttacttctggtcacgacaacctacgagaacgccaaaattttattggacagttgtttgatgacacagagaatacaacaaagaataactttaaaaatgacaaacgtgacatctccgagaggctggggaaagaccagaaccaaaaagcccttgattttgagcactacagtcagaaatcagcacatgagaaaaatagaaaatcccagagctgcaatcagttatctgccgtaagtaaagattcacagcattcagagctcaagtatgatgccgaacttcgcaacgcttctgccagtcaaacgatcgatccacttagaggacttctgaagtcatctattgaaaagtcgaatagacatggtaaatcaaacaaacattctgatgccttaggaaatgttcgtaaatctgacaaaggggaccattttccacttgaaatgctttctagtcgctcaggaaaggccttcagggacaatcagagagatgatgttcatttgaaaaataagtttccaaggaataaaaaagatggtgagtcagccattcgaccttcattacctaccgagacatccgatagaaagcccgatgaactggatggaagtgacaaggatcccaagaatgtttcaggcttgagcataggttcttctcccttagatagccagagaacatatttggcgaaattacctaagggaaatggacctgtcctccaaaaacaagtttcggaattggagttgggtgaactccctgagccattgggtgaagatacagcattgaagccgatcgaagagaaaacttcgtttaggcagtcaaatttaaaaccaagcacttcagagaaattgggtattgactcggataaacgaaggtctaaaaaatctgactcaaaaaaggcagctcctccacatacagtaaatggtagcaacgaacacgttgttgaagattcagaaagatcccaaaagtgggctttgcagtcacatgggcagaaccttacaggtacagatactgaaatcagctcacagaataaaaatttagaagatgcagcttataaatctagacaaaaagatagtagagcaagagtagggaacagtgtggaaggttatggagaaacaaacaaaaaaacgcctgttgtaaagcatggctccaaacgagcatccacatcccgctcttcaagggagagcaaaagacattcgtctgtctcaaattcaatcaatggacacaaagatgcaacttcaataccaggtggcagtgttgtccgggagaaacaaatgacatctttcggtgaagaagactcttcttatttgaaatacgagaaagcttctcctgagcttaagggacctattagtgatcatttgcagtgagtaaaatgaaacttcaatgtttggagttataaagtatttctgttttgagtagataacaatggttttgtttttctatttcaggtataaagcctatatgcaggagtataatgataaatatgatagctaccactccattaacaagatattagagagccacaggtagctagatgaacactcagatcatttgtgttgtcctagattgtcagcttttttgaactttatgtttaccattattcgcagaaatgactttcaaaagttggggcaagaccttgggtttgcaaaaggaagggatgtggagagatataacaaaattgtggagcagataaaggaatcttattgcaaatatggggaggtaatcttctatctataaccacttcatagttatttgtctcttatattttgtattaccaaaatatgaaacttttgtaatatatcgttgaagatagaactcaacttatataccgaagttttctttgcatcagatgatttttagcgtcgtataaaaatttggaatgataaatttgtttgcttgtgtatgatttgagaaaatttgaaagacatgaggagctgaatattatcctattaaggtaataggttaaattggatttgggtgagaaattgttacctagattgatcttcatgagaagaagtgactatattatattgaaagggaatctctcagcttatgtgcattttatttacggatccgattatgtgagttttttttacgatacttgctgttgactcatacttaagcatttttccccctatttgattgtacactatgatacttgatgatggctttcttatatatgttatctctcactcaatctgcagagacacaaacgtttgaagaaagtatttgttgttctccacgaagaattgaaggtgagttacaaaactcccctataaaccgtagtgttggttgttcatctcccacatgcattcttactttagatgtaccgtgcatcttcatggatggatactaatgaattatgataacctcttgcagcacctgaaacaaagaatgagagactacgcatcatctcatggaaaagattgatggaaactggaaccaaaactctcctttggtggagtcatcttgttgaaacattagctctgtttttctttctttcttgtgaaattagaaatgattcataggcccaattttgtgtgagttgtacttaggaggacctttggtagattttattcttgttgcagttggtttagttggagcgctcgataaacgaatatgtacatacatgggtatcaagatcaatgtagattcttctggctctgctttaatttaactttgataagtcatcatggcattttggtcttccatgtgaagcttaacagagaaagcttaatgggtctgattggtggtgacctaaaccattaaggatgattgtacgtactaccattttctgacagcgccaccgccacggttgcataaatcgaaatcactgttgtagtcttgtagaaggtgaaaaaaaaaagtaacctaaaggaaaatctaaaacgcagtcgttttgttttcttagtttggtatcaaaaactctgaaatcaaaagaaagaagaaaaaaaagtctctgttttttctctcttccctgtttttctgtgtctttctcctccgtgttccgtcgtcttctctctctgcgttccttcttgaagccggaggaagcccaaaacccttggaataaaaaacaacggcctctctgctactgattgatagaaaacaaaaatctcaaacctagagaagaaagcgacgtactgtatattctcaagactaactggatctctcgttgatcttcaataaaccctttttgcaatcagtctcataagagtctacaactcgtgggcttctatttttcttgttggggtttcaacgttttcctctgtgaagaaagagattgactttcatggagatgaacctctgctggaatttgtagattcaattagggtgttttctgggttttgtggtgcttcgataggggtttttggtgcgttggtggtgggtgatgggtagtagtgatgagcgaaactgtaaggcgattgatgcgtcggtaggaggtttggtttgggtccgacgtcgtaacggggcttggtggccgggtcggattatggctcatcacgaggttcctgacggtactattgtttctcctaaatctggtactcctattaagcttctaggtcgtgacgatgctagcgtgtgagtactttcttccatcaatttgactgatcgattcaatctctttttgcatcttgttttgatgcttagcttttttaatcattgtcaatatgatctttgctttatgaatgattagacaaggtttctgttactctttttgatctctctaacaacttattaactagttacacatttgtctctccagggattggtataatcttgaaaagtccaagagagtgaaggcgtttcgttgtggggagtatgatgcttgtattgcgacggcaaaggctactgcatcgactactggtaagaaggctgtcaagtatgcccgtagagaagatgctattgctcatgctcttgagattgagaatgcacaccttgccaaagatcaccctccgtgtattgagaaggctagtacatctggtgaagtttccagaaagggtattgaggactcgggtgatgtggcagagactgaagttgcattgcaatctactatgtctttgaaaaaaaccaagaacggcaaagcttctaaggtgcagcctttgtcagaaaagagaagaagaacaccaaatgactcggaagatgatgggactcaaacaaacaaacgaatgagaggacttgaggatattggaatgggtactggatcgaaagggaaagtacaggtcggtgcactgctcgaggatacgcaggaaaatggttttaaaagtgatacaaacaacatcaatgattctgtgtcaaatgggagtctttccaatggcagtagcagggattgctctccgtcaatgaaaagaaaaaggtcgcctgtcgtcattgcgaatgactactctaaaaggaaaaaccgacgacggacactgacaaaagtgttagagagtacagctacggtgtctatccctggtacctgtgacaaacttgtcaattctgattgtttgtctcttccaggggtttctgaaagcgataataactcggacagcaatgaggttttctctgagaatgtttctgaaaatattgttgaagtgatcaatgacaaggggaaagagagtgaagtctcgaacatatcagttttggcaaaggatgactcatccaatggattatttgatgttccactaaatggagatgaaaaatacccttcaggtatggctaatccttttttatacaagctctgctgattgaatgatctgttttgaagtgtttctatctttgttcaatggattatctgaggtacatttgcagtgtgtctatgtttgttcacacttctgttacttttagtggaaagagatggatgtcaccatttttaggatgagcggaaacataaaagcacggaaaaatcatcaattggatttgttacatatagattaaagggctaatgtctggaaaatttacccgggatagaatagtagtgactatttgtttgggcaatggatgcctttttttttcttttataattctgtgttcaacttagtgactagtgtatatttgagatgcatccctaattttgacttgtctatggttaattgtttctgttttgttggtcttggcgtaagatggttatcttctatcatttctttctctgcctgttaggattaaacatttgatcaattagatcggatttggtggcttcttttttctgtttgtgattagcatgacttaaactgacgcccattcttgttccaggtatttcgacggtgcctttcacatcttcttcacccaggaaggctcttgtttctggaccgacgagacggtttggtcagagtagccatgatgatgtggtgaaaagcgaaggaagtaatggatctcctagtacaagtccagcagctacacttttcaatgggattaagaagagcacttctaaatggcagctaaaagggaaaaggaattcaaggcagatgagtaaaaaacaagtagaaagaagaaatgcgtacgccgaagaagccaacaacaatgctttacctcattggtctgtctctgatcaaaagccacgcagtcttttcagcgttggcactcaagctatgggaagaaattctgaactgtatgacgtgaagatcgaggtaaaagctaactataaaccccgtaatgttccgctgatttcccttaggagtaaactgaatggtgaagctattgtcgggcatccttcagtggttgaagtgcttgaagatggatcatgtggccacattgtgagtagtcatagaattgatgatgcgaagccaaaaccatcatcaaaaaagaaatccaagaaaaagaaaccacattttcctccacaggcatcaaagtcgaagaaatcttcatctctagcaataaagacaaggtgtctctccgctctaagtggccagaagctgacactaagtagcaagaaaaaggtaatgatagagtcgacgaaagaacgaattgtagcttgcatccctctgaaagtagtcttcagtaggataaacgaagcagtgaagggctcagcgagacaagtgcacagatcattaccatctgcaggtaatacaggatgagatgagtttggtctctgttctatgtcctaccatttgtttcctacgttcatttacctcggttttaagcattcaccgagattaaattagcccggtttttgagggtgatggatggtttccgtacaatacagagagatatataggccttgtgagaaagaacaagagagaagaatatggaagtgaacttgtatctgtaaatattagcaatagcaattagtggtgggacgtgtaatttttaaaaaggaaaaaaaaaactcagattgcatttctaaacttgtcaaactcaaaaggagaagaaactttttagctatatggttttttgtttcctctgtttcatgaaacaatttgtgctttgtgatccaattcatgtttcttaaggctgattttgcagattgaaaccctctcacaaaggcttgatagaagtaagactaggaaacagaacaaaccaaactcggtccaaatggtacagatcaaagaaaagtcaaatgacacaagttttaattgaaaagagaatgaaaacaaagataccatttacgaagaaaagagaagagaagaatatgcgttgacaaagtcaaacgtcaacgaaaccaacatgcttaggttgcacgtcttttaccctaactaacatgaagtctaataacttgtaagactcgctttcttttgtctgcgtctgtctctattaaaagtctctttctaactcatactttacaaaacttgggagatctttttgacatgtctgtaaagaaacgggctttggagagcaagaacaatggaagccccaagtcgagtcattataatcgatgcttgtcattctcgttcttggagtcatcaacgggagagaagaagaaaccatcatcgttgaaccgtatggattccaaaatactcaaggcagagatcgttaagtgggcaaagcgtgtcgcggcttatgctcgtcaacttagctcgagaaaacaagattaagacatagatgaagaaagcttatgggaagattgatatgcactcattttacattgatttaggtccacattcgtttaatcattcatagtgaaattgtcttatttcaaaagatgttgagaagtcatgaaacttgtacaagcagatccatttagtgattgtttttaataaaattctcttatcaggatcttaactcttaaagaccacttgccttggtgggattttaactttttaaaaaacgtttacattcttgtctatgaatgctattaaagaactcgatgaaaaagattacagatacttaactctaatggaaaaccaaaactccctcaatctaaaaaaatctctgttttcatttgtctctcatctgattagagaccaaatgaagcagccatggtgacaatagagctcaagcaagctctaacaagcagacacattcgatgtgaggagtgtgagggaacatatccactggctgaacactcatcagtttgtagcaaccttttagattcttctcctcctacgttttccaaatcaccaagttttgttgattactttcacaaatgagttaaagagaaaagattcaagtgggggataagattagatactaaccacgccgtgacagaggtaatcgagatccctggcgcaggttgcaggattacaggaaacataaatgatccgtggagatttaagctttagcagaaacttgatcaacttcatgtgcataccaggtcgattgggatctgtaaaaacacttcttacgattggtagactgcaaagtattagaacctagatgaaatttaactatgtgaagaagatgattataaccagaaataacgatatcaggcttagggaaattgttcccaaaatcttctcctattttgtttagatccccttggatgaatgttgcattctctatgccgtttatttgggcattcttgtgtgcatctgttattgcttgtggtactacttcataaccatacacgtgtttcgccctagagggagaagaatcagactgaacaatcagcaactgcaattttatttttaatctttgacagtactttacgctcatgttgtttaccttctggcaagtgtaaggcctatggtaccagttccacagaaaagatcgagcacgacttctgagccatctcctttaagtccagcagattcctcaataagcttatataaaacttcagcctacacagtgaacaccattttattttcaacaagttgtgattaatgttttgagtgtaaaagaaaccatgttgcttagtggtaccatatacctgatgagtgttagtctgaaagaaagagttggctgaaatttgaaatgtaagccctcttaagacctctgtgattgtatccttcccataaagagtatattccttttcgccaacggatgtgtttcctaccgaagaatttacattattcataatgcttacctgtatttgtatgagccaagtaaaaaagtatggaaattgttaaattacaaaccaagaaaaatgctactcaattacgggttgtaggaatgaagcaaatcggattcagtactaaccacttgaggaattgatgaaatcctatcaaccaggggtttcaacagctctggcttataagacgatgtcacaaaattgaccataagttctagtgaaccagtctccacattcctatggtcaagtttaatcacaagaaaacatcagaaaaactagtgcaatgaaagaactatcgaatagcacagatttaactatcatttttcactcccatcaattctagttcatcatgacaaacacactattccctgttactggtcttatgttacaagaacaagtttcttattctaccgacaatatgattcaagtacctttaataccttccagttctcagcatcaaatgtttaagaaacccaacatgtgaacgacaatcatatggtgaaagacttaattcaggatctctccagcaatcttggacagcagcaagaacctattttgatttataaaaaaaagttattaatgattctgagaggagagctctacacagatcaaaattctgtataactactttcaccataccaagtttcctggctcgctctgtaataagcacttatcaacatttaaaaccttatcaaaaaatccaggtgcatggagccccaatgcaaagttcttaggaccatcttgtctctcgtttaacatttcaatcggaagccatctttgtggaccaaatgaaaactccatctaattcaaaatgtcaacatttataagcacagagtctaaaaccaaagcaccaaccaataagcacaacaatcaaacaaaccttattccgataatggaattgaatatcgcaagcaacaataggcttcaagacaatctcaaggccaggattgttatcagaaaaccttccaacatgtctgataagctcatgaacttgctcttctttagctctaagctgagcttcataagagagattctgagttttgcaaccaccacagtaagatgcatactcacatggagcttctactaagtccttatgtggagatattgtcttcatttttgtcacctaagagaaacaaccaaaaaacaacaaatcaaaactaaaaatcgtaactttataactaaaaatcgtaattagaagataaaggtgaagtttttatgaaacctacttcagcatagctgcctttgcggcgagtgacacggccaagaaaacgttcgccgggaagagctcggtcacacataacgacgtagccagttccatcaactttacagattcctttgcctttgaatcctaaactctcgcacacaagctccactgtttctcctcgtttcggataatacggcgccgttttctcattgcttacgttggtgttgttctcgtcgttgagcttcttctgggctttattaccgcccgagaattcagaaggggagagaggagcgagagaagacgagcagcatcgaaacctatgaagccatgagcgtgtgggcaccaccacgtacctgagtccatgagcaggcgtcgcggccaacattgaaacggagcccgagtcgggtgctaatttctgaatctgttgataagagagaacagtgtgaatagatttcaaaacgacatcgtgtttgcgtcgacctatcttcttcgtcttgtatagcttaaacccctaatcatatactaaacccacaacgacagcgttttgagagttgctactgaatgctgattagtcagggctcggtatacgggtatccgttcggggttttcggatttaggctcttagagcccattcggatatttataatgtttgggtggagttcagtttggttcctaggttcgattcggatcgggtttacctttcgaattcaggtttttgggtttggttcggatccgaaactactggagaaaacttccaacaaatgagcagcctgagacactcaattttttttctacttgctcttttatcttttgtggattaagtaatctttggaatagaatagaatcgtacttgactatagaacaattcttgcaatttttcactttgaaagctttgttcccactacaagattttgaaccaaaacaactttcatattccaacaatttcggtatgcctcttttacttttacttttgatatcaactatgaaatcagatttttgattttgttttttatgcaaattaataattctgaattcttttagtggcaaagtactgattatcaacttgataatataacttgttagttgttagaaaaatatttcttagcaaacaaaaacaaagttgtacaaagttgttgaaacagatttaaccaaactggagaattatataaacattgaaaaaattaaagacatcaaacccaaaacccacattaattacatgaagcgtgtgtttccgaatagtttatttaatactacagtacatcgtaatcaaaccgtaatacgttttgtctaaattgtaataaaacgtattaagaccgtcagttacaaaagagaccaacagatacaaatgtcctaactagggtttaatgctttattgtgagtttctttacatttaagctctctgtttccaaaagtagataccaaaatcagattagagtttcagagacatctctcgaatacgatcatcagacaagacttaacctccatttgcacgtcttcctgctcacgacagacaaatcatgaacgaatccgacagctgaacgaattgcgtgtctgagaagatccaaatcctaattttctaccttttttttttgggtaaagtttccattcaaagtttcaatctttcttttctttctccaatcaaattcgtcattctttgtctctgttcttctaaaacgacaggaactaaggttagaatttggagcttctcgtacgtttttgcttgcctacgtttccggacaaaaccctatttggtaaatcctcattcttgtctgattggttgagggtagacaatctactgagatttgtgaatgttttaggatagacaatctaattgtgtttctcttcttatgtaagtagcatataaacagaacaggttctgttcatcaagacactgaagcctgatggggatggaggaagggattaaagataatgctgcatcagctcccaattcaagacctacaaaccaacttaaagctcttttaccgatgcgggtgcttcaagttttcttgttgttctttgttttggttcttggaatctcagtcattagtatgcacatgatcaagtacttaaagattcaaactttagctccatcgacattgatctctacttatgatgagagaattacgttagagagccttatcaagcctccattgaatggttggcattccatgaatgacagtgagcttctttggcgtgcttcgatggagcctcggatacttgactatccatttaaaagagttcctaaaatggcattcatgtttctcaccaaaggacctttgccatttgctccactttgggaaaggtttttcaaagggcatgagggcttttactcaatctatgttcatactttgccaaattatagatcagatttcccaagctcatctgtgttttacagaagacagatcccaagtcaggtacttttgttgatcaatgtattaatgttgcttcttgtgtcttgatttggtttatctcacttcggagtttctttatttgtgtgtagcatgtagcttggggagagatgagtatgtgtgatgctgaaaggaggcttttggctaacgcgttgctcgatatctctaacgaatggtttgttttactatctgaagcgtgtattcctcttcgcggtttcaactttgtctaccgttatgtctctagatcaagatatagtttcatgggttctgttgacgaggacgggccttacgggagaggcagatatagctatgcaatgggaccagaagtaagtctaaacgagtggagaaaagggtctcagtggtttgaaataaacagagcacttgctgttgatattgttgaagacatggtttactataacaaattcaaagagttttgtagacctccttgttatgtagatgaacattacttcccaacaatgctctctattggatatccggattttctcgctaatcggacattgacttggacagattggtcaaggggtggtgctcatccagctacttttggcaaggctgatataacagagaagttcatcaagaagctgtcaagaggtaaagcttgcttctacaatgatcagccatctcaagtttgttatctttttgcaagaaagtttgctccaagcgcattgaagcctttacttaaacttgcaccaaaggttcttgggttctaattaatggatctcttgtcttctttttgttcttggtttttgttctgaaatgttcttgaacttgagtgtagcttcgtatagcatggacacaactctgatccttattgtctccttccacattgataatatagatacttcaatggctaaagaactcttcttgttccaatgtttaaactcctcaaaactggaatagaagcacaaaagtctatcttttattagctgtttgtcaatacaagaacaatgtaagatgtgtgtataagtgtgtgtatgtttaatgtatagtgatagtatttgatttacatcttcataagaagagtaaatagaatatactgaaaatctaagctagatgaagaagcaatgagagcaaaagaatgtggaagggtttcaaatataaaagaactaactaatcatatgatctgagtccctcctttcttcctgaatgaaacggaagatccttgcagcagattcagaggcagatgttgaattatgaggaacggctttaatggcgcgaagcatcggttgctgtttctgcttgtactcatcagtttgatgggtaggctctgtaggaaacagaggaagcacttcaagtttatgcttctctggtggacttgaagctgtgcttccatgtatgtcactgtcattagattcctgagacttctttaaagaaaatggaatggcttgtgtcatgtggcttgatgtgttagaccatctttgaaactgaccaaacgggtttgtttggtcaactgttgtcctcgcgttaggaggtgggaagtagctgtggctgaatggagaagaaacagggaacctgaatggtgtctcgagtgaatcttggccataaactggaaccatgaaggctgaagaagaaggaggacatggtcctggaaatggtttatagaccagaccgtctgaatcagttattacaggaactaaccattggtttccaggaggaggaagtagctgttgtggccaaataggagtcacgagttctttgcttatggaaggtagaggaagctttggtttcatatgctctggatattcttcaggtacaggtttgtgattctcagtgtttggctttctaacctttgaagccgccattgcaagctgatgtgatgacctcattgtaccatgtttgacaccattaagcttactttcaagaaacaagtttggcgacttcgcaaccatcttttgaacctgcatcatattaagtaatctgaagcatagaaagcaaaccagaaacaataaggttattaaaagcttaccattatcagtctatggagctcaaatacttgcccggcaaagatcttttgctgactgaaaatatcaacaataaaaaatagtaagaaatacggcaaagttatgaagttgggatcataagaaaagtgagaggaggatacaaacttgatcatatatgttctcatcttccaaaacctcttttcaccaatcactctggcaatatcataagaagatgcacttataccagacaaagactctattgcagagcagtttgaagcaacttgttcacgccgaggcagagttttgggcttcttttgagtttcattgttaaactcagcaaagtttcttctatatgattgagttttcatcacattgggagacccattctggttttcatcttccaaacgttctgacaaaaggatcttagaaccaacaacagcctctcctccgggtttactgctaccgctagtacaaaattggagtgacaaatctgtgtttgcttgtggatctatttctgagtgtataacaataggagacttaatagaatccaagctggtaaggttcttgaggtactcattttgttttattgaactaggcttagtattagtaactgatgatcctttaggacttgtataatttatgccttttttattcagcttcccctcaaactttgtgttgtagattggtgaaaactgattcttttcaggtccatcaatctgttacaaaaaagtattcaacaagtcataaagtgataatctaaatatgcattgtcaccattcttgtatataaatctgcagacacacaaaaccaagaaagttgaatgagtgaattaaaaggactcacgagacgggcattgtttggtggtggaggaagagacaaagagaaagtggaaagagaatcagatatgttgttggtcggagaaggaagattgggacgtttagaagagacgagagacattgttttgccatcaaattgttgagacaggcctcctcttccagtatcattgacatgaacccttggaaacaatggaggaattgttatcctctttgcttcatctttcattcctcccatcttttccctacgctcacaaacaaaccctattaacaattccttcccttacacgtaacctaaagaaatgaaatcagaaccagaaattgttaggtaaccttgcaaaacctagtgccaagatcgaaatctcactttagatcaatcccaaaatccaaaaagattataaactttgtttttgttttacgtagatggagatcaaatccacctgaaagaaacaaattttaagaagaagaagaagaaagcagagaagcaaaagaagatatttttgtgtcgtcccacaatggattccatacgaggggacgacaaaaagcttaggggtgtgtgtgtgtgtgactctgcggtcatgtctggttgcttcaagtaaagatccctatctcacgggaactcggattgtacatgacgtggaaggtattggttggttaggtccgagtggtaggagaatggcgtgaaggtggagatgttcgggtgactcggtcttttacatacacagccacatgtttttgttatctctctcttggctaacttcatcatcatctttcctaaattgggctaatctttagcgaaatatctgtttctgatcacgatcactttacactattgtgggagaaggtgccgtgttcggtcggagtctttcttaccttacgcggtttggtcggaccgaaggatggtttaggacaaaacccataggaaaggaccatggatttccacgtgccgaagcgcgtgaaaggtcgacgtctcgttgtggaatttttaaaattttgacgtgttaagagagcgtgtgcatacgtgggcttgagcccactagtttcatttagtgtgagtctttggggccctttgcaagattttagacatcttacttggagacagtggtgaagcaacgtgaccagtgaccgtgtgagactgtgagtcatctcattgatgacaactgaaaattactttcgtgattaaaggtttttatttatttatttaatgatatgtaatataatgtttgtgaattgtgataatataacattgcttatatttttgtaacaagagaaatgaactaagtcaatagtatacaatgataagtttaattacaacaacttcttgatgagtttgttttgctttgtgataacttctatcattttaagctttttcttctactttgtaaagtattcattagagttgaccgtttaacgcgttcaactagagataaaattacggaagttgttttgtttaaagaatataaaacaaaacttccgaattaggttactaataaaaataacattgcttatatttttgtaacaatagaaattaactaagtcaatagtatacaatgataagtttaattacaacaacttcttgatgagtttgttttactttgtgataacttctatcattttaagctttttattctacctcgtaaattattcattagagttgactgtttaacgcgttcaactatagataaaattacgaaagtttttttgttaaaagaatataaaacaaaacttccgaattaggttactaataaaaataatatgaaattttcttttattaagcaaaattttaaaaaaatatttctgttaatacaatgaaaagatatagtcaaacttaatattgcagatcacgctagcacattgagacttcaaacacaataaataaaaatgtgagaaataaactaaatttagtatgggtttatatactaaaattattttcttaaatttcaattcgtatggatttagaattctgattcttttaaaatgtaacctaaccggatttttgttatagatataatgtggagctacaagcctacacgtatgaaaattttgtatatgaatgtgtttgtcaaggtacaaatatgatcgaagctcgtttccttgtcaacattcatttattcttacaggataatatttaacttcattaacggggtgatgttacaatacacaagaggaaagaaaaaagttaaaaacaaaaacaaaaacgaaaaaaaagttttagatcctctttaaccaaaaaaaaagaaagaaaagaaaagaacttctgtgagtccccacaatatgacgccatgctgatttcccacgtgggactactatcctccaagatcacaaccaattacgaagagccacgtgcttatggagaacgttgtgttcacgtgtgaaccattcaataatggaagggagagagcaagagccaagaagagtgaagaagagtcagatagcttagattactgtacagctccggtctggaccatttaaaccgtaccgagccaaagtatctgaaagagaaagaatgttatcggtttctaaaaatgtcgtcgtcttgctctttaactcctagaaattttgtttcatgttttgttttgacatgtatatgtgataatggaccactttcatctcttaatcatgggtgcagaatcatggacatacccccgacaaatcctttatttctatttatacactataatctctttatgctattcataaagaaacattaagagatc

SEQ ID NO: 448 - DNA, 80818 bp, Arabidopsis thaliana
gatcatttttggtagccaatttggtaaaagggaccagaagtatgattttttttatttttcttttatgtaatctcatgaatgacctgaccacaaatcagatttaggctccgttactgttagaacaggcaaaactttagatgtgagcaagagaattaaatcagagcagaacacaattagacttgtaaaaaatttcctatacaatttggataattgcttactgtctctgtcttattgtactcttgctttatcaggagacacagagtcgttatggaatgttgataaactgagatctgagacttacactcaacacaccctttccggtgctttttcatgtgcaaaggtaaaacagttctttatgcttcctcatgttatggacaataatcactcctgttcataatttctagaaccaaatttcggattgttcttgaaacttttgctctctctctctctcgcagggttttctgctagaacataaacctgaagaagctgctgcagtcatccaaattatctgtcaggtgtgagcaagaacctgttaaatatctttttctttttccaggatcaaagaagtttcttaaataccttgtgtatatcattcacaggcgtatcctgatgagaagaagtcagcacttgaggctgaattcaagaagctggtaaacgagtggtctgttgacattatcaagcaccaaaatgaacaagataagaaggtagaactcactcctctttatgtttacctaaaaccaaaaaagctcgtaacctaaaccatgtctccttaaaaaaacaggacgtagctgcatcactgaaatctgacatccctgcaatggtcaatgctttggtaaactctggtttgagagtaagagtggatttaaatgagttaaacaagaatgaagctcttcttagctgatgattggattgatccattttaccgcaactagaagatcagttcaagacagaaacaaaacatttctgttcagttccgtgcatgctacattagctgtttcctcgttcttttagggtttgtctttaggacactcaaataaccaaatttgaaaagaagaaaaaaacaagaattttgattctcaaagagacctttgtactttgatcaacgaagcaaactctcatttccttgaaagtgtacttttttataagtcaatattattacaagactagcgaagagtgtttctttttttggtcacagtgattgatgaatttggaggaacatttatcgttaggtgagtttcatgtgtcgaatcttataaagaatcatatatctagaggatcaccaatacaagctctggttttgtacggaggaatccgccgcagaggagtgtattttccgggatgggttcctttgattttaagggcatgtgcttgcgttgttccacgtgttgttcttgggaagctgttgcattctgaatcaatcaagttcggtgtttgttctgatgttatggtgggaagctctctgatcagtatgtatgggaaatgtggatgtgtagtttctgcacgtaaggtgtttgacgaaatgcctgagagaaacgtggctacttggaacgctatgattggtgggtatatgagcaatggtgatgcagttttggctagtggattgtttgaagagatatcggtttgtagaaatacggtgacttggatcgagatgattaaagggtatgggaagagaatagagattgagaaagctagagaattgtttgagagaatgcctttcgagttaaagaatgtgaaggcttggtctgtgatgcttggagtttacgttaataatcgaaaaatggaggatgcaaggaagtttttcgaggatataccggagaagaacgcctttgtatggtcattgatgatgtctgggtattttaggataggtgatgtgcatgaagctagagctattttttatcgagtttttgctcgtgatttggtgatttggaacactttgattgctggttatgcacagaatgggtattctgatgatgctattgatgctttctttaatatgcaaggagaagggtatgaaccggatgcggtaacggtttctagtattttatctgcttgtgctcaatctggtcgtcttgatgttggcagagaagttcactctctgattaatcatagaggaattgagcttaaccagtttgtttcaaatgctttgattgatatgtatgcgaaatgtggggatctagagaatgcgacatccgtgtttgagtcgataagtgtgagaagtgtagcatgttgtaactctatgatctcgtgtctagccatacatgggaaaggcaaagaagctttagagatgttcagcacgatggagagcttagatttaaagcctgacgagatcacttttatagcggttctcactgcttgtgtccatggaggctttctaatggaaggtctaaagatattctcggagatgaaaactcaagacgtgaaaccgaatgtaaagcattttggatgtttgatacatctcttgggacgctccgggaaattgaaagaagcttacagattggtaaaagaaatgcatgtgaaaccgaacgatacagtattgggagctttgcttggtgcatgtaaggttcatatggatacagaaatggctgaacaagtgatgaagatcatcgagactgctggaagcatcactaacagttacagcgagaaccatcttgcatcgatatcgaacttgtatgcacacaccgaaagatggcaaacagctgaagcgttgagagtagaaatggagaaaagaggtcttgagaaatccccagggcttagctcactagttttgacctgagtctataccacttagctttatttgaagaagtaaaatacttagtgattatgaaattgcctttataaacagtgtttatacaaaaaatcctaaaatgggatttgatgattgttatctgcttgatattgcaaagtgcagacatattcccattagtggttggagaaaaggcaaaaaaatatggtcatctcaagattcgaacttgttggtacccatttcaacctatacaaattacataccactggaccaaacgcaaacttattaaaagtttcatttctgcttctacctctagttggtatctttttcacggctttgttcatgtggtctccattctagttgtgttctactcttaggtgctatgtccttatataaaatctatgtgttcacaagcgatcatcttggtgtcagtcctgtcaaaattgttgataattttgtggtccacagataaaactaggaataccttactatctagctatatcttaagattttatgatcacaggaataccttactatctagctatatctaggcatatatttcttactagaaccatatttgttaaagaataaatattctttgtttttatatatcatttgttgattttttttaaaaaaaatttaccacatgatccgttagattgatattcactaaataagatgttggagaaaaaattatttctactgaaaagtaaaacaatctatacatttaaattagggtcaatttaacttttaggcacaatttggtaagaatattttttttttgtttgacctataaatagaatagactcgacaatcgatattgtttcgacgacaaaggttttgcactataaacatcaaattcactttggaatgtgtcgttcaacctatcattcctcccattctaggaggtggtatcaacatcgtgattcctccgaatgtagatatagacctgagtgtaactacggtggacaaagaaaacgcgtattgggatttcaacttggtttgataagaccgggaaaaacctttgtcaaagttgttatagaagttggaaaagaagtcattctaaacatacgcacaacgccaaaagacgcacgcttcccgaagacttacaaaaataagccacctacttcgtatcttgtgcttcaaccaaagagatctcaacattatccggatttttggaagataaattggtcaagtactcgtcaccaccccacactggccgcagagacagttctaggtcaagagatactgaagcaacaaatcctcaataggctgaggtatcttacatttaatgctgatggagagttagttggtttgtaataacaaatgttgctctttctcctttaagaaacttaacgtatgtgttgttatcagagtttgtgcttttcaatcagagcaacaaatataaatgtggttccaaggttatacatcgtgattcctccgaatgtagatatagacctgagtgtaactacggtggacaaagaaaacgtgtattgtgacatgtctggtatatgtattgagttagattgatattcattaaataagatgttggagaaaaattatttctactaaaaagtaaaacaatctatacatttaaattagggtcaatttaacttttaggcgcaatttggtaagaataatttttctttgtttgacctataaatagaatagactcgacaatagatattgttccgacgacaaaggttttgcaccataaacatcgaattcagtttggaatgtgtcgctcaacctatcattcctcccattctaggaggtggtatcaacatcgtgattcctccgaatgtagatatagacctgagtgtaactaccgtggacaaagaaaacgcgtagtggtgataatggtgaaatcgtgggaggtgaaagtctttttagttagggtttgttcttgtaaatcgtaaaatgtatgtggaatatgaatttcttatattaattttagagttgcttattgtgatcggtctggtctatgtattgaggtagagtcattatgtgcacttgtcatcatttaaatagtttgattgatgttaacttgtgtgttttgacctgagtatgtacaacttaaaaaaatgatcaaaataaacatgattaagcgagttctatgcttttttatacacaaatatcgataccatgtatattcaaatcaagaaaatattcaaactaactatttgaactacaaatttttagtggaaaaaaatatattgacctaaacggatggatgctggtacaaactaaaataatttattatgacgatgatgttagagtttgttaaacaaaatagttatattgaaggaatgggttttgatcccaataaacaattttaaaaaagaagaaggggcgttccgagaattgaactcgggacctctcgcaccctaagcgagaatcataccactagaccaaacgccctttttgttaaattgttacaacagtaactttatatattatctattgtttatttccctccagatattaggtagttcacgctccccgcgaaccctaacgagaccactttactgtcttttgcgcgcctaaaattccccgtgtcggctttcttcttcttcttcttcttcttcttcttcacttttggatctacattgaaatcgcctctagagaaatcaaacccggcgaattggactatcgttgtcggagtttgtcagtggatgaattgccatggctaaatctaaccaaaacttttctccgtatgaagagacccagccgattgattctaatccaccttcttcttctgattctggtaatttttacacttactaatctcttgtagggtttattcttcatcaaaagctccgatttttgcctctcatcgatctgttatataaaagaaattttgatttttctgagttcttgctctgtaatttgaagattttggaaactaatatgtggtttcttagttactcttctctgtagtttactattacctgacctaatttgttttgaatcttaggcgaggataaagatagcttgcttggggattgtgacacacaacctgttgatgacaatgctttgattaatgatcagtatatggagactcaggtcatggatactgaatgtgataatgaagaatttcttctttgtaatgaaactcaagcagttgatttgggatttgaaaccggagaagaagtacttgtagaggggaaacagttacttgaagcttctgatggtttggctactcaggttttggatctttgtgatgatgaagttgttgtggatagtgatgatgatgttactgatgtgttggagggcaacagtgatctctctgatagtgatgactcgggtagtaaagcggaaactgtgttatctagtgaagagaatagacaggatgctaatgaaaaggttaaatcagcagttgtctttgatgcttggtcgaacgaacatggagtttctggtgagtttcttaccaatattgcagagtttgttaatgaatattgaaattttaagttggctacttaggttcagtatagatttatcggatcacaatgtcttgacctaatcttagttgcttaccagcctataagcatgagagatattcttcgttaatcagttgcttaccagcctctaagtatgtttttgtatatagtttgtaactccattgttaatgttcatgtaatcttttagaagatggagatcttaatctaattaggtagtcatattttcctgtgttctattaacaaaccattggtagttgcagacttgcagttattttaagacaatatctgccttgcattcttttcaagttccctctctcatttgcacttttccaatgacctttttttcttttaccaggaaaaaaggtggctaggttcgcttcagttcgttcagcagcttttcgtgcttctgctgtggcagctcgtgttgcaaaccaaaaatctgccaacactgactgttctacactaatcaactgtcattcttctgggaaaggaaccacacataattctggtctagaaaatagtgttggggaagtagggaatcagcaatctcttaccagtttatttgttgaagagaaaaaggacttaagaacaggaaaaaaaacagcgaggaagcttttcgtagaggatttccctgaagaaaaatttcattctactgattgcaatgtcgatctggggaatttgagttatattggctctcaagaacctggtgaggaatcccaggccagtgctcttaacttggttgataagctcattagtgagtgccgtctagagtttgattttgaagttcaagctgactatggaaggaaaacagaagataaatcaaaatttgttcagatttttaaaggtccacaagaattagcaaagaaggtaagttacaaaagtggagctgttggaaacaatattttcgactgggatgataatcgtgaggatgaaggagggggtgatatctatcgtagaagaaaagatgaattctttggcgttgcaagtaaaagacgggaattttctagcttgcctagagaacagaaaagagaactgataccagttgcagtggataaaagatgggctcgttctgattccaaactgttgaagcatagtgtgactaggagccgaaagaatatccagggtgctaaaaagaatcttggcaaagagttagatgaagttcgtgaagcggcagttttagggaatgatacacaagtggctgctgaagcgattgatgatctgtgctctggagaccgtggcaaatttgatggtgaggcgagttgtcttacaggaaagaaactgtcaccagaagaagagagaggattttctcccggtggagtcgttactagacaatccaagggaactaagaggattcaggctatgagtaaagatgaattgttgaaaaaaagaatgaagaaggctagtcctagtcctgctaaagcttgccggacgaatatcgaaggatcttcaaatggtgaccagcttaataaagaaggtccatgctgctggaagagtaggaaggtccagactgcttcacgagaaactaaaaagaatcttgttgacgagtttgatgaagtttctcaggaaagtaatacagaaatgtttgataggcatgaagaagcagaagcaggccctgatacacaaatggctgctgaagtgatgaatgctctgcactctggggacggcagggaaattgatcctgagccaaataatctaataggtaagaaattgttattggaaggaggcatttctaggtgtggagtcgttaccagaaagtccaagaggatcaaggggattcaggctgtggacaatgatgttgaatcattgaaaccaaaaaacaagaaggctagatcaattcttgctaagtcttttgagaagaatatggataggtattcaaaaaatgacaaagttgatacgccagatgaagctgttgcgtcaaccacagaaaagaggcaaggagaattatcaaacaaacattgtatgtctaagttacttaagcaatcacatagaggtgaagctgaggtgttgaattatcccaagcggagaagatcagctcgtatttcacaagatcaggttaatgaggctgggaggagttcagatcccgcgtttgatactccagctaagtctaagacgccgtcaacaaatgtatcgcctatatgcatgggtgacgagtatcatagactttcttgcaaagattcatttacatcacacactacaagggaatttcgtagcttaaccgtaccagtagcggaacctatctccgagacaaagagtactagaaagagaagagatttgggtagtatatgtgtcttgttcagccagcatcttgatgaagatgtgaccaagcatcagaagaaggtatagttgggtttctaactgtaactttagttaccttcgatcatgtgaccttattccttgctttttcttttacaattggtagtgaattttcagttttgcattaaccaagtcttctagacaaaagtaaacctcttaacaatctggcatatgatatgtttaacagattttggcaaggtttgatatctcggaagcttcctccatgaaggaggcaacacacttcatagctgataactttacgcgcacaaggaacatgctagaggcaatcgcttcaggcaagccagtggtcacaacacaatggcttgaaagcatcgatcaagtaaacatatacgttgatgaggatatgtatatactcagagattcaaagaaggagaaggagttctgtttcaacatgggggtttctttggctcgtgcacgccagtttccgctactacaggtatctaatactcttttggtttcaattctttttttacctcgtttattctcccttttcggctcattatatttacatatttcagggaagaagagtttttatcactccaaatacaaagcctgctttaaacacaatcactactttggttaaagcagttcatggactggtaatcatttcttcacctttttacactttcatgtgcatgttttcaaaactttttctccccgaaactgatccataatgaaaacaaatgccagcctgtagaaagactcggaagatcttccctaagcgaagataaggtcccagagaatcttctggtcttatcatgtgaagaggatcgcgctatctgtataccctttctggaaagaggtgagttttatagtttggtctatataacttctgcttttgtatgtggtagatttcacggggaaatcacagtttttcttttccttcttctcaggggccgaggtatatagctcggagttactactaaatgggatagttacccaaaggcttgagtatgagaggtgggtattgttattagacaataaattcttatatttgtcgaacaaagctttgtctcatctcattcatggcttcttacttgggaatcttgaactgtgttaggtaccgtctcttcacagaccatgtgagaagaacgcggtcaacgatatggatcaaagacgggaaaggtaagttccaacgtcgtagcgggtaaaagagtaaatgtgatcaaactcctatatgatagttcagttttagattagtttagaaagtggctgtatatgtaacatgtttggcttaactcgtgtaactataatctgttgggttttgagtcattatgaacaaattgaaaagaggaacaacgatagagattctttaacctttctatttcatcattgaatggtagctaaattatttaaaaaatcgatggaaacacccaaactcaaaaccaaaggcaaacattcgcctccgcttccatcaccagcagtgaaatctcctccacagaacatttgattaggttcaagacggtggaagattgatcccttgtagtggagtggcttaccaagcttccccatccctttctccctgtgtacatagggcccggaaattctccgccgctcgtggtgtcgtgtctgcaaagagctccatcacaatccgaccacactctgctgtccacgctcaaataaaaaaaaaactttaggattagcttttactacttgttcaacgccaccacgctccaccagccggaggaagaacattaacgtttaatccaccaccacctccaccagcgggtggtacgagttcggcaacaggtttaaacgttaattgtaaaaccaacattagccggaacgttaattgaacaggtgcattggcttcattaaagctcaaacttacatagtagggtttaccggagatttaccgtagatttttacgtatttctctaatatataatggattatcctaacgatatctaaattattaaatctaatgatatctaagtcacaacattacactattttttttttaaaaacgaaccgttatcacaattcacattacaatgagattcaattaagtattcacacttgcatttcacacttgcatctattaaactcgaacagaataattaaggaacggtattaaccgtcaataactcccatcctaaatctaaactgccattgcatcacaaaattcaaaaactatccgactcttttgagtttttgtcatctcttgtcgcttcagacataaactacagtctgaacttcataaactaattgtcgtcgattcaacaatgacgaaagataagaagaaaaaggacaatgtcagagtaagatcttacttaacattctcctttttgttgttaatcctctgttttttttcctctgttttcaatacgttacttcatttgttttctcaattttcttcgatatgttgtagtatatggatgtcgaattcaatgtatcgatgcattgcaacgactgcgagagaaaaatcgctagagttatttccaaattcaaaggtataaatcaaagtaacgtttccttcaaaggtatatacatgttttttatagtttctaatttgaatgatctatgaattttcataggagttgaaacgtttgtgacggatatgattaaccacaaggttgtggtcaggggaaagattgatccgaacaagttgttgaagaagcttaagaagaagactggcaaaagagtgaagattgtagttaaggaagagaaaggtgaagaatctagtaaggagaacgaaaatgttctcgagattgatatggaatcgatttgtttaggggatcagtcgatgttcgggttttgtgattgggagatggagaaatttatggtgtttagtgatgaaaacgtcaaagccatttgttctatttcttagcctagttgaaacgagatataagcaatacacacaaaatcattcttgaatgtgaatgaatttattcaagatgttatataactataatatatccttcttctaagcgggttctctcgatataggttttttgtggaaagagcactctcatggagatcccgttactcccaaaacaatgcttctctaggtgttcccattaagttaagtgcagtggctgcaatgtgagacgctgtgaggccagcttcagctagttgatccattggtgatccatgttcgatatacctgtcaggtagtaccattggtctccacttttgtcaaaatgaaagaacattttaagacaggtaccaaatggtatacaaatgaatattaagaatgtgtaaaaaattgttaatgtaccttgagctttccatcaagaaggccatcaagtgcaagaaattgtaccacatgcgatccaaatcctccaatggaaccttcttcaaccgtgatcaaaacctcgtgtgatttagctaagctacgaatgagagcaacatctaacggcttacagaatcttgcatccgctactgttatctttaatccgcgttcgcttagcatagatgcagcctctaaacatctttgcaccgctgatccatagcccaaaagcgcaaccctctcgccgtcccttagtatcctacctctcccaatctgaaattaaaaacacacaaagattaaaacttagaatgttaaagttttggattcacaatattgtttttactaaacatacctgaagagggacacctttgttaccaggaggaagtgaaacaccaataccatttcctctatgatatcgaaagcaagaaggacggtcatcaatagctgcagcggttgcaaccatgttaaaaagctctgcttcatcagatggagccattactatcatgtttggtagacatgccataaacgtcacatcaaatgctccacaatgtgttggaccatctgctcccataagtcctgctctatctattgcaaatctcacaggcagtttctgtagatcaacatcatgtacaacctacacaaactagttttagtctagttaccacatcacaataagcaaataaccaaaaatatgtgactctattacttgatcatatgcccgttgcatgaaagatgagtagattgtacaaaagggcttaagtccttcgcaagcaagaccagcagcgaaggtaactgcatgttgttctgctatgccgacatcgaaacaccttgtaggaaagcggctttcgaagagattcaacatggttccacctcccatggctgcatgaatggcaacaatatctttgtctgcctctgcttctgcaatcaaggcctccacaaaacaggaagtgtaagactgagtcttggaaatatttttgaactgtttacctgtttctggatcaaattttaaaactcctgacaagaatgagaaatatggatcaatccaagagtgcttagtatagtcaagaagatatgaaaattaattttaccatgatacttgtcatcagctctctctgcgtaaggatatccacgacctttctcagtcacgacatggataagaaccggtcctatggttttggtgctctttaatgtttcaagaatggagaccagatcatctatgttgtgtccatcaactggaccaacatagtgaaaaccaagttcttcaaacagtgttgaactagtctctctaatcattccacaattagattgcagcctactaagagcacagctcagagctccaacaggttgagttggtccatccaagttagcagtaggcaaagatacttgtttgttgtcgttgagaatcacaatcatgttggagtgtaagtagccagcattgttcattgcttcataagcttgtccagctgtcatagcaccatcgcctataaccgaaaccacgctgttgttcatccccttcaaatccctccctacagccatccctgattcacaatttccgcatgcatgttaggaaagtgatttttcttgttttcttgtgacacaagaaaataacaagtatgacctaagcctgcagatagtgtggtcgaactgtgcccggtgccaaaagagtcatgctcactctctcttcgcttggtgtagccggagaggccattggtctgccttattgtcttcatctttcctcttcttcccgttagaatcttgtgaggataagacttgtcaaaaagacaaaaacaaaacaagttaaaaacacttgtacatgtagctaaaggaaaacttatgcttgcaatgagataaccaacctgatgaccaacatcccaaaggatcttatcatgaggagtattgaagatgtaatgaagggccacggtgagctcaacaacaccaagattcgaacccaagtgtcctccagttttcgaaacattaaaaataacatcagatctcaactcgtccgaaagaactttgagttcctacatagcagaacactttttcatcatcacatccttgatttgacacaaaacaaggttcaagacttggattaggatttatactttgatggagagatttttcatgtgcattggatggttgattgtgtccaataaaggagttggtggtctgtttgaataatattcacctttctctgaaaatgttgttgctcttacttttgactgaaccaaaaaaagatgttatgttattttcaattaattcaataactttcacaaacttaacaagaactagtgtacgtatatagtttctcacggataatctgcagaactttgataataatgcaacttcatatagtaatcaataagtaaaagagggaaaaaagaaaaaaactcttacatattttgtagaagacatagaagaaggtttaagatattttagtgaaggattcctatttatgtaagaaggaaaggcaaatacggagagagccatttgagagaatttgttaatctgtgtttgatatgacattccaacgtatatatagtggtagtatcaataaaatgtaaagcttactaatcgaactcttttaacaccttaaatccacgtagaaatgtattttgtacaaatttaatatcaaaattttagagaatagctttctgttcacacacatgttaacgtcttattaaagtttacgctctttaacaacggtctaaattcatttgtccgcaagatacacacctcttattcccaagttagatgttggtataattcaaggtatatgatttaatttaagtgacagaaaaatgataaataattcagaccacaaaagttgaccacaagtatttggatacataagccttatttaattttcactataaaagtagttaagcacggctctattgctcgtctcaatcacatcgacgtgatatttatattattggggatagttcaaatagaaacttaaatcagtagccgtcaaaaaagtagtgtattgactaatgtactaatccaacgggaatcacttacaccatattgtggctttgtgggagactttaattaagagatgtttgtatgataattacattacatatctgtactttcaaatctacacaaaatatacgtagcgtaacctaacacattaatgaataatgatgcatgtataatgtgtttcatgtgtgttgaaagttgtaactagtgatttagactacagataggagaaaacttaatggaattattcaacctatctcttgtcttgattactgattagtcttcttcttctatgcatatattttcaccaaaacatgcttccctttggatactatgcatgtttgaaacaataaaataggaataagatattgattataaccaaaaaaaaaaaagtgttatttaccctatgatccttatttaaatttgtaatcgataataacaaggtggaagaacatataaacatcatatttttgtcatattgcataattaatggtatggttcattatacatacgaaattacgaactggaaatcttaattattattgaaaagacaaaaaggtcacttgaaaacaaaattaaacagaaggtacaattaaaggaactagtaaagttatgaacaaacgatgaagggaacgctcattctttacccaaaaaagttcaaataaaaaagatggagcactaattaatacgagtatagagcaatacaaagttataagtggtaaactagaagtctagaaatcgaacatgaggttataaattggagccatatatagtcgacgacaggtcacggatctgtaagtaattaagaattttgtcattattttatttttagctacattatttaacgtgcactcacatagtataactttatttttttcttaattgcattgtataaatgtctgaaaatctttagagattcgtcgaagtgcaatcgtaataaaaaaaagatttccaagatcatcatggatgtttagtacgggccctttgttatcatcttgggctactaaaattcatatggcccatctgtgttctttggtcaaggactacaagacttctaactacttctaacagttacagtaaaacaacaacctaatacctaaccaagttgtccggatcacattaccttgatgcgtacattatcttgatcaaactctatataattgtagtcatgactcatgactatatgtttgcttgagatcttattttacatatgtgggatttagatgtggattaagaaacgttttagcatgtctcactcttccaatggcacaaagaaagaagttcacataagaacctttttttgatagtcacataaagagaggaagaagagagagtccaaaatgaaacaacaatggacagagatgtttatgaaattcactcaaaatccgagttcgacggccgggatcattccaccagaagctacaatctgttgctccagctgcatagattcgatcatcaaaaccaaaattgaatcagataagtttcaaatgttgatcaaaatattgtataactagataagagttatgtgggtggttttataaaaaaaaaaaaagtctctttgactttttaccttgaacagagtctctaatctgtttttcacaagataatactcttgcttcacttgttgcaaacatctatgacatctgaaatttttcaacgatgtattttcctaatcagatcttaaaacaaagaaataacgaatggaccaacgaacatatcgattaaactcacgcttcgacattttgctgctcgcagaagctgcggaagacaacacaagcattcttaactctctgtgctcctatactgttattttttggcaatatatattgttacacatttcaagatcaagaaaatgtcattatcattggattaaaatcagaaatagccagttttgtttttgttgttacctggagctgctacctttgagttgatgaacatggggatcaacttttttaaagtctacaacttgttgatctctgcccgaagcataaaaaaacagtgagaaacacaagttttggaaaagaacaaaaaaaaaaagattaaagagagaatgtgtaaagaagattacagggaaagtgagagatcattgagaatcctatcagagtcttggaagaagagtgtgacaacttgtgaaacaaaatctggattgctttcatcttgtagttgttgcagctgcaagaactggctgtccaaaatccccttttttgtatttacccaaaacaaaagactttccataatcagaaactaattttacataacctaaactcatgattatcttaccaaagaaactacaaaagcctaacacatttttactataagtcctaaaaccatttttactacaagtcctaaaaccagaaagaaaaagttgtgaacgttaaaacaagttttctgattatttgatcttttcaaatgtgaaaaacttacttctaagaagagtgatttggtgtaatcttgcaaactcttctgcttctgaaccaaatccatattctctgttatttgcttttgttctttatttctttgtttctctctgccaataatggaggtaagaaaatgtccaacaaaatcctcagtacttaaaagatgagaacaaaatcctccgtatcaaaaaaccctattttttaaatttaaatagtttgtattttattattacaattttggtttggatgtgagaaaagaatccaaaaagaaagaaactcttaaagaatggaagttggtcgtgctgtcaactgtctaaccattcgcgcctttttttcctcgttttttttgcaaatgtgataaagacataagaagagcatttgatacttcttgatttgtctttttttttcttaagattttaaaacattttattggttcgaatatttaaattactgtactactgatgaaaagcatatactaatatgcacagctcgcattcaatgtatctttcaaatagcatctctagggaaactttatttgtaatataattttgatttgatcctcattgtttttgtccaactagcaattcttttattataataatacattgattggttagtttattttatattgatgtatcacaaatatcgtaacgtaatgggtttatcaaggaaattgtgactttgagaactcaaatgccgcctaacactttgtaatgttgttcaaaaccaaaactaaatgcagcttataatttctttagtcatatatctcgtccaatcatttggtggaattcttattaaactaggatttatcatattttgtgttataccaatatttttcattataatcaaccacttatcacaattcaaatgttttttcgtgatttctcaaagcttttctatttactcgtttgtcacttgctctataaatttctttcaactaacaatatttcaaaacaacctaacaatatatatgcaatagctcatatcctttcaatctttcatagagtactacatacaatatatttttacgtaacattttcaactacaacgatcagcacaccagtctcatctttttcaaccacactatttcttcatttgcatatccctggtattttcgtcactccaaatactttcccaatcatactcatacacaccattcttatctatttcctcatgcacagtaaaatgacaattttttccttagacaattcgtattttcaataacaatttcaacacgtcaagccaaaataaaaatagtaaattagtttcactgtattaatttctgcaaatttgggtaaacatcaacgctttgacacgtctcacatgatgaatggacatgggacatgcaagaacgtaggatgcgtttaacgaatggcataaaacgtattatatatactaactaaccaaagattattagtggttcttacttgataatgggtccatcgtaagaaggttccatcactaattatggacctttcaaatcttattatgaattttgatatcttacattatattatctccgtataaaagttaaactgtgcttccttagtttttaacaaatttatacgtaaaaagtcaagaaagagtttgcactcacccatatctccaagcaatttattataagaaaatccttatagccaatagccatatcaagtttttaaaaaggtttaaagctagaatacaagtcgctgtagacgcagccaaatacgatattatttactaaaaacaaataaaaggtaaacatgcagaacgagttagtcgatttgttggttcactgccaatttcaggttaagttcaatttacacaagtaaaataaattagttgtcaattttatctcgtgtatgggcttggttggttcaaccgcaaacaaaaagaagaaaaaagtgagtttagatattaaaatggtgtatttacatttgtaacacaataccgtaaaaacaatccatgttgacgtaatggtttcacatacgataaacacacttttagatcatgtaaaatacaaatgcatgtaaacgtagattttaaaacacaagtccatattctctatcaattttgtgttatcacgtttacaaattatgtttgataaaagaaaactaaccgcattttaacatataaacacaaaaacaacacattcaaaagacattcaaagtcgttgtatagtcttaaaatttttacggatccataagagaaacttctctttagattcagtcaagattcatcaccaaacgtgtgctttattcgacgccttagaaatttcttcgcatttagttccaaaactcaataacttatcgaagaaattataatcaaccgttttagaaattattgagtcttcgtgtgtagacatatagacaaaatttaaaatagtttgacttagtcaatgttattaccaattcttctacggtgttaaatccaacatctcggaccggatcaatgatttatcatctcaaaattgttttataaataccgacacacgtatcaagccaagaacatactttatagtttatacatctaactctaaggttcaagctcatgtccgaaacttctttgctcatacccaaaacaaactctccagcttcatcagaaaacatggcaaacacaaacaaatccctcacaggcctagagagtcttataaagcttctcccaacgggaacactctttatctaccttctacttaaccctgtcctcactaacgacggtgaatgctccacaggtaataaggtcatgtcgagcattcttgtcgccctttgcagcttttcctgcgtcttctcatgctttaccgatagtttcaaaggcgttgacggatcaagaaagttcggtatagtcaccaagaaaggtctttggacttacgcggagccaggatccgtggatttatccaagtacaagcttaggatagcggatttcgttcatgcgggtttcgtgctggctgtgtttggtacactggtgctgcttgacgctaataccgcgagctgcttttatcctcggttcagggaaacacagaagacacttgtcatggctttgcctcctgccgtgggtgttgcctcagccactatctttgctttgtttccgagcaaacgaagtggaatcgggtacgcgccaattgctgaggaggtaggtgctgaagaggagaccaagaaagcctcggtctctgcctaagatcggttacctcagttgtttctaaattatttgtcaagatttgttgtagattgtacaagaatatcattgtttacttaaacttttatttagttctttgtaagcatagctattaatatgtagactaaatgttgtattgcatcttaatatgatgggaataaacgttatcatatacacaagtgttgtttcttaatcagtgtccaaactttatgaagacatcagatttcctagtttccatgtatctttcgacatcaaattagcttttatctgaaagatcttctgctttgctttcttgcgtgaatgtttgaagttacctcgagatcgctctttggttataactaaatcgactttgactatatgatgatcagaagtacctttggaagaaacaactgagtacgagccaggaacaaattcgtaaggtgactctggagatgccagaatgtaatcgacccgtgtcccgtacttgcatgttccttgtacatctgcatcagatcaagaatttcacatattagtactattactacattgaactttgcaagttaagagaaaatggagaaactaactttgtcctttggcaataatgactacaggctcacattctcctgcaaattcttttgaatccaagtatccttttcccttgagaaacctcatcacttcaactctaggcgtcggctttccagaatcctcgtaatactgttcttacaatacatggtttttggttatatatgagaccaactaaataatgactgatctaacgaaattgtacctttacgatgtggttccatcttgctatggaataatcagagccatcaagagaattcaagcctccaaggaggatgtggggagattcgtctcctcgagtaattgcatcgatctgcttcatacgccagttctcatctagatggtcaagttgagtacaatacacatttacatctccagcccatgggatctctacagtcaccttcaacacattcctgcacacgcaaaagacatttacatcaacaatgatatagtgggaagaggaaaatcaatgtaagataagcaaaagagattttttgtattacctaaaatcatctacatcagcaattctctgaactctccacttctttatgggccattttgatagtatggcgtttccatactcaggcgcccagctctctgcaaacacgtatttcatacctaaggcggaagccaaatctgataatggtttcataagtgtctcttcctctgctttcacgtcttgtaaagccaagatgtctgcatccaactctcttaacaattcagctatgcttcttctgctgctgtatccgttaaagctttcttggtcccaccaacaagagggaagacacacgggagatctcatcgagagacttcctctgttttccttcccgtcgttatcattctctaccatactcagaaagctgtagctctgtgctaaggaaatctcattgtctgggagattaatgcaaacctttggtttcctgactgcagaagaatgtaatggagactgcttcagaatcccttttggagaagggcatgtgatgttgctgctatctagatgaccaagaaaagctgtttcctccatggtttgcacaacaggcgcaagtgagaacatagccacgttaaacgttgcaacccgaatatgtcttccagagtttgagctcagatggatagaagaaacttcagattccggactctcttttcttcgagctctccaccttgctttcctgaacctcctgactataactctagccctcacccgtttcttgataacccatctaagtcttgaaaaaaggcaaccaagcttccttctaaacacacacaacatgtaatctctctgttattctgcttcaaaaaatggaaacagctacaaaagattaacactttgagagttttcaaaacaaagatttgaacttttcatgagacaattaaacaaacaacaagactataatatcatatcaatgaagagatgagatgattaaaagtatttatgaagagaaagcaatgagccaactgctccaaatttggtgaatagaggataataactctattttttgttgagcgttaattaactctattctaaaatgtcaaacaatgtaaacctgctaccagagaaagaaagaacaacaaggaaccaaaaccttacctgttgatcaaccatctccacgaaattctcccaagtaggttaaacagaaaactgacaaaaaaaaaatatattctgtacacaacttgacttctgtgaagggtttagattgtgcatgtgtagatagagtaccatattttatgattaaaatattaatatataaacaagctattacttgactttatcaaacaaattaccaaccctgggaccaaaaaaatttccactcagtttggcatgctcttgaatgatattttcaagcaaaccttaagcaggaggaaggatgctaaaaacttatcgaaaaacttgatgagactattgaaacatgatattaagttcctggctaagcggatcagtatcattcatcataagtactactaaagacctgtaacgccaaacaactagagcaacaaaatgtcaaaattgagaccatagccaaaaatacagatgcaaattctgactccggcttcaactgaaaacaaaagcaaatatctcaagtgtcacttccatgtacttagtgtcagaggtttaacttaccaccatcaggtctgctaaattgtgcattccaggaagaagagtagtcatctttctctgtgtaatcaagagacataatggaatgaggcatagtcacttgcattgaagcagaactcttaacacaaacaactgaaagtagtaatcctccacaagaaattgcaaaacataaaattcaaagcttgtgtaactcaggaatgaacaataatcacttgatgatatattgcaaggggtttgtttctgtaaaattgacccaagatgaaatttttatttcctttatcataaacccatttcacacgcttttatttcactatatgagtgagaatattttcagaaatcgaaatccaaattgtaagaaaaaatttcgtgtaatgctcataatctcgatcgttttgtgtgtatatgtatattgtatatacggagcagagaaagagaccttgaggtaggcgcgagaatcaagtaaaagcgacggtgtccgacgaaactcaccattcgatcaccgtcgccgtcatcactgttccgccattgcaaagacctttacgttaaccggaaattagtggagctcggaattaaaccagactggtttaatcagtcttaaaccacaaacatatcatttattcacgaatggccctttaattttaagaaatgtacaattttgacccttggtaacgaaaatttatattttgaccctttcgagccacatttgacatttccacgaagtgatttagtaaaacattaaatggaagaaaaaaaaaggttacaacaggcaaaattggatttaaattaaccatctttaaaagttacatcctcagaacaaagcatggccatgttgtccttcctctaatttcttctgcttcttctttctctttttctccatctttgtatctcctcgtgatgccatacgttttgcttgctgtgaccttatctccaatagcttggcctttgcatctttgaagggagcatcagatcttgcatccatcatttgctgcaaaacaccacagcttcactttaaatacccacaaagatgagataaaatgctaaaaatgaacataatccaaagtgcgaaatgtttttaccttgacatgatccatggcggccaaattgaaaccgattgtatctttgcatgcctgataagttccagattcatatcaaaaccaattcagaaataaaaagatatacaactcaacaacattttcctctttgctaaccttgatttctgagtaaagaatgtccctgagaacgcttaagattggtctggcagatggtgttgttaccaactggttgtgatgtgtctgtaatataatggttgcgattctgctaaccaactctacctgcaggatttggtaacaaacattagagatattctaagacgagaaggatggatctataatctgttgtaaaaatataacaggttgatgacccagatcgagtacattctactttacaacacgaagctatatctataagcccttcagagctaaaatctagaatctacgacacaaaaggagtatataatttaccttttcgggaattaaactccagtctttcatgtagcaaagaaacttcaaagaatctgagaatggtagagcctacataaaacccaaaagaggaaagggtattgattaacataaccatggatctagtacgagttgggtgcaaccaagtaactagtaaaacgatggtttgatggaagaaaggcaacctaccagcaaagtctgctcaagatcatttgttctcacatttgagatggccctgagaacatattcggacggagaaagcccgaacatcacagcgttgggtaggtattcaggaacttttccctttgttttctcctcctgaagattggaagaaagaaaaatcacgatgcaaagaacaagtaggaaacaaagtagcaaccgtagatattggcataaccattttgtgttaaattcaactccaaattagccaaaaacgaagtaccaactagggggatgtcatgtcgatatgtatagataaacaaacaaagtaacgattcccacctcataagcagcatgacgctttgtttcatcttctgctacttccagagcatctataattgaatcagcagctgatagaacatctatcgtcttcttgccagctaatgctgcaacaccttcctctggaatttcctccatgggtccatgcctgtcatctgctgcattatcaatctcagactcaaaaagctcttctaacctcttttccttctcttcctgcattatttccagtaaaattacattaattgacctaaagtcacataaaataactcgtcaaaatatacttgagatttatgtagacatgacagtatgacaccaaatctacattcacaaccacatacacatagaagagttattatatttgaatgcttgaacttgcatgacttccgtatttgatttcatcatgtaaactgaaataagtaacttccaacagtggggaattacctcgaggaagaaaggttcttcagagcgatcccagcgacgcatggagcggtcatgagatcctgttacgagaaaatcaccacggttactgatagcaaggcaccaaatctctgcatgatgtccttcaagcgttaacaaatgctcgaatttgtcagcatcccaatacttgacgaggcggtctttcccaatgctgaacagataatgggtattccgaacaaattttacacccatgacactgtaaaacaaagtcgcgtgtcagttaagctccacaatcttttaatgattccaaggagtctttaacacaaaatataatatttgcggtaataatcaacattttactagccaagtaaatctgttgggaagatactggaaaaggaaaggggttttctgcttatatatcatgtcatgcaattagtcatactgttttcttacacaaaattataatattcaaggaaaaactgggtccacattattgagtacgttatgccattttcagaaatatggtacgaattatggaagtacctgtcaccatgagcaaagatagacttatgacaatcaccaaaatccaaaccccaaattttcaaatttttgtcctgagaaccagtaacaatcaactctccatctgatgagatgtcaatgcacatcacaggcaacttgtggccatataaggagaggtagaattttagggaatccatgtagaaaacctgaaaccaatataaggtacataagttagtgttacatacgtcaatgtaaatgataatacgatagatacgattataagaatgtggttagcgtatcatttatatgacgtactgaaaattattattttctcatttacatatgccataaacagaaaatctaccttcactgtggaatcaagcagtgcaactgctatgtgtttagcatccgggctgatagcaacagcaagtacatcgtcattcatcttcatggacttaacatttgaaacagtgagtttcttggtcgcctgcaggttatcaaacacaatatgttttgatcgaatcattttagcacactgtaatatactactcaaataacactaataaacaatgtgctcatcaacaactttcttaagagtgagcaattccagaaaacaaaggcacggaaaacaggagatggaaaaaaagagagtagagaggcaatctatgatacaaaaacgtttacttatctaatagagaaaataaaagaaacttaaggtcaggaatctcaccttgccagatttctgtttgacttggtattcccagaatttgacttcatgatctgcactgactgtgacaaacccgctatcgtttggaataggtgtaattgaccaaatagtgccaccatgagccttcacttcttccactttggtagcgctccctatatcaatgatttcaagtaccccactcttggttccaacaataccatacttgttttggggaacaatcaaactgcataatccatatcctgaatcaatggtccggaggcaggaacctgtactgggattccaaatttttacttcactgtgactggttgacatcaaaagggtgttgtcttcactgagggtaacactcctcacatcagagcgatgtccttggtgttcaatggtaacagttttcgcgttttcgctgcttttaagggaatagaattccagtgagttattgttcaaagagagagctaatgttcctaaggattcttttggagctgtcggacagaaagagaaagagctgatttttctcccagctctaatgacttgtaagagcttgaaaacatcaaggacagtaggactagaaacagcatcagctagttcaattttagcacttgcttcgccattagcggttgaattttcatcccccactttggaactcttcttctcttttctgcgaagcctacgctttgctttctgcttagcctcagcttcatccaaaacccggaatatttcaatagttttacctgccatttgacaagccagaagttttcccgaaacattgaatctaactctcgcaactctatccttagtttgtctctgaatttccccaaacagctttagaatttcccacttgttctctgtcgaatgttcttcactggccttgatttcatttgcatttgagtcagataccaatgatccgttagacgaatattccttgacagcataaaatctaagttcttgatcagccgacccagtaacaacatatctctcctctggatcagtatcaacagaccacacttcactatgatgaccactaactatttgcatacagtgttgggtctcaagatcccagactctcaagaacttgtccttagatgaacttacaagtttcttaccaccatccaagaatacaagatctgtgacctacattagacacatgaacattgctcttgtcaaaaaccactataaaaacccacacaccatagcagaatcatcaaacactaaatactagaaatatcaagctagacattaaataacctgatctcggtgcccacggagacgaaaaagacctgattcgccaacaacatcccacaagataatatcattatctttacttccagatgcaagcatcgatccaaccttattgtaccgcaaagcagtcaccgcccccttatggctattaaaattaacctcacaagttcctttctcagtatcccatattcttatgctcccatctgcatacccaactgccacctggtttatcacacagaatcaaacaacagcaaactccttcagatactcaatagtacaaagcaccatgaatattattaattctagcttaaaattcaaatacgacatttctagctctatttagctaccaaatagattacaaagtgaacaactttcaagtcattaagcaaatcaaaataaaaaacgaacaaaagtaagtaccaagctagaagcagaggaggctatagaggtaacggcgagagatggtccaccgcgagaggaggaaggagttagggttttggagcagacaccttgccggacgtgccatattccgaccttctccaacgccggagcaagcacatacttccccgtcgaatcgtaagctatgttcgaatctacagatgaaatcacaccgaaagaggtcgctgcatcgtatctttggtaagccttcaccattctccaaaagctttggttttgattttctcttcttcttcttcttctagcttttgatggcgggatttagggttttagagtggttaaggcagcagggttctaacatccaatgttacttttgataaattgcgatatagtcttaaaccttttgtctattcaatatttaacccctaactttatttcaatagatttgaagcccttactcttcggacccaaacttttgttttctcaatttgcaactatgttgtgtaatcattggtactaagaacgaaacagaacaaacaaaaagaaaaatggctcacgacatccatgaccaatattagtaattttttatcattttcttaaaaatcaatgtataataattgaatgattatcatctaaagaaaatcaagaacgtacactttttatcttattcatactctaggcttacctttttaacatccacattaattttttttattttttttgttaaagggcccatccacattaatttttcctagctaatttctttcaaaataaaaggatatatagaaatatttgtgtgtatatacattagttcatataagtgtctcttaagtttcaactccttaacatctagtgatttcaataatgctgattcactcactatgagcataaaaagagatatgttattacttttgagtttatcaacaaacatatggaaaaaataccaaaaaacaaacacacaacatatgatcagcattcaaatacataaataaaaataacaaaaaaaaagatcacaattataaaactttcgtatttaccattccacgaataaacacatgccattacattttaatgttttatgcatataaatagtataaaatcatatactatcatttcatctcggaagcatcatcctcactgtggtccgagggattcccaattccgtgacgtctactagggaacaccgtgaaaacagcaccggagataactccgatcaccggaggcaaaaccatgagaaagatcttcccagcggagccaaagccaggatagaaacaattcacggtgtttgcatccaacaaggaaataacactgaacacgataagagagaagaaagcgtgaacgaaatctccaactctaagccttttcgaagacaaatccactgaagatgaatctggccaaagacccttcacggtggcaactccataatgaacgtaaccgtctcttgttcggtaactatcggtgaagcaagtgaagcaacaagagaaggcacaaataacgatgagaactccggttaagtatttgttgatgaggaggcaatgtccattgttggttaggacagggtttaaaaattggaacaagaagacggttccggtcgggaggagcttgatgaggtctcctacgcctgaatatgtccggtctcttatggctttgaatgttttcgacatttttttgttcttcttttgtaaattatatttttagttgtcgtttatagtgttcttgaatgtgaattcataaaagtgttgtttgtcgagtgtttataggatgagagagagacattgcttctacgtaaaaacgggtttggtgttgcttatactctttagaaaaagttgggggaaaatttaattataacttttttatttgtttaggttaccctttttagtattttaggcttgtactagaaaacgtggcttggaggattagattcgttatgtttctctttgtattagatacatagaagtgtgaagtcatttttaatgctccattccatttgttgtcacacatatcgtcatacggtcgttgaaagatctggtagtccaaaacgtatcgagtgtgaaacaatatgtttggcaagtagaccggaacatgtataaatttatttatatatttgaatcttgttaaaaacatttttgtgtatttagagactacacataggaaactactgatttatacatatggtttactcgacttaatagtttgttaaaaccggttaagtttatgaacgttttgtagaacctgtgaatactctgtttttaaataaaaataaataacataacatttctaaagtagtatgatagtatcacagccgtttcatttgtgtgaatgtcgcgaaaatcaatatgctctcggagtttcattggttgtcacacactatagattcagttcattcaaccttagtgatcatcatgatttgacgctcgtcttaattcatcttgatacatcgaattataattcgtcatattacattcgtacacaagtcaggtccagatggggtggacagagatgcgctggcttttgggtcattgtcttttcaaaaaactttcaatatagatgacacgaaaagcccaagagcccaaattggagttgcaacggggccgtccgtacactaaaaatctttgttcacgtgactgatcattgttttgctcttgtcggattagtaatctaacgtaattcattgtttgatcaggacttgcatttgtccaaaacaaaaaaaaaaagtcaaaagaagctaaaagatactgtgaacggaaaaaatggcagctttttagtgctaattgccagagagattcacatgtacccattgttcagaactgtgttacatactaaatggttcaaaagagaggtgattcgagcaagagacatgtgacctagtgaaaaaagcaaaataaagagaatataaaattgtgtggcaagacatgagtggccattcttcagcctgttttgatatgtgtgacttcatttgtcttcagaatagttatgacaccattctctttcgtcatccacaaatgctcgaagaggtgaaattgtaaacaaatagatccactagtctcggtacttgtacaacatatttatcgtagttaaatgtgtctgaggccaaaatattattaagataaattgtttcttttatgaaacatttgagcttcgcttttcttaaaaacattgtaacattttttaagtttgatcttcgtggttattccgtagaccatacccatcaaaattgtctgcgaagttgctgtccgtttatatgcagtataaagaattgacgaagaaagaaaaacaggacgtactttcttctagaagatgtgaacgcaagacgatcgtattcacatattaacaaaaaaagtcctgacgaatgatgccaaaaatagatctttacgatagaagtttcatagcagactatatatatctaactcaattagtaaacgcatttattgcaatatatcactaattatatattttctggaatcaaatgtttaattatatatgattacctgaatatagtcaaagtgtattgcgcaatgaacataaacacaacaatataacagacctttttagtggtaagaatacccttttggatattgatatgagtttcaagttcaaaatcttcggttgaaaaaaaggaataaataatgtcttataatggtttgttacctaactaaataattaaagttgaggtgtagctctcaaccaatacatttttttataatattgtttcaataatttaaagtagttaattatattcaatagtatttattatcacttagttttttttatttataaattttatcgattaatctggttagttttagtagaaacgtatcaaaatgttttacagtggatttttccccgaaaaaccatcacaatgtcggtcctaaatttaaaatgttttctgactaatgtaaagattacatgttactgactaccatatgaactgttttggcccaaacccaaactttccacacatgtaatttttgtttttaagatagattacacttgagttagtttctttgaagctttccccaattctcatttaccactaaaccacaactatgtgggcaaaataggatttgctttttgtgtcggatgttttacacaatttattacagctctcatgcattaacactattttgatttttgaataacaatttgtagaagaaaactaaattcacaataaaaagctgtccggtggcaaaaacaaaactcatttatggttcgtagcacatcaacgagttggaactactcgaacgaaactgggtggaattgaaactagtcctctaaattagttaaccaacagaattataacacgtcacctttttaattttgtggaattaatggtactaatctccaagattttttaatttctacgactctaccaacaaaaacaaaaacttaagtaagaggttttaaaactcgccacgccgtttctaacttttttgtaacgttaacagaattacatatcttcgtccaaaaatatctcacagcaatagtcaacgacgatcagtttcactttcaccggttaggattgaggtagatataatttgggacgttgctggactaaattatgaatacggtatacattttggtgaatggtcgttgaatgtgtatctttgacgattgtatctcaaatataaaaagccaactatcttggtactaaattgaagagcaatgaaattatttctataattttccattccgttaattttctatctcgttctatcggtatgatcccttttattcattttgcattttacaagttagagctacatgcatctaacctacgttgaatattgcaattttttttattgcgatacctagtattgtttttgggttgtttctgagatgaaatttcaatcttttggaccaatcatcgaatattcctcaaaaccacatggaatttagagaggtgacgttatatttctctatgatcttttctctttttggtttataaaagtgtatataataagggaaacaaatgagtgaaaatttctgtatccacgtcacctactgacccgaagtattaactatcgtgcattatatgaaatccagatattgaagatagtaacaaattttacaataatttcaatagagaaaatcaacaagtattaaataacgcaatgggccaatatgcgacggtaataattaagagctccttaattattcaccttgcttgtctctcctatttaagacgtatttcttctcttctaccatccaacaagtcacacacttaaaacaaaacaaaacaaaacaaaaacagagcacacaaaaagagaaaccaagttttcttaaaaatggagctagaatcttctcctcctctacctcctcatgtgatgctcgtatcttttccagggcaaggccacgttaatccacttcttcgtcttggtaagctcttagcttcaaagggtttgctcataaccttcgtcaccactgagtcatggggcaaaaagatgcgaatctccaacaaaatccaagaccgtgtcctcaaaccggttggtaaaggctatctccggtatgatttcttcgacgacgggcttcctgaagacgacgaagctagcagaaccaacttaaccatcctccgaccacatctagagctggtcggcaaaagagagatcaagaaccttgtgaaacgttacaaggaagtaacgaaacagcccgtgacatgtcttatcaacaaccctttcgtctcttgggtctgtgacgtggcagaagatcttcaaatcccttgtgctgttctttgggttcaatcttgtgcctgcttagctgcttattactattaccaccacaacctagttgacttcccgaccaaaacagaacccgagatcgatgtccaaatctctggcatgcctctcttgaaacatgacgagatcccttctttcattcacccttcaagtcctcactccgctttgcgagaagtgatcatagatcagattaaacggcttcacaagactttctccattttcatcgacactttcaactcattggagaaagacatcattgaccacatgtcgacgctctctctccccggtgttatcagaccgctaggaccactctacaaaatggctaaaaccgtagcttatgatgtcgttaaagtaaacatctctgagccaacggatccttgcatggagtggttagactcgcagccagtttcctccgttgtttacatctcattcgggaccgttgcttacttgaaacaagaacaaatagacgagatcgcttacggtgtgttaaacgccgacgttacgttcttgtgggtgattagacaacaagagttaggtttcaacaaagagaaacatgttttgccggaagaagttaaagggaaagggaagatcgttgaatggtgttcacaagagaaagtattatctcatccttcagtggcatgtttcgtgactcactgtggatggaactcaacgatggaagctgtgtcttccggagtcccgacggtttgttttcctcaatggggagatcaagtcacggacgccgtttacatgatcgatgtttggaagacgggagtgaggctaagccgtggagaggcggaggagaggttagtgccgagggaggaagttgcggagaggttgagagaggttactaaaggagagaaagcgatcgagttgaaaaagaatgctttgaagtggaaggaagaggcggaggcggcggttgctcgcggtggttcgtcggataggaatcttgaaaagtttgtggagaagttgggtgccaaacctgtggggaaagtacaaaacgggagtcataatcatgtcttggctggatcaatcaaaagcttttaaaaagtcatttaagtttttttgttttttgcctttggtttctgcaaattcgtaattgtgtttgtatccatcctcccattgtgttctttgtttttctgtttactatttttttttggtatgggtctaggggagagtcaatgaccttactgaagaatgtcagtcacgcattaaaaaatatattattaatggttaatactatatcttgccatattgggaaatttatttgatatgattaatgtgcactttagttagattagatttgatgtgtacggtcaacaaaaaaaaagaaggaaagatattatgtggtacaatctaataccatgcaaataaaatatgaatagataaagtttagtatttaattagtttgggggcccgatgttcaattagccgacgaaaaggttaaagacttggggagtttaaggctgctataatcttacaaacattggtgaagcgaaaaaagatttggggtttgcttttcctatatattgatttaatatattacttccggattttgcaactttgaacctcagaatctcacataaccaggattgctagtgtctcgtccttatcgtctagactctttcgacatttaaacaccacgtactgacagaaattgaaacgcgtatggcaatagtgtcttcatggtgtataagtgtcaatgttacctggttacattcttacacatgctagtaatttttttgtttgtttgtcgtttttaatatagagacagaagtagtgtgtaatttaggaatttatttattttatagtgttatgtttgagttaccaatgcacatattttcttttcagatactactgaagcttattaaaattttcaattatgtaaaaaaaagtttattattgtaccgataagagtaatgaaaataaaaaacgttggatgctaaatactcagctattccattttgatcggtggttggtaacagcccgactggtgaaacttgaaagacatcctccagccaacgcagaacctttcattggtgttattgtaaatattgaaaaataattaaccctaaaattaagtgtttctcgaaaacttgcataatttgacatatgtagctttcattgtggagagctcttaaattcgaacgtcttgccacatactattaataaattcctattgttttaggctttttaggcaatatcacgatattatcctatctatcggcatgtgctacattcaatgctgtaacagtgactcaatacatttctcgttcgttcgttacaacataaaaaaaatgtgtccccgttattctaaccaaatgattctagctagtgtcgtggtgcagtttgtaccattgtggtatagtttttaattgttgcctcagagagatatgattacacactatatgggtagaccaaacagtcaaaaccaaagtcttaatgagagttgagagaaaagtatccaagaggggatctgctgggtggtaagtaagatgtgtggttcaaaataatcgtgaaaggttggcgaaattaattacatgtcacaatcgatttgcgagaataatacatttaaaactcaaaacacgtacaacggtacatgctcttactaataactcaagatgttgttctttgctattggaagtcacgtgaattcttttatatttatgtttgaaatatgaaaattttggtgtcatactctatcaagaaaagttttttttttttaatagaaaagaagaagaaaataatttggtgttatattttgattcttttacattaaggtataatgtgacaaatttgtttagttttcatcttttgttttaggtaaatgagttgaatcatatatgttttattcaacttccgactaaaaacaaaaaaaatgttttattcaattttttttttattcttccaactttccaagaactgaagttgaatgaaactcagaactgattttgtgagacaaagatgatctttataatattgtaggtgattaattgaatgaaactaatttcgagagatttaagttttgaagatatgttaatggagttgggtaaaatgagacaaagacgatgactataaatccccatcaaattcttcaatcttcatcagtcgaaaatgttattaattcacaaaattttgctatagtgatcatttatataacctttgtaagattcctaaattgttcaaacatagacattaaaatagacaatagtacttctgattggatacatgtcataatcatggaatgacataaagtaaagttaaagtacggtatgaaacaattctagagatcaaaagtttcataatgaaataagctatcatggaatgacataaagtaaagttaaagtacggtatgaaacaattctagagatcaaaagtttcataatgaaataagctactatatccatagttatttgcataataaatttttgatttgtgtttttaggccaaatcttgcatttttaagttttatttagcattatatccatagttatatatctgcattaagaacgtcgtgacgccattatgcggaacaccaatcgaaaccacatcacaaactgcttctgtgcacaaaatctagctataaacctgatcaaaatcctcccattcttctacgcagtttgtggacacctaaaaggctttaaacttaaatatatttattgggcctcaaacgaatacttctttcagcccatatcgttttaattaattcacatttggatctcaaaggatttcagttttaaatttccacattacacaaagaattcaaaaaagtcagttaatatttaacattaatttctaaatctgaccccatacttttaattcaatctttttcatacccatccctttctaaacaagatatttaaaggaaagataagattaaaaaacagtaacggagacgattcctagattttatatattaaccgttaaataactgacgatttcgataactttttcgtttaattgatagtctcaaaactttagccggagaagtctccggagatcttgagaggccgagtcatcaatggaaacgacaacaacctggcttttcgctttcttcttcgagaaagacggcaaaggtaacgagcttggcgctggggaaacagcgaatatcgaagatccggcataaatatcatcggcagaaacctccggtgaatatttacgaactttgatgtttgagaatgagtcaaaagactctccttttctcctaacaatgttctttgtcgtcgttctgaactcatcggaaccgaatcttctcctttgatcaggtttgagaggcggtttccggtgaaaatgattcctccgggagttaaaaaaagtcgccggagaatctctcatccggtcaaccaaacaattttgaggcctgataatttcggttcccatctctaaagataaaaacaaaaaaattataaaaaatggcgccggaggaattcccttcggcggctaataaataaagaagaaatcgtggtggtagaaatgagggaggaggaagaagaaaagggtcaaatagtccttttcttcgattcctgctcgaaatttttgtaaattggttaaaatctacaaataatctaatttatgagtttttttgctggttaatggaatactggaataaatagaagaaattagaagagatgacaaaaatggagaaaatggcttctctgtcagagcttcgtttcctcgtaacgatgcatctgtaacctaaacacataattctatttttctttttgtttaatttagtttgtttccctgtccgtttttccatttttaaatttgattttccacaaatctaatttttgctgaattaatgtaatgttgctctatgggattaatcaaacaagcattggactacatatattgacatgttttaaatgagaactgtaaatatgaactaattccaatgacaaatctttttcaagctgtgatgatggaaacaagtgattgcttccaatgcaagaaactatattgccgaaatatagtttgagtgtttttggtagaattcaagattgatgttgtttatagaagcaagcacgagtggcttgggaagacattgacccgttattttctagaaaaagatgtgagacactgttttcgtctgcctttgtctcttctggacacgaaaaccatatcaaatcacacaagggtgtaccagactttatcgagtgagattgaagagatcacgcccttggttggcttgggatcatctttcttaactctttaagtatagattgtatttttgacgtaatttgaaagaagaaatgtggcaatttcttacactttttctaaagggtatttgtttcattaggtataatttcttcgtgcaaaaatagaaaactttgtctgttagtgttaggttattataatgatgaaacacattcacaagacttaaatgtatgggtgacaactagtatggattcagtcatctcatggagcaagttctcaacagtgcaaaccattaatccgagttggaatatgtttgctgatgggatgagtttcttggtcggcgagcataacaaagttgtattgtgttaccctaaccggacccccaacgaaatcttacacattggggaagaaatttatcacatacaacatttggatgatcatgatagagattctacctcaagatcatcttttcttctgaattatgttccaagtttagctcgaataaagattagtatgaatcaatattagacaagaaagtattcagacaagagtgcggttgagattacaccgattaaacacaaaactgatgcaaaatctgcaaacttattcgaagagccagagaagaagtagatcttgtggctactgctctctcctctgaagcctctaacaatcatggcctgcatgcacataaattacaaacttcttcaacagagaattcttatttgattctcaaatcaatgagatgataataagtgaaatctatttgacctgtgatatttgttcggcatgacgaaatatattcttgaagatgcggcgtatgaatgacgcgaaaactacaaaaagcgatcacttgtaagatgagatgtatatagaaagagagaagaaacttttagattcttactatcaagtgtctccagaacagtaagctgctgccagtttactcttcgcgatacaattcccagtgaaacacttcggacctacaatgtaacatatgcacaacgtaccattatgtggtttaggacttggaataactaggctgattgataatattaaagcgaataagtgaacagtcgttacctcatcgaaaaccaaattaatgaatctcagtgaaagcagtagcgtgaggataatttcactgactggaacaccaatatatgtcaatgggaacaagaaccaacgtagagctagtgcaagttgctctggtgttgttgttgcaaggcaaatactagcactttggaagatctgtgaccaaaaaccaaatgttccattaagtgatctaatcaagaaaggaaataggtaaaccgcggaagtcgaaaaaccgacttacaataaaggttaagcatgcggctgtgcttccaacagacaaacctttccttgtgaattgcaaaggaccaagcttcagtaacatgtacgaataaccgcttaaagacatgggaagattaggcaagcttgtgattgaagatggtggtgttcttgattgaagcattggaggtgcaccatctgaacctagccccaatgttatgaagagaatacccgaaagaagcgacactctcgccaattgatcctttacagaaaaagttaggaaactcagcagagcagatagatcacatatagaaacagagttgtgacagagaaacagaactcactatccaaacttgtcttgggagaacaaggattgacaaaagagctgtgcatagaacaagtcctaaacgcacaactagatttgctcttgctggaagaactactagagttaatagccatacctacacatatatacaaataccaaaattcaagctttaacaaaaaaaaaaagactcaaactttttaacaaaattggattagaaatttgataagaatcaagaattcaatataccaatttgattctgggatcccaccgagtggagaaatgtcacaggagacgatatgaattgtccgatgggacttccggtggcgcttgaaatcaatctgaagacgttttcggctccaagtcctggaattggtaaccggttcacccaattaccggttttaccgtctccgtcgacggtggctctgacaatgaaaacccttttcgcggcgagagaggaggaaggagtctcattaagccggagcgggaagagaagcttagggtttgtaaagttccggttaggaattggagatgtgagatgacgaattgggtgtttggggattagggttacggtgagggagactgttggattggcaagattggagtgattcatgagttttcaatttcggattggatcagacatatgccctagagcgggaaattctgtacttggtagagagagagatactgtaaactgtcaagtgttaaactgttgtacttgttggttttgtcggacgttgactgtggttctcaacttctcataataacaaaagtcaaagtataccaaaatttggatttcggttcttgttcgaatttgatgtatatatagactcgttttggattttctcacactctttttgtataaatcttttctcgtagagtcatagccacaccaaaaccaagattaagtaatttgatacaatacagcatatgaaaatgtaacttagcttttaagatagataacatattactgcctaggagcatttttgacaatttttgaggtgatggaaaaagttggctcgagagctttttgaatattccaggcggttcggcctaagctgcccgttgtttccagtattattccggtggtttttccggctttctctccaaaactttggtgcggtcatcacaaaaatgtgaatatgtgttacactcaactcaataaatgtataaaattgtaaaattcgatggtcatgtaaacatgttatataactcatctaaacaatcctaacaaataaaaatgataacctatctctaaaaatcattagctacccctcaaaactatttggtaattaattattagattgtatgcacgctatacaataattctaccaacttcgattttattttctaccgatataatcattcttttgattcaaataccggtgtgttactatagaaacataattcattctcaaaattgaggatcacaaagtgagctttttacctcttactcacaagtctagtagcagccatggatgtggcataatgagtttgtatttctgccgcttcagcagcaccaattatattatctattgaccacatcaaagtgtttatctgttttatttaaattttgatctcaaaaacttcaaaataaatgaatatgagtatagattgacaattaatggagctattctatgtaacttacgaaaagaatcaagtgatgccaagataacctctcctggagcagtggataacaatgccttccctaacttcgacttaaccaccggagctatcatcgaactgctcaccaaatctccaccttctaaggccgccattcctatagcctcgctcaccttccacagcttctccgctctatgtatatgttacatccaacaaaataaccaagatttggttcattataagaaggaacaagaaccaagattttattgtttggtataatatatactattttgtgggatagagattaaaatatgaatacctttgaagatttttgttgagtttattcttcttattagtttcattgttgccacctccatcaatttgtgatatgtcaccacttctttcctcatcctcttcagcaatcgttccttcctcgtgaatctgtttttgttgtaagaaaataaaacgatattaataataaaaaatactacaatatgtgcgtcttacatctccatgttcatataaaagtttttaaaaatccaacacaaaaataagatgatctatactagtaaataaaacacataagtcgttccacaagttgggtttgaattggaagttcatgattctttactacaacaaatatttcgattcaaatcacaatcatctattaacactcataagcatcatgagagggacttatatgtatgagaccttcttagagtaagaattgctacaagtgaagattcccttgatgatatgccctgttcctaccgcgatggccttggctacaccatttttgtagtcttcagccttcggtgcaaactttttccaatcaatttcattgttgttcttacctgaagtacttgaagatttctcccccatgatatctccaagaaactcagggttttccatgatttctccgtcttcccctaagaaactcaaggctagctccaacagttcggatttatcgacgatttggactccgtaatcgggattctccaacaaaacttcttcgttcaccgcttgggcagattggttttcttgggttgatgtggacattgtgtcttctttcttagtacagtagtacttttaagtttggtttatatgtgaggctcgttcctatataatgttggatgatcgaaggtaatgacgtaaacacttaccatttgatcatattaataaccaacaaaaatgtaagaccataaaatatgatcatatagcttggtagtgaagaataagtaaaattttctagttgtataactagcaagttgtttcaacagaagatgagagaataccttttcttaatatatgatttcatctatagaaacaacttctaaatttgaccatacgtgttatgttttccaagacttcatcaagttgcttgtttaactggtttttgtagagtttacattggtgttttgtgatatcattctcctaaggtatgttatacataatcccaagtgtgttattcttctctgatgaattatattcccccaaaattgagttttatatgttttgtttcaatagttgacaaatagaattagttctacgcaatcaaatcgttcatattatttccatcgacattaacagattgaaatgtaattaggaagagggcgtcaaataaaaactaattgttttaatttgaccagtttttcatattgtacttataccaaatcggactacttgtgtaattggttacactagttttgacatgtaataagttgtattagttttcctataaaatattaaaaaaatgtatttgaacaaaggttaaataaatattgtcatcatctcgagaagacataatcaatacagtcattgtcataaaacttaacatactttgtagagcttatgacattttgagtagctcattgatacattacaaactatagctgatgagtccacattatgtagagaatctaaatataaaaactgagcttgtttttgggggtttccatcgatcatacattgataaacgtaactgaaactataacccactatatatcactttcttggagcatttttgacgattcctgatgtaagagaagatgaaggatagaaagtcttacggatcttgagaacattccaggcagttccagctgcgtggcccgctgttgctagaacatctccggtggcctcccctgcgttatctccaaacctgttttgccaaacatgttattattaatttattatcaccttaaaactcttaaaaatgtgtatcatcactaatgacttctcaatggacacatgttagatttgaggattataaggtgaaaatgttacctctcactgaccattctggtagcagccctggatgttgcagatagagtttgtctctctgcagcttcagttgcatctagtattttatctattggatcaaaccaaacattacacctcattaaagttttttttttcacacccataacttttatttgctctagtttttgaccacaaaaaaagattttacatagttatatatcataacttactaagggcatcaagtgaagctaagaggacctcccctggaaccatcgaaaagaaggccatccctggtttcgacttcatcatagggaccatcacagagccgctcacaactcccgcaccattcaacatcgtcttgctcagattctcagtcgcctttgacagcttcctcactctatatacatgttacatccatccaacacagcagccaagatattaaacgaatcaaaaaccacaatttatgtctttgttctttgtttgcgtttacatttgagtgtatatacttccattgtgaaaatttcttacgtaacaaaaaatatacaatgttataaaactattgagtgagtaccgttgaaggtgtgtgttgatcccatttttcttctcattaccactggagtttccattgttgtaacttccatttctctggctctcctcagcctttgtaatcattatgtcgcctcccttgtgaacctgttctatcataaaactcatgatcatctctcactatatatacatcaagagagcttcgaatatatcatgagggtgtgatttaaacctggttagagtaagcattactgagactaaagattcctctaatgatatgtcctgttcctccagcaatagccttagcaacaacgttgttgtaatcttcaatcctcggcgcaaactcttgccagtcgattccattgttaaccttactcgaagccgtagacgagaaacaagaattctcactcaagaattggtcaagcaacttcagactgttcacgagggctacgtctctgtcatcgccagagaaagtgaccccgtagctaagtggatcaccgtctttaaccgggagagtgaagaggtaatcacgggcgtcaagttttaccactggctcatctctaatcactggccactgaaggtcatgtccgattctcacgatcatagctagagttacaccgttgtctgagaccttaacgagcttgaaatcaccagaggcaagctccaccgcctcggattcgcctatgagatggactctacatctaggaatctgcaacagaacttcttcagctctcatggtttgaggttgatgagaggggttttgtcgtgttatcttgtcatgttcattgtttcttgttcttgaagcctttgatggtccgaaacatcccattttcttgtctgcttgtttttttcttcttgaaagtgaatgctctctaagaggttttgtaatcttgaaacagaggatgagattattaaaaaaagccttttgttggaatattttttaactttaactcatatattcttttcagagtgaataaattcttgcttccacagttttcctcacttccgatggaaatgggaacaaaactttacgacgttacacacatctacaagtacgaatatgcgtacacgtagacacatctacattacacgtgtactttaatgcatgttctatgtgattggaacctacttacgtaagcagtcttatgtactgctcgtgaaaagaattagaagtcggttgttctgtgaaagaacttggatacatgacaatgaccagtgtgaacttaagcatggtggtcctgaatatagaaggcgactttagtaaattgacaactttgttcttttcgtaaatgttatccaaatgtgatttcatgtcctttaattggacactggaaaggagagtttaaaccaatagacactaaaggtaaaagaagcagaatatgaaacacataaatttgaattggaatctgattctacaattgccatgccagtcattaacgaataatatccaatacagatcttcgaattagttaagctgactcaaaagtttcactagcttcacattttctatcaataatggtatcaataatgtgcttttaggccataaaacttcttgtagtctagtggtcatagatatggtttcgcataaaactgatcatgattaggaggaagaggaaatagagagattatatatatatatatagagagagagagaatgttgagaaggcgtaagcttaaacaatgacaagtctaactaagatcatctatatattacacagatttaacaatttccatttactccaataatctagcgtcacttgatatcgctgaatctatcttagtacctgaagggtctatgatttcaaaagaattcgggatttgttcttgtgtagagagactgactagcttgagctcctcattaagtaagctaccacgcatcctaaaatcccacctgctgcaacctgtatttcaatctcataacttagcaatagaatgtaacatcctatggttaatacatggcgaatacggtgactttagttctatatgtttcagctttatgaaatctagatctaattctaacatggttatgacacagtcattggacttaaaaatgtttaatgattggaatgataaaaagaattgactggtgggtatagaaaacctggataggagtgtggccaagcagttcacgcaatggtctaactgttgataatggatgctccggaggaaactcacaaacaatttgattcagcagctgaaatttccaatcaagtgaaaaaggcttgcggtttcagaaagcatggaacaataaaagaagatgaaaacagatgagattaataacttttctatagctttacctcggcttgacgaccagcatgaagcctgacaccagaggcatcatacataacctgcagcccaattcagaaatatacaaaagattggtcttactatgaaaccaaataggctattcacaatgaaagcaaaaatctcttttctacactaaacaaagcaaggcatttgtaagacaaattgtgaagtggaaaagaagatgagaagaacactcacaacgcaagccaagacaactgcaatagcaaaagctggtgctccagctccttcttcaaagccaatggcaacagctaaggcagtgacagtagcagaatgagaagaaggcattccaccagaactaatcatacgtttagagtcccacctcttttctttgtacctgaacatctaacatacatcacgaaacaactgagaattccacttctttcaatcttaactacaacagatctatagctacacaaatgccaacattcaacttctgagacctaatcatgagcaaaaatttgcaaatcctaattaatccatcgaaaatcgaaaccctaacagtaagaaatttgttcaatcacagatcttaagcagagatcaaactaatctgagaaaacgaaagatttgaacagaccaattagtgaagactttgaggaactgagcaagagcgaaggcaagaaaagcggagaagattgggagattgtgaggaaacagattatgcgacggaggagatccgtacaacgccctattgccgccacctaacgaaccaacgtccgccgctgtcatcacctcgtccataggcgatatacaaccgcgaaaaaatcccgatctcttcttcttcttcgatcaaaatcagacactgcgaggatcaatgtcaacgtaaaaaggtaaagagattcaggagaagagagtattgaattgttttcgataagcttttaggctttttgtgttggttccgtatttgggaaggatcaattattgtgttaaaaggaaatcaattttacctttttaatttttttgcacttttgtttttcaatattgctgaatgttgactaataacttatttgatttgttttagataaatttgatgacctctatttgatattgttttttttttgtatatatatgatatagcaaaaaccaaagtaaactttggaaaacttctttctattaataagaagaaacgttcgtaaaaaatcataaaaatctcatcaccacttttcactaagtattagtattactaagtaaaggtttcagcagagccgctattaaacctccttgagccacgtttagtcgccactaaatccggcgtcttatcgggcgctggctcctccacaaccatctcattagctagattatctgcagctttaaacaccggatgtgcatacgcgttttgaagaaacgttttcaagtttaaattcggttctctcatgcgttccaacgtatctttaaccattgcatcctgaaaacaagaagaaactcactaagaagaccaaaaacacaagaagactcatttcttggtaagagtagaaaacctgtaaagggtatgtgacaaatataggttggtaacgtccttgacagaatttgtggaatccaatggttaacacaggaagtatgaaaagcaatggagtcgaacgagcagcttttttcgtgctaagcaatcccatcaaaagaagctgagatacgatcagtgcaatcactacacgtctatgaacatctggccagaacgctgcagcactctcatactcttggttatacacatttataatctgcaacaaaaagaacttagtttcttaagcatataatagaatatagaaagaagcagaggattctgtgatttgggttttaaacctgatgacggtaaaccacgtaagctaaggcgaagaagacgaggataaaaggaaggagaatggggctaacagcggcgtaaactagaccaagaatgaagtagagttgtatctgaggttcaccagtattgaaacctatggttccaggatccattgcttcttctctgtccttctctgttttcacaaggaagaagttcttgagatgatatattatcaatggctttaacctcagtatctctccagcaacaccagcccatccgtctaccattatgtaggtgataaagaaagtggctttcattggtatcgagacaccaattgtcttcggtatttcggttgcagattggtttaggaagctgtcaagttgttgaagcgcagttcccgcgattatgctacagaggaaaacgttgatgaactggaacatgtagtatctgcttgcacaccttctttctagtgaagatttgcttatgaagccttcgaacttcgacattagcattagtatacttgggaggacaatgaggaatatcttcaatgcgatacccggaagaaaaccttggataaatgactttacagttttcctgtccacatacacaaagatttcagagaaacatcatcacaagttaaggaacagagaattaaggttgagagattatacacttcgataagcggtttcaagaacggaacagccttttcgatgccttcgatattggcgagtgtctgtacgaaagctatagggatcatgaagaagaaagtgaggaagaagaaagctacagctattactagtctccggattgtgagctgaacatatggtaatgctagattgtcccagtatatgtctcgcggctctggagcccactcggttagccactctgtcgggtttcgagactgttgagtttgagagcaaacaacagcgccccaacgctttttgaaggatacaaaagctgcaggtacgagtgattttgtgctgctcattactgtctctttctcttcacttatctgaaaccatcaaagtaaagaaacaacaagatgatcaaaaacaagtttagtagcacaagattatatgtaagattgaactgatgcatttacttttctcgttagaccctcgattttttctatgtagtgatcaattgcatcaacttcttcaccccaacagccaaggaaaccaatctgctcaggtaaatagaagattatcaagattcaactaaagagaagatcaagaaagcaatgtggttgcatacatttgtcttacctttattaaaggccttttagatggattcctagagtgtttgttttgatagtaatcaagccaattctgcaatttcatcctcttctgtaccagttccgacagcttgtttgcgttgtagaccgcctgttttgttaaacgagaagatgaatacaccgaaaacatggaacatcctaagttagacaaccaaagttgtagtacctggtaagtgaggtagtagtctggatggttgaccttaaagaaatgctcaacgagctcacttactgattcatcaggatctggaggaatgttccttacaagaacctacattcatcaaaaaatagaatcacataccacatttcctcttcagaaaactcaaaaagtaagtggaccaagagatttaaaatgtctgcatacagtaaactggtcaggtctcctatgctcagaagcaagaaactgtagcctcatggaagcaatatgcttgtactctcgttgtaggacaaagcaagtccaaaaggtaataacataagccatacacaaatgcacccaaaacctgtttacatatactagtcagaatattcctcatcactagaatcaactaaagccacaaatattaaagaagtttcttaacctggatgatccagttggtatattcgatatagagagtttatcaatatcactaaaagttagattctttaactgatccaacgtcgagttagtccaattaaccggtaccattacagtgaaagcaatacatgctataggaaaaaagatcttcaacctacaaattaaaccaaagatatcacaaacttgtttaaaacattcaagaaagaagaaaggatatacaaatatacatacccgagtaagtaaatcctgagatagacaacagaatccaaaccagcatgatcaataagttcaggctcaggcattctcaaagcttgaggcatccaattcaagaatctgatgtaagatcgaaaatccaaattgacaaacttgctagcaaagccacctgtttttataggactacttcttaaacccttgagataccatttagggaaatagactctgtcgttaactggttgaagtctaagtatcgcaaaggcaatgaagaaagcaaatgcggttagaatattgatcgttgctgcgactccgatatcggttagtgtcgccatgatttagagagaaacacacaatgttcctgaaacaaacgaaaaaaattagggttccttgcaatccaaggacttccaaattgccaatatttttagctagtttttctccataaatttctcgtttcacccagaaatcggaatttttggatcctagtcatagtcttttcagattccgtcaaatccattaaacactgaatcaactctacaaatgagtgattcttcacatgaatgtgaaagatagagataaagtttaagtttttacctttctcaagagctcagcgatgaaactcgtcttgttgtttctatctgtgaagtcaaacaacgttgagcagagaatgaaggagaggaagaagaagaagaagaaagtattagggatcaaaagaagaagcagaaacattcataaaaatgagatttttaatttgtgtgtttgggtttattttggaaattgatccaaagattcaactgaagtgagatttctgctgattcatacgttttgggtgttacaagtccatttaattaattaattaactaatttagcgaaccgaggattaaacggtgaaggacacctggcaaaagagattaatttgtgttaaataaagtaatagtgttaattaaggaatttgtattttaattgaatgttttgttgtttaggacatcgtccgttactgggttccttttcagtttctttagagaagcaataatggtttattagccttataggtctcgccgtattagcatgttatttatgttcatattataacggctgtattttatattggtttaacgttttctaatgtatttatttattccctgatttgaaagtttagaggacacattatgttaaaaaaaaaggtttgagatctgacttttggaatgaaaaagttttgatttaatattagtcagtttaaggtaactttttgtgtgttttaaataattattccgttacaaataatggacaaacgaaaaaaaatcatagatatatgtagccgtatctgtatgttgttgacagaagaaaaaaacaaaaaatgaaatatattggtttatggtaaaagaatattcgattactctatttctaataaagaaaatctagctaggtgaaataagaaacatacttagtgttctaagctggaatatagattttatgtattggggaatccatgtgacaaaatcattcgaatttctttggtgttatggaagacttgttctaagcttcgtgagagtatccatcacaaaaagttatatttttatgttttgatttttttgtcggcaaactcgatttcaaaaaatttatttatgagaattttaatgcatttcattattatctttgacgtgagatgctgatatcggagacgttgaataattgacatatagagcgttatagaaaatcatataaaagtcaacttgtgagttgtgacatgtaaagttcgtatagacagacaaaatatacgtgagcataccaaaaaacaatcatttctatataacaacagcaaaccggaaaacgagtctaccggccggacataagactgactaaatcttcgttttggaagtttccaacatcccaatttccggtagacgaaaagagagtggataaagcaaccacaatgtatctcatactcggacgtagctgcgcattctcttgtgtacatgctttccctaattccgccatctataccacaacacataaaacaccaaattggcttaccccgttattaaaattagctatgtgcaatccggtattcggtttgatttttcgacactttaagctaatcgaatagcacattgttcagtgaataccggtttttaaaaatcgcacttttaatcggtttttcggaccaaaaaacggattggacaccctcttttagaatgatcaatgatgaatagaatagggaacaagaagagatattaccttgtataccgaatcaaacgggtaactatcaccgagcctcgggtctataatcttgcgtagtgcttcttctttgtcggtttccttgaatgattcttcgaactgaataataaataaacaaagcatattgttaagtgatccacatacatgcctttaaatcagaaagactaaatgttacgaagaaacaataatactaaccacaccaacaaggcctctaaattcaccaacggcttctgtcattttgacaaccgcacctttcgcagaaatcaattcgtaaaggacaactccaaatgcatatacatctacttttgcagacacttctccataaacagtcctgcatacatacatatatacaccatcactatagtgtagtctctaaagtagtatataagtgtaaacgagatcaaattctttactctggtgccatgtaaccaaatgtacccattgcaccccgagttgctgaacctccaacttctgtcagttttgttaacccgaaatctgctacctgtaacacgtaaacgactcagagcggtgacaaaggaaaaatctaaccttttcagtatttttcacttttgattgacaaaagagaaatcgagaatgtacctttgctcggaatttctggtctatcaaaatattggcagatttaatgtccctatggacataaactggaaccgtgtgctcgtggatatattctaaacctctagctgagtctagtgcaatctgcactctcttagtccacggtaatggttctcgtcctagtttcacataaactcttttagtttacaactttctcgaaaaatgattcacttttggaggtctttatattgcgtacctgacccatgtaaatgttgtccaaggttaccattctcaacatattcatacaccaagaaaagtgatccctcaacacaatatccaatcaggcgaacctgcaagaaaaaacaaattcgttaaaatttggctaagacttgatcttcatctgatctcagatattatcttgagagaacacaaaaggggtttaccaggttgacatgatgtacacgcgttaagacttttagttccgccaagaactgtttcgatgcctccatgtccatcttcttaatcgcagctttctatacaagaaccgaataatttaaatgttccatgtgtagtagcttcaaacaaaaagatataaaaagatatctgcttacttctcctctcagctctgcatagtaaacagccccaaaaccaccttgcccaatcttaaaagacaaattgaaattatcagtagcctttgctagttcctccaacgaaaactcaacagatttgtccacgcttatggcagcaatgccaggagacactccggcaccacccaaacctccactttggagactagtagaagaagctaaaagcagatttcatataaacataataagcaactcccagctaacaaaagagacaaaaactgcttgtatatgatcatcacgaaattaccatgatcagccttagtagacaacggaatagaagaagaaaacgaatcacccttcgacttattcttccggtaagcataatatacgataaacaagatcaacaacaaagccacaatcactcctataactataccagcaataactccagcaccaacaccatctgctaatacaaaaaaatatcaaaaacatactcttccatgtctcctcttgcttcgtgcataatcatcaaaagctcaaaaatggagaaaagaaccaaccttgtttactacaaaaaacataagagaagtagaaatacatcagtaaatagatatcaaaatgaacaaagatacaatcttaacaacaacaaaaacaaccttgatttgaatggtggaaatgcaccatttggatctgcaaaaaacacaggaacatgtacataaacttcaacaatcattactacatttataacaatttgtgtcacaaatcatcaaagatcaatctttgtacctcttccaggcacataaacgattccattcccggagttaaaattaacaccgggattatatctctgcagaatatccgccgatacaccggaagatctcgcaatagaactgagactgtcttcaggacgaagcggatacgtaacaaacaaaccaaaatctttcgaaacactctcatcaccacaagaacaattcaccaatacattaagcgtcgcagagagaggtatgttagtcgccggaaaaggattcctcgcctgtaacgactccatcgtcgtgagattcgcgtaattactaatcgcgactctttcgtaagtatcttcctgtcgaacactgtagctgaaattgtgccctaggaaatcaccaggttgacattcgcaagggaaaggtacaagaaccctagagcccatctggattctatctttgtctttaatgttactgttgtacctgaggattggatcgaaattgatttgatcgtaaggcgcgattgaagaattgaggttttggttgatgacggagagtgttgttccgttctcgagatagtacgaagctagagctaaaggacagctagtcctgcacttagattccacggcgaagaagaatgagaagagaagaagaatcggagcgattagagaaatctttagcttcattttgaagcttccttagattccccagaggaagggtctctgttttttttgtttcgtcgttgctctgtggggaagaagatggattcaaagacgaaaaaggttgacttaatcaaacgttgactatttttttcaactaaagagaatgatgattactgattagtgtttgttaattgttgagaagtttcttaattaattaataatactaagatcatttaatgcaactagcagctggaatttgaaagtctttggtcaaagacaaaaactatgaagaccgccatttctgttgaaggaagtagattttacgttcgaattttgtatgttttttgttaaaaatttatttttttggatcaaaatataaagttactttataatcgaaaacaatagagactatttttttttcttatataaaatatttttcaaaattctcactaataagaaatgggggtagatctttcacgttggtcttttagagttgaattgttacccttcttcatacattaatctgctttaactctgtggcgtcgaaagatacgggagaaaagggaaacaaaccattgccataacactatcaaccaaaaaaggctctttgacttagcaccaccttcatctttccctttgaatattcctttgtacatttctttctgcttttggtacaaggctttctcttgctctgcaagtgctcgtagctctcttctaatcgccttgtcgtcaggagcatacttttgtgcctttcggaaatcatcacgtgctgagtccatctgtcctagctctgcctttgctttccctcttctgaacagtgcttttgggtttttctcttcttctgtcaacacctgataaggttttgagtttgattagatttcgagaaaccgagtatgaactttaatgattttcttcaaatgaatggtttgatgagtcttacaatgttgcagtgaccaattgcttcatcgtatcgttttagtttgatgaggcaagctgctatgttaagatggcatgggtttttaactgctaaagccatatcctggtacttcccatacagctgaaacataaaatcgtcccccatgtatgctatggcctgaaacagcaaaaccatgactaatcaaaagccgaaagaagacacaagagcctcgagcagactcactaagtatgcctgaaaacctaaactttgaccgtaattgttggaaagagagatagagatagagagagatgcataaccatttcatactgttgcatggcttcctccagtttctcctccttaaaaagagaattcccatccatttttcttctgtctgctgcaccaatcctttcctctacagtcatatcactgcgagcttttccctgttcaatacatcatctaagtcagagaggtaagcaaggaggttgggataaagcttggatgtggagtcgtcttggtaaggaaacaagatgatggtataggaaataacttacctcctttgtttcatcaaacccaataacttccacctcatataacaagtctgccataggtggaacattcggaaaagaaaagtttccttctttcccataagctaattcccagccaacatgcacaagcgcacgttcaccagacttcatgctagcaacaccgatggctaaaccggctagttcttttttctctgtctcacagacaacatttcactcttagtgcacaatcttttttataaaaaaaattgtatagtgacgttaaaatgggctaatcagcattgaagcaaaaaaaatacaaaactcaatcttttttcctcccaaatatccatctcattgggttcatataatacacaagctaactcatcaaatttaccaatgacgattcatctaacgaaatggaggtgtagagtacatattcgacagccacataccttttccaagaaccaattcaataggttgctgctcatgccatgtatcctcaaatttgtgctgcgagtttttggtccatgccctgtagtgcactatggccaatatgaaattggtcagatagaaagattcaaataaacagtagcaataggccaacaagtgcaatcgaaaaatcaacatccaatcaacagaaagctaaagggtacttacaaaagcatgtagagtacttggatggtttggaaccgtgaccttcctttataatctgcttactgactttctcatccaagacctcagcttcactatcaactttaggaggaacattaccctcttgagatggctcactatgcacaacggcacttccttcagtaactatttcgctctcttggtctggagccacaaaagatgcattagtcaaccccaatagtcattctcaattcttaacaaacagaaaaggagttatcaagtctaacaaatttgttgtatacatgctttgttccaagattcacaatatgatttagaaagaataacgcagtcaacataatttgatagacatttatcctttaacaaagcatccaattgaatatgggacaacaaaaaaactccaatcaaacatattgaagtcatatatatgtattcagagagattaaatctatgaaaatttacttaccatgtgtttgagtttgatgctccagagattcatccattatttcccaaatcaacctgggtctgaataaaaatgtgcaagtgtcaatccaaaaattgaatctttaagtgttgaattgattaaacatcgaccaaatcagacaagtaagattcaatgacaaaaacccaaaagaacatagtcgaagtcagctacttgaaccatttcatttcaaaacaaaatcaagtctcgtcgtcaataatagcagaaaacgaagaaaaagtttgtcaatttagagaagaggagagtgaacttacgaagtatgagaagctcaagagtagtgtgactcgtcgtcgtcgtcgaagtcactcacgaagactggatcgaccgagagataaatttcagattttgattctgaaaatataaagagacccttcgacttttcagttttcacttcagagtcagccgttaactaacgagagttttaacggcgtttattataattcagtaaaataatatcaaatattctcaatttgacccaaaagattataatttaaaaaaataattatacagtcgtctctcaagaaccatttctatagtgaccacaaatatttgttacaagtacatagtaacctacgagagcctactacgaccctgtggactcagagctgcttgtagtaagattgactgaggacacaaatcttggaaccagtactgcctcgttggttacaacggtctttgaagtagctaaatcttctaaccgttgccatgtcctttcccgtttcgctttaacctctgttttattcacttcttctacttggaatttggctaaacactcgtcgaaaagaacttggtcaatctcgcataatactttcctcacgtttatagtcagactttgaactgcttggttccaatgtccacgcgtgtttctctcaagagctgggaagactataggcattatcactttatggttctgagtgatcaggtttcttatgtgatcgttgttccatagaaacaatgctctttcagcaacctgacaaacaaaaagtacaacttcatatataggtacaagactttatcaagagagatagatatgaagttgtgatgatagtcaaagactcgaacctggaaatgtgaactgttgaggcatcgagcaatttgtcgggataatggaaccatacaacgttgaaactcagcggcttgagttgcttccaagacttcttctaactctccaagaaacataacttcctttgagctgttagtcacaggccaatattttaaaagacctctaataacggtatcagcgagcttgaagtccttttctacaaactgaacaatgcaatacgaaagctgttggtgatagactgatgaacatttaggcttgtggagaggaatcaaggctcgcaaaaggaagagcttgtgctcttcttttaaaggcaaagcaaaaccattaattatacttccaagaatctctagcaactccgcaatgccattatgcttttcagtctcggatatgaatctgtagaagatattgtttatcgcctttctgatgtaaggtcgatgcaccatgaacttcccgtacacccgatgcagaatagtttttagatattccctctctctttgatcttcagaatcaaacaagtctaagagcttcaagacaaaagaatggtcaatatatctcttggcaagctttgcatcagtcatgggagaagccacgaatctgagaagaatctcatacacaacttgaacatgaggccaagctggctccaaagaaggttcttcatcatccatatcatgtatttcaagaattttactctcgtgattcgcagaaggaaaagttctaaacagattaaccgctaccatcttcgttaactcttgcatcgaaacatcgttaaacttaaaaccaactgatgcaacataatcaacaagctcaagcaatgtctgcctcttaatctctttctccttaaggttcttagacggatcactaaagtcaaaaacaacacagcacatactcaacttcccgataaagagattcggtttctccgatataggaacatctctaaagctaggcaaagcctcataaaccccaccagaagacggaaacggtccagcttgtacaacagcatctcctcccaatggtttcttcccttgattagtattcctattagagctcattgagttaggagcaagagttccattagctacacgcgaacccgaggctgatgatgatttcgaagatgttgaagaaggtttagagatactagtagtactcgaattcgaagcataataagaattattaacacctccttcaccattggagtcattctgcaatgatttggaaggctttctaggtaatttcccaaatatctgtttgatcatttctaactattggcacaaacccttcactactattactctctataagaaccaaagctaaaaaccagctgtgagtatgtcaaaaagtcccgaactttattgtctaaacaaaaccagatttgcctctgaatcaaaccctgaacccaaaattacataacagaatcagatcaagcaaaacaaaatctaacaaacgaaataaaaggagaagggcttacatttttgagcagaattaaccccgagagagaggaaatcagaagaaaaccctaagaaagttacaaactttaggcaagagggatctagctgataaacccaggaaagacaaaagaccgctcctttctcgcccaaattgaaatcgagcgagagagaggagaagaaaagagagaaaaaaaaaagacaacgaaatccaaaagaaatatgtaagaaagagagaacaaaagaaaaaaaacaaatgttgagattataaggttgtaatgaacaagaatagaagaaagtaatcgttttcttctctccttatccttctttctctctatctggatatttactgtaaatctaaatccatttaaacacttaatcgttttgctctgaatcgaataacaaacctggaacatccagatattttctaaaaaaatttattgtttttttttataaacatcacagagacacacacacataggtggaaagaacagaaggaaaaatcaataaacatggacacgcacggtttgacagaatggcaggtgagtcaaaaaagtcaaaacaaccctgaaaagtaaacgttttacatggtcgtcaaatagtaagtcgtcaattttcgtttaattcaccaatcccatttcattatgacgccatcaacgtcctaatttgatcaattaacttctatagttaaggagagaaacttgtgtgagaataaaaagtataaaactcaacaagtacgtaaactgtacttttttcatgatcaaagacgactacacagcgtttgaccaataataatttcgctagtcaaacataagactagcgaaaagtcaataaaaagtttatgatgctattttgtaaccatagaattggtctctaatgtgcttagaaaagagctagaatttttggacgaggacagagttggcgatgccagccttctcgatggtttggtcaaagtccgacagtggtgtaggaggagaccccatgatgagtaattggtagtctttggagccatctggtctagacgtgtctatgaagcatcgaatgtctctaatggtgtggtgagtattgaactgggtgacaatgcgtgtgctgtctgctaatataagctggatcgaggttgttggcgctgcaggatccaccactaatgagctcatggatggtggttgtgtagtcgtcaatggtggctcagtagaggtagactctgatccggctagagtttgtaactcctgttgttaaaaatattagctcattttaatcagagaagagaaaaagattagagagagagggaaggagatcagtatacactgaaattttcttcacacttgatgagtttgacttgaacacgaagtggatcgagtagtcgtggggactccaaacttgttatcctctggcatatacttggaacattatgttatccaagtgaaacaagtacagagaaagacccataattgaaaatgacaagaagatattgatattagtaacctcgagaaaagctgcattttctggatcatccaaactcttaaacggatcatcatcgacagtgaaaccgttcctccaaatagttacagtgtacgtgactacttcatatggctggtcttcttgctgttgttcttgaagctcagctgaatcagtttctccagacaatacctttgatgattgctcagatctttctatagctgactccttagctctgtcgaaaagcgtatctacatctttagctttcgcacaagcatcccattaaagctacaacatacattcaaaaaccttcttctacaagacttgcaaaaaccatcaacatctttatcctatacacaagatccttgcagtatcatggattcttgaacagcacatttcttcagagttttgagaaattaacgattcatctccttcagaaaagcacattgtcatataacctcattgctaaagctggtggtggcttagttgaggcagagtctgatccggcttgtgattcctgttgttaagatataagaataagggctttcactttaccggcttatttgaatcagagaagagagaaggagacaaatatacagtgtagttttcttcttcacggctaatgattttgacttgaacacggacttgaccgagttcacgtggggactccatacttgatatgatctggcattgtcatggaacataatgttatctaaagtaatacagagaaagaccaatacccttgtaagttgtaactatactatgttgtatgtaacacaacttgaaaatggcaagaaggtattgaattagtaacctcaagaaaggttgcattttccgggtcatccaacgtctttaacgagctatcatcgacagtgaaaccgttgctccagcttgttacagtgtgcgtaaacactttttgaggctcttcttcaagctcagatgaaacagtttcttcagacattgatcttgatgattgctcaggtctttctatagctctgtcaaaaattgcaacaacatatctgaggatcttgcacaaataatcactaaagctagcacaaacattcaaaatattgcagaactgagaccttaaggacttgcaaaaaccatcacaatcctgtaatacacaagatccttgaacagcacaatttggactaacctattctcttctccgccgtagtgctccaccgcttcatcggaatcgcttccagttccgccggagaaatcatcgatacggacattcccagcgccttgacggcgtttattctgcctagaaaatggattagctgctgcacgttttaacgacggccacggtggtcgtaactgtaaccgcgacggagagtaaccggaagagccatcaaacgtagaaaaagatgaagtagggattttgattcgtagatttggaaacgaacttggattacgccggagaagttcgtcgttagggtttggaacatttggcttggcggcgtcggcggagacttcgttcttagtaaaggtggaaacagcagcattgagattccattgatgagtttcaagaaaagatatagctacttctctcgaacaagatgtttctccgtcgtctccggcgagttaacgtccatcgcaagattacgtttcttctccgatcttcttctctaaaacctctgttttataacttcagtatcgactaaagagaacaaaacgcgtcgttttgtagagttcttgaaagagcaggagaaaaaactatagtaactaaatttttaaaaatcttacaaaaaaaaatacaatccaaaccatatagtaatctttctatttcatacacacaatatactaaaaatacaaagacaaaatgaaatcttcaaagcaaataacaaaaccagaggttttttttcttcttctaaatctggtttcaaggaatgtccttaagctcaaattcagagctctctttcttcgtcacttccttctccactgaatcatcatcagtcacaacaacagtaatcacatcagctttatactgatgtttcatggcaaacacaataaaaatcaagaagttcaatgctcccaagacaacaagtaaccagtagaagtagttcaatctcgctttgttaaggttacttctaagccagcttttgtctgtaaccctatcaacaagcgaaacaagcaagctactcacgaagaatcccatcgatatcgtgcttagaaacaatccggtgctcatcgatttcatcctctctggtgcttctcttataaagaactcaagctgtccaacgtaagcaaaggcctcacccgcaccgactaagaaatattgtggaaccaaccaaaacgcgcttattttcttatcgttgttaaccgctgcctcgcgtctagcgttctctataaccgcggctacagccattgcagccattgagaatactagccctactccgattctctgtaggcttgtgattccttgaggcttttttgtgagccttcttgttaaaggaacaaagactctctcgttaagggaagtgaagaggagaattgtgagtatgaggaaagcagagtaagagcctgcaggaacagtgaaagatccgagttttcggtccataaacgtcgcttgttcgaccgtgaaagtcgtcatttgggagtaaatcgtccagaaaagaatgttcgttgcccaaatcggtaccaatttcatcacgagtttcacttcttcgacttgtgtaacagtcgaaacgatccacggatccttctcttcgaagtccttcgagctaggagagctctcgttcttggaaattgcggctttgtctaaacacttaagcatctctgtgtgtggaaccgtggtgttgtcataaccgttcaaaagacttggatgcgcagggtaactctcctttcttttcttccaagccaagaaaccaaccctccatattgttgtaaaagggcttcctttaggtttcttgaaacggtaccgtttcgttccgcagagtaaaacaatggctgcaaccaccatagtcgcggcagagatcccgtaaccccagcctctcccgacgttgtcctgaacgtaaacaagagcaatcacggcgaagagagagccgacgctgatggagaaatagaatctgttgaagaagaaaatcatctgtttctcttctttaggatcactagtatcgaactggtcagacccaaaaccagagacgttggatttgattcctcctccgcctagagctatggtatagagagcaacatagagaagagccaactggtgtccgtttgcttctatgcactgatgatgaagtctcctgaaatcgtcacatattggtggtctcatgcttgagatagttgtagccaccgtcaaaagcaacactccctgttttcacagaaacaaggaattagagctagaaagtctcaagccaatcgagctacaagtacgtggtttaagagcttaccagagctgtgacagaagctgagattgcaaccatcttgtagcgaccgagtttagcgtcagccaaaaaaccaccgagaagccctagaaggttaagagttcccatgaagttggtgactatggtcgctgatttagctgatgagatgtgtaaatctccaacaaggtacgtcactagattcattgatatgcccatcacgcatattctctctgatagctcgctcccttcacattaagaagatacagaggagtgttagaaacagaggagtcactcttttttcacattaagaattaagactttacctaaaattaaaccggcgcctaaccatccaccggttttagacttatctggtgggtttcctctgtaatcataggcttcttcagagccatctttggctccatgagatgatgacacatgaacctttagagacaagcaaaaccattaagaacataagaaacagaggaaacaaaaaaaaaacagagagaaaaaactttttaactcaccattttcttatttgagcagttagactctgagagaagaaagcagagaagcgtgagttataaggagaagtttaagatggtagtggaggttatagcgataagggttttgacacttttattagacctttgattttatctaactccaacaaaacaaaagaagaaatgagaggagatacgattcaaatgggcatgtgaagagagatggggattgattgatatatgatgggtctttatataaaatgtggctttgctttttgtgtggttgtttcagcgatatatgatcagatagatctaaacaaacattgagacaacagtgtgatttcattatcttatgacaaagacatttgtttatttcatgtggttgcaaggttttctgcttctttgtaattccccatgtccattactctcttttgtctctttataccattttgtttgtggttgcaatgagtttttttttagcttctttgtatttttcccacgtcctcttctccttcaacaaatctcttaccatccatactatagaattgttttttattgttaagattttacattaattggagacatatcaaaaatctttgtctttatatcatgtgtgccagattgtggttgtttattgatctaccacgtggacagtttttactgagttatacacacaaggttcaagattaatctgaactctcactggtacaaatatgcatggtctctaatattttgggatgacttgttaagcattaaagttagtgctttcacttcaatatcacatggttcatattaatgttcaatcattagtgtgagtgttgttctttaatgagtatttcgtttcattagaaatgttttggtggatcaaaaaatcatgaaccaatttgtacttgattaagaaaattatgactatatatatatatcaccaagagtatgtttaaatcagactggtttttgttcacaacatccctaggacatacacttagtaatttagtataccaaaatgttgaatcatttggaactaggtttaatggattatttttagctaaaaggatttgttagatccacaagaagctagtctataacttttaagaaagatacaagatttcaggtgtcacataggaaattacgaattgcgtattcaaccagagatgtgtaaagcaaaaaaaaaacatattatttccgttataagtaatattcgaaagtgactgtaatcaaggtgaatatgacatgtaaaaaaatccatgaaatggaggaagatatttacttagagagatccactgattaaaaagctgtacatgttaatgaattgatccctctacttgaaatgatgttagcaatataagtcaagaaagcagcaaatacattaaagttaaagttcattatagaatttttcctccaatggttaaggtaaagttgaggtttaaggttccccgaccactacaagttgcaatctttctttgtggacgtcatgattatagtttcaccattatactgggattctctattcatgaacgttagcatcggccctactatataattaatgtatccacgtcaatactaattgttataagttaaaatcatattaaaataggacatttgtttctatagttttcatggtgagttatattctagaaaccaagagtctgtgtttaaagttagaataaacaaatagagtgggttcatcttcttgcacaccaatcagataaaaacaatggaaacttgttttagtacactggaaaaagaaaagaccaaataaatgtagaatagtttgccaaaactaaaaaaaaagaataaaagtagagtaaaaacaatatttgttcaactaagtgaactacactgacactgaataatggatacttttcatgaactgttttttcaatgttcttattgatttataaccattgtactctttagtaaattggtatcggattctagttttgttgggttggtgaagtaattgagattatttagtgttcagtcttccccaaaagatatattttctcaaaacttttggaaaagggtaagtgattctaatcaagatttagttaatataaacatgaatgtgcattattaagcttatgtgggacaatcccactagtctcatagcccaaccatagccaattcaacacgtagtcgtattatagaatcgaatttgttatgttaactctaaaggatatactaaagattcttatattttctttgtgagaaaaatatatgatatgcttgttaggattttgcccaaaaaaaaaaaggtgtctgttgggaatttcatattagtcatatgatagaaaataatgtaatactatataaaagatattggtcaatccaatcgattggagttgaaaactcatgaatcttcacgacgtagtaaaatgagaacaaaattttgattatttgagcaagtatccaacctgaattcaatcatatatacaaattatgtcaagatgtatgatttgatatatgactcaaaaaatatttgtttgtaaatcacatcaaaatggctgtgatcagtagagatccgtactctagacagaaatctacaacaaaccaaacttacatactaacaaaacactttaaactattcgaaaacaaaaatatgtcgtaaaatggcattttagataaagttatactgtataataaaatagaatctgagtcatttcatcatcaacatgagatagaaaaccaaaacagaccaaaagtatgattgttttggggaatctatgccaactttgaatgtgtcacatgtcattccatgatgaaaataataaggccacaataataatgcgacgataagaaaaatcttgaatgatatattagtaccacatatgccccaccctttttatctccatgcatggtgaattcggttatacatcaatatagaaaaatcttttcatttttaagaatatacaaaaatctggcttgttttctcacgataaacattgctgactccatactccttctatgtacagtccctcaatttaaaaatttcagctttcttacaaaatgtaatgagttatcaaattaagctcaaaatacaaacaaatttcaactaaaaccagtggaaacccataatatatattttcaaaataattacaagtaaaagtaatttaaatttataattctctcaacaacttacaaagacatagttaaaccattaggttaaatcgataaaattagaaatttcaaaaataatggctagtacatattaagattttccaatcatagaatagaaagacaattaagctaccagcttactttccatggaaaagttaataatagcaaactcttcatatctttatggccattcacatttcactttaacgactagattaatgacttaacgtattcatattttcaaatattggcatagatattatgtgtattatctttaatctctctaatcccctacctaaaaattttgacggtctatttattttgtctaaacgtacatgtgcggatgtgcattgcatcggttactagatgcaaatcgtacctgtcgacacatgttaattctaacctaatatatatcgagttatgcttcaaaataaataattttaaataaagcttgactaaaaatctatatcaatgattatttcgtattagacaatttgttcacgcaatctctaagcttttgccgaccacaactctttgtagttcagcttgtcctggcatgcaacgtgaaactcctgttccaatcatatactatatagtatagatatgtatatatgtgtgttcgaattgagataactgttgaataatatattgacacgttaatatttatatggaaatttcgatgcatcatccatttataaatataattgtctctatctaaaaatgcattttaaagtacaaacgttttatacagaaatcataaatacgatatagattatagatgcatagtattatacaaatattttctatgctttttactatatattagtatcttgaagaagttttaagtctctcagattttccgctctaatgttgttatatcatagaaagcaaaaaaaaacaaaaaatggttctaagaatcaaccaaactggttgttgaagaaaaaaaaaaaaaactatttggtcaattcagttgataagagactatatgaggctgagctatgcccccactgaaacagcccattccgtgtgcatccaaaaattgggccttacagttttatctgcttgtttctttttaaggttaagtggatatgacttatgcctatgaataaaacatgcttgattggtgaagctctttacgatcttattttaaataggtggtatatgtgaaatttaagaaatgccacaagtaatttatttatgggtgatagaacaagacacataatgacatataatggttggttagcgctctaacaaaaacacaaagcaccaaacatgatggaaacaacaaacgagaacaaaaaaaaaaaagtaattaaaaaaaaaacaccaatgttaatgtgatagcattggttaaaaaggagcaatcatagacaacaaaacaaacagtcatcttggaaaaagtcaaaaggtactgtagatggattattagttataaatatatgattaatatcaataatgactctcaggaatgctttctaacgtaggcctccaattttcatcaccttcctctttctcatcttcttcataactagccatggagatgtttctgccactatctttgagaacatgaactaactgttgaatggagtttataccattcttgtgacccaagatctgtctaagttctttctttgtcaccacaacttttatccttaccactttagattcttcttccgttgatctttcactttcttcttccccacggaaactcgttttaccttcttccaataactttaccagcggctccggatcgagatcgtctttctcttttctggcaacgccattgtcgtgtcttaggcaattccccattgatatatgtcaatgtctacaatataagataaagagacatgagatggtgagggttaatatggagtgtatatatacacgaagaagagagagagagcacatgagagaagcgatttatgcgccggagcatttgcaatgagtaagtgaggtcttaatttttatttttattggtgtcgtaattattatcttagatgttctgtcacaacacgatttatgttttatataattatacaaactatatagatatgtaatcaatcacataagtggatcgttcttttatcatgtgtacgttttgtcttttcacggttgcttgggtgagaatataatatatttctgtaaaattaatatcttttttcttctctttgataaaaaattaatacactttgcattgtaatgactttcatcactaacaatttaacaacaaatagtactgcactttagcaaaaaaaaaaaaaaaagagaagtgtaaatggaatcaatatagccatagtacacaaacatatggagaacattgcgatatatgaatttgattttgatggtaaaagaaccgcaaaaatatcaacccagaacattgcaatttatggatttgcttttgatggtgaaagaactgcgaaaatatcgagtcttaataattttcttaacatatcaattttttcagttcaacgtatctcgaatgtaaaattttgtttaattaaagaaaaacatagcagcgcgagcatatatagtccaatagtaggagggagctgtggtgaagggtgaaacttccaaatccgagttcgatcctcaatgaaaataaaaatcacatttgtttggaaaatctgtcagttggatcttagtctagttagtttatctggtagttaaaaatgcaggtagtctaattatttcctagcattagtcggaaaacattcaaatttaagatagacattgtggtgacttttcgggaagtagtctattttgaaatatttcggtatatttctatcaaagctcactggacagccgataagatttatcaaaaaaaaacatagcaataaaatcgaaatttacaaattttcctgtcacgatcgaattgatgtgtcatgcttgcctcagcactcttaacaagtatacaaaatctaattacgatgtttcctttttactttcggtcaaaattatggaagctacaaagttcaagcagtataatttattgatttctcgatagactttgattaacgtcgcttaattaaatttttttaaaaaaagaaaacgtcgcttaattaatgtacataaactaatgtgaacgtagtatgggttaggtaggtcttgcaagctcacaaatcataacactactctttatatatatatattccaattgaagtttggggaccaacttccatgaaaatttcgagaacttgtagattttaatgcaacttataaattaactttgacaaaaaaaaaaaaacttttataaattgtcgaataatccagttgtcgaaatccactacccaggttttaagactttgtcgactaagtatccttttctgtatcttaaaaagtttcgaacctttgatttatatatttttggagtattgcatgctaattaataatagtggtgaaaacgcaaaccatctttccttatgcatatcactaagtccagcaaaacagaaataatcccttatccctgcctaacgagtagagttaagtacttaaccatagtttggttcatgataaattatacaattctaaggtatatttttggaataaacgtatggtgttgcttattaggtccatatccatcaaaaatttaaaacaaaacatacaaaccgtcgtataaaattagattttgtctagttatgattttatgaccaaatcaaatccaattctaaccgccaatctcttttcataatagagacccctccaattattaaggaaggaagaccatggaattaaaatatattaaagcgactaacacaaatttaaatcataaactaacaaaagaaatatgtctgtcattttgttaagtttttataataaagaaaatatattgacgtatatgtaattttaaaatgggccatgcagcatgatatgcattactaagcgaagaaacaaaaatagaggccgaaacgcggaaaagagctgacaaatcgtaaagagtgtcttccacatgggattaggtcaatttcaccataattttcatggcacttcagagcctattgcatgtggtggatacatataagaaaaataagtttatagttttaaaactaaaattgatttagtcaaaaacgcttaataaaaatttcttgtcaacacataaaaaataaatgctataatagattgtgtttttggatagtatggaaaatccaacaaaacaaaatttagatgatatacgattgttttttatatctgttggcaataaattgagatgtataattgaaggattaggtacctttttctgaagaattcgccataatatatacatgcataatgtcataaaacatggagaaaaatgcccataaaaatgtagattgatgatttatgctatttcagtccgcgttttagtccatatttgggccttgcgagtaatttctgcttttattttcgagaactctgtctctgtgtatagactatagagccaagatgggctttataataaaaagtagatatgtagagggactttttggagtaatcgataattatgaattataattacaaattaacaaaccagaaagtagcttgcatatgcttcacattttagatttccttcagttatcatggtaaatacttaagatgctacttgtccattccataaatgttccatgtcctcgtccatatcttacttagcaaagagtccaaaatgtgggatttttctgtcctttaaaaacttaactctgttttttatataccagaagtgggagaccaaggcaacaattggtaactaagtttcaacttttttgagtttttctctcctgactgaatggctttttaaactttataaactcgttctaatttgtcttttccgtttaaggctttttcgtacgttttgcaaatagctaaacttttgaaaggaaaaagtaacctcgcgtttttctcatttatattgcacagaatatagatacaagttgcagctattactgataaaacgtagctacttttttggttgggtttatttgagccaaataacttcattaaaagctgtagtaccaagtttgggtctatcatttacactgctattgtctttgctatatgactcgaatctgatacattcgatttctaaagattatatctaatttttaagcgaattaaacttttgcaagcttggttttgatctctactattctattgactagagaagatgtcatagttgggtgtagaataaggtattgaactgacttgcttttattgattcattaactatggtatttatacacaatgatctctatcaagagataaacataaatccctaaaatataggttagaaactctatcatcaaagatattgtactaatcctaatcggattacacatatctccaatagagttgatatctattaacggcaaaaggagctaagctgccatgatgacccatgaagtatatgcctgcatgctaatacgcagaaaaacattgaatgtgaaagtggcaattattcgaacactcaaatttttttatcttcctaaaatcgtgctcgtgaagatttttcaaaacaaccgatataaccattggtgtttagttgtttacctttctttttattgcatacgatagcccattcttaggaattaaaccatgggggcaactggcaagcatttataatcattgatgttactttaattttcatttaatatgaatattaaacgtagtagctatatcattgggttggaattaatgactgagaaagaatgaatgaaagagagaaacgtgtactcgcagtagaccatataaccattggtgaacaattttatttggaatcgtatccataaatatcatttttatactagtacgcttgcttttacgactactataccttgtgtgggcggaccaacaatttaagaagggggtgtgggtgtaactggcccggtaaaccataattttgttttggccatgtacaaaatgagtttttggcatacggtgttttgttgtatttgaagatcccactcaatatcatttttttttccccaatttgattaatcatttgctttcttgaaagattattttccttataaggataagaataaacagtttcctttttcatggaacaaatttttcatgtttcaaagatattttcattttgtctgaagtatcaaaacagttttacattattatttgtctttttctgttcaaaaaatttaagcaaattagtatataataaataaacagatttgtgtatagtattgaaacctatatccatgagcaaatgtgtggtatataaattagataacaattcttttttgacatcatataaattaaataacattgaatttgaaattaatcacatttttaaaatgtgattgtacgttatttattctttaaaattatgaatactaattaaccaatatatgtcatcgaaataactcaaaatattgtaaagaaaactatttgcattttacatatagatatcttgtaaagttaattacgatatccatagaaatgttatacaatctttgactaaaaacgaaagaaagaattctaataattaataacctttggtgtttttaatgagagacgtggactctctcggtagaaataatacaatgattaacatacaaatttgtaactatcattagccgtcactcgccaccctcgataggacctatatacacttatacacaacactagccacacacatcctcaagcgataacaccacaaacaaaacaacaaaccaaaaaaaaaaaaaagagagagagagagagcaaatctccatcatcatcatggactcgtctccaaacgacggcgtacaccaaccgcttctccatcctcaaccatctccatctccgccggagtcaaccaacggcgagctagaaactgtcctctccgacgtagaaactcctctgtttctccgcctacgtaaagccaccataatcgaatcaaagcttctctttaacctcgctgcaccagccgtcatcgtctacatgattaactacctcatgtccatgtctactcaaatcttctccggccatctcggtaacctcgaactcgccgccgcttctcttggtaacaccggtattcaagtcttcgcttacggtctcatggtaacaaccaaaaactcctcttcttgtatatattttttgtatgaatgttacgttttatatcattttcgtctatatgctatgttttttttcacatctttaaaattcgagtttttttcgatgatagctaggcatggggagtgcagtggagacgttatgtggtcaagcgtacggtggtagaaaatacgagatgcttggagtttatctccaaagatcaaccgtattactaacactcaccggcctcctccttactttaatctacgttttctccgaaccaatccttctcttcctcggtgaatctcccgcaatcgcttcggccgcatcgctcttcgtctacggtcttatccctcaaatctttgcctacgcagcgaactttccaatacaaaaatttctccaatcacaaagcatagtagctccaagtgcttatatctcaacggctacgctctttgttcaccttcttttaagttggctcgcggtttacaagcttggtatgggacttcttggtgcgtcgcttgtgcttagcttgtcgtggtggattatagtcgtggctcagtttgtttatattgtgacgagtgagaggtgtcgtgagacgtggagaggttttagtgttcaagctttctcgggtttgtggagtttctttaaactctccgccgcttctgccgtgatgctttgccttgagacttggtattttcagattctcgttcttcttgccggacttctcgagaatcctgaacttgctcttgattcactctctatttggtaagtcctatttttagtcaaactcaatttaattatttcctttaaaatttatttttactagttaatttcgtttactaaattaatttcacctattgaccataaaaaataataatttaagtttatctattctagtgtttttgcctctttggtttccattttacctattctagtctaatttgtcttccacatgatattttatttatgttttatcataggtagtagttattggtttctacaagaaaacacttttttatatatcctgaaactccacgtgaatatgtatgattatagacttttccatgaatttttctagtaatgattcgacaaaacttttagtattattattattcgatatgaaaagcatagaacaaaactttttgtagggagtacaaagcaaagtttggttgtagatactagatatgaaagttaagttaatggcgaacaaatttgacacttcttccgctacagacaatctatggtcacatcacatttcttcttttcagtcttctcgttttggttttctttggaatttgtttttgtcttcttcttaagcagtagaatttaactttaacaatttctgtatgaccatatgaaactatctcatatggaatcgaataaaacattatttcttcgtccaatctgcatctacttctttattttgtcgaagatattatacaatattcttctagtactaattagtttaagatttatctgagtcgtaagtactagattttttaggttttccaaaagttctctttcctctgttaccaaacagaagcagccaccaaatttaggtagttgccccaaatcagtatggaattcccatctttataatatgatatctttgattttcatgtcaagtcaaaagttacaattttaaaatgttgtaaaaacattacaagcaacaatggtttcatactagcttttgatagtgtacgatattaaattatttgtttttgtgttacagcatgacgatttcagggtgggtgttcatgatatctgttggattcaatgcagcgataaggtctgttttgtcccaactcaccacttgcatgatcgttttcactaaatttaaatcatataaaatagaaaacgtctctatccaatttacctacccccataaaaatatgtggattcttacattttacacacttaaataatgctaaatcatactgaaccataagctctttttctcctattaaatctgatgaagtgtgacaaaaattgtgttatgatgttgatacagtgtaagagtgagcaatgaacttggagctgggaaccctaaatcagcagctttttctgtgatcatcgttaacatttattcgttaatcacttgtgtgatcctagccattgttattttagcgtgccgcgatgttttaagctatgctttcactgagggtaaagaagtctcggacgctgtttctgatctctgtccgcttcttgccgtaacacttgtccttaacggaatccaacctgtcctctctggtaaacccttctgatcgatacaccgcaatttcgcaaaccgaataagcgaagattttttttttttttttgaacaattgggaaaattttattataggtgtggcggttggatgcggttggcaaacgtttgtggcgaaggttaacgttggatgttactacattattggaattcctcttggggctctctttgggttttactttaacttcggtgccaaggcaagatagttttcttaactttcattttaattagttaccattattcttgtattgaatattagaataacaaatttaaggctaatgatgctatagggtatatggacggggatgatcggtggtacggttatacaaacgtttattttggcgtgggtcacgtttagaacagattggacaaaagaagtaagtttgctaaactttaagctgccctgtaggcgctaagtgtttacgtaaatattttcattgatttgatagttattttaatttgtttcaggtggaagaagcttccaaaaggttggacaaatggagcaacaagaaacaagaagttgttcctgaatgatgcaggttgatgaaagtttggtatccaaggaaccgattagattcatcggtaaaccgatgcaaatgctcaaagtaacatgtgagctggtaaaaaaggatatggatcaaccttttaaacttctacaactcaattttaagttttttgtgttcttgtttaaaatgttagaggtaggttatgtatttttgtatgccaagattataatagttactgcgttattttttattgatttatatatatatgcatgtctttgattggatagatcttagttatttttgttactgagtttttctttagtttaatgatattttgttagactggaatgcaattaaagtttctctctttcagtatgatgcatttttgttgttgttgagaatgtgaaggaaaataagaactggacttccaacaaaatgggcagggtgatctatgggcctaatatatgggcctaagtaaactgaaattactatacataaaacaaagttttcacatcataaaatcagtccagctcatttgcgttgaggacttgaggcacagagaaaatttggagtttttttttgtcaaaggagaaattttggagttgatgattcgatatctgacatagttataaatgtgtattatcttgctctaactttgctttagttagtggcaaaattttgatgtaaacaaaagtaaaataatcgcctacttaacgcatctatgacattttaatataagcactattttcattcgtgtttaataaaaaataacgaaaacgattgtaagaacttctaaatattcttataaactactagacgagatgttatatttgttccataaagttagagaaaggagcgattaaatttccgttacacttgatgtaaacacgttttttcgaataaattttacattttattcaaaaaaaagaaaaaaaaaaaagtaaagaagaaaaattcttgatactttttcttttcattattctcattataaaccatacaacgaaaaaggatataaatagtaaatacttggccaagccaataatggccgtcacgttgtatctgtgccattttctgtctacacatttaagtcttatttattcttttgttggtccaacaattaggcaatcgtttgtcatttaaaataacacaaatgtatctgttgcacacaaatgtatcaaaactcaaacaattttctatgtatacctaaactaacgtatatattgaagtttttgtaaatttgtatcacgacctacaataaattactccttttttacagtattagatc

SEQ ID NO: 449 - DNA, 59793 bp, Arabidopsis thaliana
tatattactagatatcaaagtgtttcaattttcaagcttgctatttgagtttatctgaataatcctaatctgtttgtatctttctagtttgaatgaaagagtttggtatacacaaaaaaaaaaaaaaaaatctagatataacaaaatcgtttgatactaatttaatttgaactccattagaacgttggccaatgatggtgaaagatgtagttatatgattttgaaagtctattggaaatcacgactttaagtaaatcattcaaactcaggaaagttagcagccattatacgatagtgcattttggttataattttttttaaaacagttgtcggagacatgtctttataaggcctctcttttctttaacgtgggttttaaattcacgtgggtctcaataattaaaccaaaataccatcatttgaaccaacaatttttaaaccgaattaaatcagcagcacttgattcccccaatatcatatgatttgtttataacttacataatttgattatgtcgagagaatattgaaccttgttttcagtattttaaaattatcggaagaaacccacatttgtgtgtaatcatccaaaaacatggctcacatgtggtgggtacatgaagacacacatcatcattgtatgctttcttgcacacatctgaaaactaactcattacatttttattttcttagtaaaataatcaaacatgatttaactttagataagtcttagatgaatttagttttatcacttaaagttacaaatcatgaagataagttcttctaaatcaacttgattaacaccaaagttaaaattatgaatgataattggtagtagtacggagatcatgaattgtgatatagaccacatccaaaaccgcatcgcaacagtggtgtaacactaccaaaatctctacatatacatatgtatctacgtatttttgttactatttgaaccgtactgcactttatttcttacaccgcaaaacgcagtcaccattcggaccctgaatttgtcaacaatatcagactaaaaaatctagaaactttgcatacaatgcaagcacgtaatacatgactataatcgatacgtctttttcgtacaaaaaattcataggtcaactttaggccccaaagatgtatgtggtcatcacatctcaccagaaaagttcgttgcaaatttttcaaatcccatcaaaaatagtaaatttcaaaattcatttaataagagtgtcgtctcttccgaaaaaagaggaagaaacacagaaaagctaaagcttcgggcattatgtattgaaatcaaatctctctctctttttcttccgtggccaaaatggatccaagcagcttctctttggccatctcttcttgaagctgctttcttcctcaaattcttttttttccagattcttctcctttcttcttccttcttccttatttcgatttcgaattttgaattttctcaatggctcaatcgtgtcttaaaattgttcgaatcaacaatctaaggaacagagtgaatcgtcggattttgattctccgacgattcacacggttgttatggagtagaatcgttgcttgtactcctggcaaatctcggagatatctcttgctttctcgcgctcttccgtctccgactgtttctcgtccttctccttctccgatccccgccgtcgatgtcgtcgtcggtggtggtggtggtggtggtgagtttgttcgtcgttcgtcggttgtttacgataatgataacagtcatcggagatcggattctgatttggtttctttgaagattagtctcttaggagatccagaaatcggaaaaactagcttcctggtaagaataatttcgaatccaacatacgttttcgattttgaatttgcgttgagattgattttgaatttgcgttgagattgattttgaatttttgggaatttgaaaggcgaaatatgttggagaagagaaagaagtagaaatgagagaattggagaaaggtataaattgtacggacaagacgttatacatgggaggtgctcgcatttcatatagtatctgggaattagaaggtacttaatcattgttgttaatccacattagtttagcagtaatgataatgtgaagactaattaacattgttgttatataggagctgagagatcacgagatcaaatccctgtggcttgcaaggactctgttgccattctctttatgtttgatttaaccagtcgttgcacgcttaatagtgtcattagctggtatcaacaagctaggaagtctaatcaggtaatattaatttcactatcatttgtcaaatttgggctctttgttaaaagtcttttaaaatttagacctgggtggtcgggtattcggatcgggtttagggtattttacccaggtctaatcttgttgtgtgaaatttagggttgattggttgtaactgggcgttcgggtattcgaatcgggttcgagtcttcgggtttcggtattttgccgaagcctagtcttgttgtatagaattttggggatgattggttgcgactgtaacgtatattttggctaagcatagacaaagaacaaaaatatggatctaaaagtgtgattgtagaaaattagagttgagacttaaaaaaaatatgatatttttcaatgttttttgtttaagatcaaatgttattgttttggtgaagctaaacactgataggtttgataaatatattacagacggcgataccagttatggtaggaaccaagtttgatgagtttattcagcttcctattgatctgcaatggacaattgctagccaggtaatgtttttaaccatatcttttgaagtcatttgaattctagtaacaaatcaatacagtgaaattcaatataatttattttacatttggaatgttttgtgtaacaggcgagaacatatgcgaaggctttaaacgcgacgctcttcttctcgagtgcttcatacaacataaacgtgaataagatctttaagtttgtgacggcgaagctcttcgacttaccatggacggtggagcgcaatctcacaatcggagaaccaatcatcgacttctagaatatgtatttgtatataatataaaagaagcgaatcctgaagaatgcgttttttttttttttttttaattcaccgctaaagcttgtcgccgtgggactgatcggactagtcgaatttaagcgaaatggagagatgaagcggcggagatttcgcccgcttttctccattgttatctgtttcttttcaaacaaacaaacaaacaaagaaaaacggagagtaaatggtttcgagaggtagaagaaaacaaagaaaagaggagatcgtgatatgtttttctttgtatttcttttggttttgtaatcttttctctttcgatgaccactggagatttttggttccagtaaattctatatagtaaataccatttcgctttgagtattaacgtaagatcaaattgttttcacatttacatagtctcaagtgaggaagtgtccaaaatttaggttttcttgcatactatacaattttaattataccaaacaaaaaaaaccaatatcatttttgggatttattcatgggaatgtcacttctgtaatgtgtatcagtgtatgacggatttgatctttccaaaaatcgtagaatttaacagaaacacacatgcaaaaactgttgcaatgtgacgtgctttgactcgtttagacacatatttgatctgtaatgtacgtctataaatgtccataaacgttcactgacgacacatataggtatattagttatgcactattatcgtcattttaattttcagaataaaagggttaattgatttgtttactagaaattgttactttcttttagagcttcaaagagatgttaattgccaaattaagtttttcaaaagagctattttacgaattaaaacctcaaaatacatgtatgatgtatttcaagattttgaaaatgtcattttatataagaacgttgatggccaattcatatgaagatgaaagagggattaaaagttaaaattcagaattgtattgtagcttccttccaaaaaatagtcatatgtgtacttaactgctccagttttaaacggccaacaaaatcagttacggtttttgtgataccgagatctcatcgtattcctttttcacatgtttcgtcatgtttttgctcatccaaatccaatagtttcaactttctagtgttatcattttgtaacggctaacgataaagaaaaaggtctttattaggctttgaaagtttcacgcaacattattcaacgaaccaaatattaactcttcccttttttcattttggtttgttgtattcaggttaattaaaaaaatgataaaaatacatcaaaccttaaaaattttgggtttaaaatatttgtttggaagttgaaaagaaatagccacatcaaagacgttatctagaggacttatttgtcatagcgcaaccgaccgttttatattacttttcacactgacaaacactttatggatcgttgttttgttcatcgtggtttagtgttgttttgtctatgtttggttcgatcatcaaaaaatcattttacataatgtataatagtatactaatgctaccattatttgtttatctcattcaatattcttaacttgcataaataaatttggtcgaaagcaatgtctcaactaagtataaatcaattcctgaaaaatcaacgataaattgggccaaatcccatctaagctaaataatgggtcaaacgaacgccatggaaaaaaattaaaaccataaaaaatctgaagtttatgctaattttgaaaaggaaaaaaatgtagttttcgtttctactcaaagaagaagtgtgtaatatccacttatatgatatctatcggcctaagaaactaaatccatgcttttgtataatatgcaaataatgttctttgttttttgaaacaacatttcactttacataaaagttatcagttctgttgacatatttttctaaagataggttaaggtccatacacttctttagaagtccgtcgttggctttaggtattctataaataatttagatcaacgcattgggacccatgtgatgaccacatcaagattccgattgttatctctccaattaattttattttgctttttataatacaccatgaaaatttagcgactttcttatatatacatacacaacgcaaccacttaagaattattccatttttatttggcttattccttcctccctctacatgatggatacattctcttgtaattcttatgaacaaaaccacccccatgatgatgatattgatattgatgctcatgatcatgattctcatggtggtgatcatcaagaggagagtggatggacaacttatcttgatgatttctcaaatcaatatagaactactcatcatgaagaaaatgatcatcaagacaagagttcttattcacttcttgccacctctacttctctggtctctgacgccgccacccatgccttttccggcaagagttttcccgttaattttccggcgaaactgaagtttgggaggggaagaaccaaaaagatttgtgaggatgattctttggaggacacggctagctctccggtcaacagccctaaggttagatactacttaactaacacaatcaacttaaaacctgatccatgattgaaattctaatccataagaatctttctaagttttaatttaagttgtaagatataagtgagtaattatcacctaattgtctccaataattagtctctttttttcctttcaaaaaataaaataatttcccctttgtggtagttagagcatatgtgtaatttttatatgaatgatattgaacaggtcagtcactttgaacatattcagacgcctcctagaaaaattgaggactatgtctcttctagtttcgttatggtaatctctctaactctcttttcgatacaaattatttctctctctatcctctttgcaattgaattcattaataattaacccacaagaaaagattgagaagtttctttttgcatagtatattaagattagacttggttgtgtattattgtctattgataactcaatatttctttttttagttataacttataaggaagattcagagatcttctagtatcaacaatgtttacactataatatttgatggatataacacgtaaatatgtttttgaaacggtttacgatagggaaatattagaggcatgggggatcatcaaatccaaatacaagaaggtggtgaacaaaaagtgacgctgatgagaaatctcattgacggaaacaacaacaacaacaacaacaatatggatttgaggagtagaggattatgcgtcgtccctatctccatgttggctaattttaacggtcgctgctgaataatgataatcaattctataaacatccttaattaactatataaacccttgtaaatttggtggtgtttatattcgtacctatcttgtatatatgtacttgatgtgtgtatatatgtacatcttgatgggtatgtgctttacatatatatgtatagctttcgtgtacatatataaaacacatcggtggatatgtgtaaagtacgacgtctatgtttgcaaacattttctaagagctactatatcataaactttatgaaagttttccaaatacacacatgattatttatagagatctcttatttatatctctatattgagagatatttttttgttggtataaagtttgagagattaatacctagattaggttatctcttgcagatacattcttatggcagattatatggatgatataaccacagctatgaggtcgtttaatgtagatatgataagattataggagttaaattaaaatcttcggttaaatttacaaaaataaaaataaaaaataaaaataaaatgttcacagaaagtggtattacattgtttttttttttgttttttgggtaactagaaaggttcagggccaattaaagttatcaatctcactaatttattaattgacacgcgcattaattaaaattatatttatggtttagacattaattaaaatttgaccaaatgtttatcatactatttatatgaagtcttagccgtccgagcttcaaacataaataagctacttggtattatactgaatatgcatacaaataacattatccatatatattatgtatgcatatatcataagtcatatggtatatattagagttgcttgaagaaatgatagactttcttccttttcattatattattttcaaaattattataggttgaaggcatctctagatttggctaaaagaatggaggtcaaattcagatcatattaaaaaattatttttctcgcatccgttagccaaaccttcgtgttaggtgatcgatcaagtcctcgccaataattatttcttattgtagaataaactaattaatagaaatcatctgaaaccaaaaacaatccatccgaatatacgaacaaatccgttttagtctttaatcgaagatattagatgttttccatttagttgtgaaacgtgttagatgaagtgtcttatcaaatcggttacgactagacgtaatttaaattgctgattaaaataaaattatctttaattagttcctttcaatattgattaagaagctttaattatcgttttgtaagttagaaaaaaggacatcagttaagagattcatttttttttctattgtttcatattatcttttggtagggctcttttatttcatattatagaggaatttttctttttgaacgttattattctataattaggcctaaaatatttataaggtaaatcaattattattttttgttaaataggtaaatcaattattcgaggccgtatggtttgatcagagattcctatacgtccacgaaaattaaaatatttacgaactatcggagaaagcaaccttaaatctcgtcttcaatttcaaatcaaatccgtaagaatctcatcaaggatttattgattttttgcttctctttatcttttggttttcactgataaaatgattgatgttcgccatttagggttttggacgagaagtatatatatcttacttacttaagattattttgaatccgtatgtatgtatagtcatgcatatacgttcatgaatgtgtctgttaaaaaatcttacaatgaatgtgtctataactttgatcgagtaacatttggagaagttgcttctgagacgcaacgtccgttgtcaaagacaaagcatgttgcatatttaaagacacgtcttcaaattgccggcttcatttatgtgtatatttaataatcaaagaattctaaaccgaaaagtttaacctaatcctcaaaatttcatgaaaaatcaggtatatttaaaaaaaaaaaaaaaacatttacgacaaatatgtaattaaaaggacaaagaatgaaagaaggaatataacgcgtgattgccgggcggggaatttagttgggattacgatggtctgacgtatgggattaggacccacttgatatcgcaatcaaaagttaatgatctccctaatctttcaaattatgttatctaatcccatgtgcgaagtacccaattccttgatttattgtcaaaggttgattccgtttacattcgacaaatcaatgtatcccatatcaaaatgaatattgctacaaatttttaatttttgattcatgtttttttttttggtcatgtcaatgcaacaaccgactatctacctctactaaactttagtttccaccaattacactaaaacaatgaattctttggcaggtctatagaatttgttgaacaatataaattgcgcccctaaattatatagaaattgtataagcaattaggtcatacacaataacaaatgtgcaagaaaattgaaattgaattagaaaaaagagcataaaatcatcttaactcgtttatcatcgggtttttgttttcttcattttcttacgaaagacaagcatctagaagaaaaagaatttatgttatgttaaaacgcatcagatgaattttttttcttttccaatttaaaaattgaaaggaaaaaaaataaatcatgaaaaaatattacaattaaatgtcattgtttcaaacgcaaatgcattttcggtaccatgcaaatgcaatctcaaaaggaagttatcttattggtagagattgctgatcttgtttctctcatcatgtgtaagcatgtatcggtatagtggtaagagtctatcgggcttagtgaaaaaaaaaccatagctctcttcgaatgttgttgcaaccttcctcatcttgtttaaagtagaaaagattaaatttcggtgcaacctacctaacaagaaactgaatcacgaatattataagaatatcaataatcatataaccaaagccaataacaccaaattccaaatatccatacaaagaagcaaaccccataaaatattgccccaaaccttttaacccaattattacgttgaagaagagaaatacaataacaaagatacatttattatctgtttctgtctttttttttcttttactcgggtgtccaaagatatatattgaagatagtgtggtttccaagctttcctacgaagatgccgcaccgctttggccgcaccgccgtaatgaacatatgtcttacattcttgacttggcgaccacaaggctagtcccttcacccattccatcagctcccggccttgtccaactctccttgaactgttcttcagtgacacctatatatgaaaaagggtaacgtcattgttaattttgaaagaaaaaatattctataattggattacttctaccgggttttttcactacgtactacttaatgcatttatattttctacattacctataatagaagtgtaatagaaatgactctattacttgtctcgaccaaccggacgaatctttagtaaccaaacaattatagttgaaagatataaagaacgtcacatataaactccttttcattgttcttataagcagaatcttatcataacacactattatttcactaaagttactttatgtgagcaaataaatgttaaaaacataaactaacataccttttcccatggctgcagtggaggagattccaccttggacggtcttaagataacgatcatagtaattagcaccggaccatttctggtgagccaaagtgtcaaccccatgggtcctctcttctctttgtatcctctccacataagccaacatcccgcgcctagcgtaatcctttgcaaatgtatcaaccacaagagcatccgcatggaaacccgcaagcgttatgaactgccaacaatatccgagcctagcaatccgcggaatgaactcaaccatctgctgatccgtcataccggaagcgtcccagttgaaggacggcgagagattgtaggcgagcatgacctccggtgtcttggacttgataccttcggcgaattgggtgcattcattgagatcagggcttgccgtttccatccagatgatgtctgcgatctgtgcaaaggcccagccacggaccacggccgctgcgaccgagccttggaaccggtagaatccttctctggttctcggcaagtcccagtcccagaaaagatctgtcacaccaagttttgctgctaacactcggccttgctcatttgacaggcagttctcatacctgattagtccaattgtaacatttttgtgaacattagagaaaaaacttttaggatcgttatttaaacataaatagatctatgatttataaggaacctaacaaataatacggaaacaaaaaaaataaaactattttcagtttttaactaatcataatggacgttttttttgtattttagaagaaattatactacggacttcataattataactaaaaaaaaaaagttaaacctatacgtaaacaaaagttaaattttggtaaattatatagttttaccttgcatgggttaaccactcgctcagtctctgattcttctcgttctcgttgaggttcatgcgcttgatggcctgcacgacagcttccgagaaagtcataagaccggccgagccaagccactgatcttcaatggattgcaacgccggaccattcttgcctacagtcattccctcagccagaagcgaggacaaactcttgcctctaaggctcgggttagtggcaccgaggatgaactggtggtccctcgcgtcaatgttcgactggatcagagtagctgcgaccgcatctgttctagcaacaaggacggtctctgtacccatcacgtcgaactggagccgagccgcgacaaggcggttgatgtgttcgctgactgccacgaggacctttccggccatgtggccacacttcttggtgacggaggactggtcctcgatgtggaccccagcggcgcctctttcaacgaaaagcttgcagagtttgacggtggcggtggtgccgccaaagccggtgtctccgtcggcgatgatgggctttaggtagtccacgaacggagtttttgtcctctcttctctgctcatgctcattcttgcctccctctgctttctgtgatacatatattcatggttgtaattaatttacttagagatattggtttttttattaattaaatattatgagaacctaatgaaaaatgtataaaatcatctagaaatggctttagtggtctgaaaacttatatttagacttttgagattaaaaccggatgcatgcaaccatgcaaaactaatgaaaatgtctcacatatatcgataatggattatataattaatggtctcatttggaaattaaaatagtattggtgccaaaaaagacttaccatttttttttttttggaaacttcacttgaaagaaatttgtcttaattagaacgtgtaaagactttagtttgacagaccatttgtcacatatatcgataaagactttagttagaacgtgaacacgtagtaacgtaagacctcgaaagaagcaatttcgtaaccaagcacaccgaaccgataacaacaaataatatactactccatgagttcttgatagtactatatttttaagcaccaaactaattatcctagtaagcagcagctaatttctagtttcgactaataggaaaaattaccactaaacttagtttacttttagtaaatactttattaataattaacttttacctgtcatggtactgctgagcgaagaagaggtgttcaaccttgttaggaacggtgtcgtacggataatcagcaagatcaggaccaggctcattagtggatgtgtgagtggacgagcactgccaaccagagacatagatggtgtccaaatgtttagccatcatggtcacctgaacagggtccaacgctccgaaggtgcgagaggccgtaccgttggcttgatggcttttgagcgttctccacagcttcttagccatctcgttcgaagcatagccttgcttgagatggccacgtagagccaccacgtcacgggcagtgtaagggcgccttgttagcttgaacctctctgagctccaccaagtctgcacttccgcaacctccgcttcgaatctcccttcttcttccattatctgatttggtttatcgatcatcaatttccatgttagtcttatttactggtgaaataattctattgtattcaacttaatcaaataatacaaaggagaattatgggtcgttttcttaccatagaggggacagagaaagatgcagccatggctttaacttttataaattggaaatgatattgctttgttaggagctatgaaattagagaagcttcaagcatatttgctcttcttccctatcatctccttatatactaatttctgcattggcaaatattgctttcttatgaagtattagattaaaatattttaaaatttatttctgatcaaaaagaaactacttgtgctgatgtatatatcttttttccaagttggactaaaattatatttttttcggaaggtaaatgattgtgacacgtatgagggcattatggcagaaacgaattaccatttgacatcttcattgtctcgttcatttgatgtcattaagaaaaaatgtgatgtatatagaatggttcgaacaattaaagagttgcacaaggattttagccatataatgaatcgggtttaagaaataatcgtagattctttccaatgggtgtataatataggctaggtagcctcgctctaatagaaaggaagctggtgcaattaagaaagaacaccaattttttatgtatcatcctaccaatctcaaacgtttgaacactaaagcctcaaaatgtagatcaattgtgacataatctgcaactattgatggacattatacttaagagtaagagcattatacattttacttgaaacaattgctatacatttaacttatcatacatattcaatcattcatacacaatttatcagcaacttcaaagtgaaataacttttacaaggaaatgtatttaaaattttacgtatcgtcattttttctgtcaactatgtattttatttggtgattatatattaatgtgggtaaagttttaaaatcgtatttgaacactgaataaattttaaaataaacagtttgtttcccgaggaatatagataaaccctatcttgctttgaattgagtcgcagattgagattggatacgacttggcaatcctatctttccattttgttgctgtcggtttccttcttcttttatttgatcttgttttcttttgagcctaaacattttgttgttgtttttctcggaagcgtttttttttttggtttacgaaaactttacatctatggatggaatttgattcccacacaatgggaattatttttgattagtgtaaacaaatttattagagattgtcagcaaggtgcatgctttataacttttcatcatgttttgtatatcataattaaagttttccatcataattaatagaaccattaagcataaacatgtatggtgtatgtagaattgtttgttattgaatagtttttgtagaatcataaaatcatcatttataataaaatacaattaaaaatagtttttataggtccataatccaaaacaatgtttatttttttcccaaatcagtgtgctgctactagtatgctagtagtctatttaaatattaataaattgaatgttttcttttgagtgtgaattttttgtagtatatcaatcaattaaatacaaataaaataattaaaagaaaaggaattatgaaaaaaacaaataaaataattacatgatcatatattaaaaaatttctcacataacgtataaattatctttttaaactatctactattaccgttgtaagaaacaaatagacacacacaaaacatacacaaatttacgtgattcacaaacgtcatgttgtctacgtacgtccacatgcaaaaagagaacgatattgctgttggaagttggaacctaaaacagatggttcataatacgatggtatatatgttcacctaatttagttttaaactaatctgtgtgacaaacctgaacacaaatagaaaattaaactaaaattgcaatccgatccatatatgaaacattataaaccacaaacctaggctcaaacaagaaatgatgtttataccaatatattactgcaaataatgtgtgattagacgattcaaagcatattaatacggtgattgtatatgtatatgtataggtagtaaagttgtcacgagaaaacggacaaaagaggatgctacttgcttagctcgtggatgaaatcaggaagctacaagaacgtggcgggaatgacgtcaccttaaacagataatttattttcgaacttgttgtttgagattccgatagaagatgatggtattaaaatatttaaacagataatatatttggatattctatgaaacttggacattggaacgtgtgccataggatgggctttgtgctctcttcgaattaattattagaagctgagaaccatatttccatccaaaattaaaacggtaaaaagttatataaatattaactaattcaaattttcaactttgacattttattttccactatactcttttttttttattactttttttttaggaaaaaaatgttttaaaaatgttgattatttaagttttatatatattattaattagttattattgatgaattttaaacttcaagacaaataattaagtattattggtttagaattattaaaaaatataaatcataaaaactaatatatttataatcagttttaatatattttttaatctttgtattttttctaaaaaattaattaaaaagaaacaaaagaaatattacatattctcctttttcaattataaaaaatcataaaatatacaggataacactatatgtcaacaaatatagtgaggattcgctcctagttattgattaaagtcacatatcaacaattattttttaaaatgataatattttagtttctagttctaccttaaattataatttgaagtaaatctcttcatcttcatcttcaaaaatataatatatgatatgataatattgagttattgcttgtgacaacttataaaaggagctgtgatgacacatcattattattctatttacgtttttcttagcaaagttatttacgtttgattaagaatacatttttatgaataaatatcaatgctgaagctatctttgtttatacaatattacaaaattcataatggtcttttttcctcaatcgatttttttttggttaccaacgtaatagaaatcagttatatatcataactagattataacccgcggtataccgtggagataatttttttttaaaattagtatatataaaagtctgcaaattatatttatctataaaatatttacattttatagtttacaattgttattaaataacatccttccaaacccgttccgccaaacccgtcccgttaaaaaactccgcggtacaccactaatttaaataaatattttatgggattgcaattatattttagtttgtcaaataaagttttgtttcaaatagttgtcaaaatctagttcaaatattggagaaataagatttagtgaactgatagtaaatgtatttatttgcgttttgctcattttaagggattgcaattgtattttggtttgtcaaatattttttgttttaaatagtttccgaaatctagtttaaattttggagaaatttgcgtgatatatgggattagaatatatttggaatatgttttgtttgttaatcaatttattgccaaaagaaaactaataattaaaagccagtggcaggtattgtaaataagttcgaactctaggatttatttcacaaaatggctgcaaaaatgtatatatagataatagtgtccatacaaattttcttcaatatatgcaaaaagaaaaatccaaatacaaactttcacacttatgtattattttaggtcaaactaggtgaatttcagtttattttatcttttaaattttaaaataacccattattgaaaaggtaaatatttatcgataacacaatgacgatgattatgaaagagcataaaggatggcatgatgcaaagcctttgagttattaagtttcttgatttagtgatttcgcttcctgaaaagctcggcccctaagaaatcaacggtgctattaactagtgagggatttggctttccgaacttcactcgaataacatttatcttaggaaacgtttcaagcatttcagacgctatgtcatccgcaaccgtctcgtaaaggtttcttggtggcccttcaacaattttcttcactagcctgccaataatagcattattaataaatcataaaatatactaatttagaaacaaaactaacttataattcaaacattggatacataactgatacttatgcacatcatgatctaaagatacaaacctaaaagtatcagcaaagctaactgtatctgctaagttgtctgattcaatggcctttttcagactcaaccacaaattaatgtcaacgataaacagaccacccaattccctctcttctggaagcactccatggaaaccataaaatttcaaccctctcagtatcagtttatcctcaggcaatgactccaatgattctgttccaaaaactatatataaaagcttaagtctttgaaaatatacttccatcaacagtttacaaagaatgatccttgtgacagtttataaacaaaatccctgttttaaccggacaaactctttcacaatacaccataggaaaacctaaaattaagtgtcgtacatcattgtctattattttatttttttgtcaaaccatttcatatcttcttaaacactaatcttttaattatttgagcattttttttctgtaatatagtcaaaatatccatcttgagtcccccttagacacaagattatacattaaatcgcaattgaactactgcttttaaattttgatatcatcaatttacatactaacatgcttgtttcgtaggaccgttttaaattttgatatcaccaattttttttttaaaaaaaaacaaattctaaaaacaatcattttgaccccaaaaaaacgatcctttttgtaggacatcttactttaagttatgaaatcaaccccaaggcggctgcacaataagagatttgaatctcatgatataatcacaacgagaatatgatcataacacccaatcatagaacctatgaacatataattctacgagccatcagaaattggccggaacaacttgtcaaaaaactgtagttccaacacttttcgtttccattcaaaatgttttgtcggccaaaaaagaaactaccagaaaatcaacacacattattaatgaagaaaccacaaaaataataattactaaagctttctgagcagtaaatcatgtcaagagaaactaattaaaagacaagaaggaataagagaatacctgttgcacaaaaaagaaagaatgagagaacacatagtcgttccaactttgctggagccattgttttcagtgagctatgcattgggttcggcgcagcaataattttaattaggattatttgagagatagagggcgatagtaagaaatcagtttatatttcaaggaaaacaaagtgaccctatttataggccaaagaacattaagaaaaaaaaaaatttaactatttggacataagttttcgttccttatattttgttcattattttcctaaaagagtagatttaataatatattcaactcttattaactagacattaaaaatttaataatataattataagaaattacttgtgttaaacttttactcataaacttcctactttcttattttatattaaatatgatacaaactcgcattttgctttatctcttttgattactttgaattaggttatatttattgagattgtgatgatcatatggttgtttacattgattgtttatttgcttagatagaacattcttcttctttcttcatctcttttatttgctttaaattgggttatatttgttgacattacgattatcacatggtaaattatttacttgaaaaagtatgtagtgttcttctatcttaatcacttttgtttgctttgaattgggttatatttattgagataagaattatcatacggtgaattatttacttaaaaaaaatgtagtgttcttcgttctttatctcatttgtttgctttgagttgggtttatatttattgagattacgattacgagtatcatatggtgggctatttaccttaaacatatttatattgttcttttctctttctcttttgtttgctttgaattgggttacatttattgagataacttgtattatcatatggtgggttatatttattatattgggttatctacaatctacttagaaatatataaatcgagattatgatgatggtatttttttttttgttacatatacactcaactaaaagatttacacaaatgcataagctacatcatattttattaagaaataaaattgacaacaaaatagaaaactatattatcgtaagcaaaccctaattataagtacctactaactaagaaaaaaaagaagtagaaaattagaatctgaacccatcaaatgacttttggtaacatgcatgtacctatgagactgtaaattatcattaacgttgtatcacacatggagttaatttcatgtggagttcattcccaaaacgccaaaagagacttcatgtggttgaagacttgaaggtttagtacagagaacaccaatagacaaaaagactacaacacctcgattttgtttagcttagtctggttcaaaaatagacagtaatgccaaagaccaaaccaatcacataaccggacgaaagccagtggttatacttatactactctacgtttcgagatttggaactggattagtgaaagaaaaagataaaccttggggcttcatcttgcaagcgtattttacaggaacaatggcaccggtatggctacaaaggctcacaatagcaggggcatgcccataataactccgcccttcgtcaacaagaaccactgggtcctgaggcctccggtgccacaccattttctcgggtaccaaatcattcacaccggctttttcccagtaatgagtgccgcgccagctctcatatttgaacacaccacataaccgagctttatgaccactcggacccacatgaacctccttacatcgtttgcaaacttttgaaggataaacaagcaatagtttcttcacaccagctctcactttctcccacgccataagagcgtttgccccaacatatttgagatctccagcgggtaaactcctgatatcttcctcagagatttgcgggttatcgtgaatttccgaatattgaaggatttcttcaggatggatggctcctgcttgacaacatagttccaagattgcgggaacacgatcataatcaaacctctcttggtgtctgataacaccttgagagatgttgtgtaagtgataggattcaactggcacaagtatatcgtttatggaacctggaacccattcgtgtagcctattgttaccacgccgtatataactacgacatgtctcaatcaaatgtccttctttgccaacaaacacttctgaacagaatctgaaaagtttctacaagcctcagcactaaagcagagtctttttatttactaaactcaagaagaaaaagaacttgaaacttacttgcatgtcaagacaggaaacaccttaagaagagcggcgatgttactgattagattctttctagctataaggatttcttcagctacaggaacaatctctttaaccgggtaatctttagctcgattttcgattctctttagaatcattggccggagttttctaaggtcatcaagctttaatttgttgtttcttgaagatgtagttgagtaactagctctctgaaatgagctcaattttctccatagtttatgtctccaattcgacatagcagagattaatctacacaaagaacaatgaatcagtgaatgtatattgaaaagtacataagcagaaccatggatttatactgatgaatcgaaagtactgaattttcgataaattagataaaatcagaatcagtaacatttcgtcgagcaccttatgtgcaatttcaacagagagacgcaaaatccagcagattcgaattcatgatcgtagaaacaacacagggacgtaagcagaattagctgtgactcattacctagtttaccaaggcactcgatcgcattccgcggagaaaaattgaaggcgtgtgttttccgagcgacggcgacgaagaggatcctctccacgagatggtggactctctggggactcgccgtaaatctgaaacccattaaatggcttttattttgggccatacaatatgggcctatacttttaacaaaagagcttttctgctttgatgattgttttcacgtaatacaatttactttttggtttcaagaaattccataacctgaaattaaataattcgtataatctgtaacgtctttaataaaaatctttatttacatatcttgttttctgctttgatgtttatgtaattgcttaaaactatttacttattttgtatcatcaattcattaacatttttatttgttcaatagcctacctgttttctattgtttcactaattaagagaacaaatttaataaaaacttattaaaagtctttattatttaaatattttacaattcataaatttcatagatttgctaaattgttgtgatgagaaaatgggatactataaagtagtagtagactagtagttagtatagaaacgtttaaaaacatacaacaaacttttatcatctctttttgtgacaggcccacactatcaattcgaaaagtctaaacaaaagtcgccgtcatgaaagtagaacttgtgttcataccatcgccgggcgttggccatatccgagcaacaacggcgttagcaaagcttctcgttgccagcgacaaccgcctctccgtcactctcatcgtcattccttcacgagtctccgacgacgcttcttcctccgtctacacgaactccgaagaccgtctccgctacatcctcctccccgcccgagatcaaactactgatctcgtatcttacatcgacagccagaaaccacaagtaagagccgtcgtgtccaaggtcgctggagatgtttcaacacgttcagactcacggctagctgggattgtcgtagacatgttctgcacgtccatgatagacatcgccgatgagtttaacctctcggcttatatcttctacacgtccaacgcttcttatctcgggctacagttccacgttcaatctctttacgacgagaaagaactcgacgtaagtgagttcaaagatacggagatgaagtttgacgttccaactctgactcagccttttccggcaaaatgtttgccttcagtgatgctaaacaagaaatggtttccttacgttttgggtcgagctagaagttttagagcaacgaagggtattttggtaaattcggtggctgacatggaacctcaggcgttgagtttcttttccggtggaaatgggaatacaaatatccctccggtgtacgcggttgggcccattatggacttagaatctagcggcgatgaagagaagagaaaggagattttacattggctaaaagagcaaccgacgaaatctgtagtgtttctctgttttgggagcatgggaggtttcagtgaggaacaagcaagagaaatagctgtggcgctcgagcgaagcggacacaggtttctctggtcgcttcgccgcgcttctcctgttggaaacaagtctaatcctcctcccggagaattcacgaacttagaggagattcttccaaaagggtttttagatcggacggtggagatagggaagatcataagctgggcaccacaagtagatgtgttgaatagtcctgctataggagcgttcgtgacacattgtggatggaactcaattctcgagagtctttggttcggtgttccgatggcggcgtggcctatctatgctgagcaacagtttaacgcgtttcatatggtggatgagcttggtttagcggcggaggtaaagaaggagtaccgtagagattttctggtggaggagccggagattgtgacggctgatgagatagagagagggatcaagtgtgcgatggagcaggatagcaagatgaggaagagggtgatggagatgaaggataagctccacgtggcgttggtggacggtggatcttcgaactgtgctctaaagaagtttgttcaagacgtggtcgataatgttccataatccataggaacgtgctcgataatgtaccataggaacatggttgggtgttttgtgatagaataatgggaatcttttaaaaggactatgatgacatgattgaaaacaaccagtctgaaagtataataatagttacgtgtacttttgtctattaagcaaaataatgcaatttacgtttcggtaagattgtaagaaaagaaatgcagtttatgtctaaacaatctatttatattttgttatctgcaaagaataatcacactatgtgcacgaattatctggatttatcaaactatttatgatctaacagtgacttattgagatagaacttcaatatttcaacacaagatttagtcttatgaatctataagttgttccaatatctaaaaatttagggaagtgaaggattctgttcacgacttgaaagtgctttagttgcatactaaatcttgaactcaccttaagtccaatgctgacatcaccccacaaaaagaaaaaacaactacatcatggtttcttagaaatactaatttacattttgagaatgttataatagacttatagcttggttcaatcacggaccaaaacgaaaattttatgagttatcatattaggtgactttttaaaaacactttttggaaaaatgtgaaatatttgtttgctactttcgcatcagtaaccgagaaggtggaagagtggagtacgtttcttggataggtcattatatatgtggaccaaaaagagagtctgtttgttctgcgtcgtgtcttgtgactcttgtctattatgcatcccaccacatgcttgatatctcgagaaacaataatacatgccaacaaaatctcaatgaattaaacgtcggttacctttaattgtatgatagtgcagtatatagctgacaattaaaagaaaaaaatactaacgtaacgtactaacgttgaagtctgaagatcaagattgtatggcctgtgacaaaagttaaactaacatcagtagatgtccaagtaccacatgtcatgtatgctaaagacgaatcttatctcttcaccgaaacatcttcaaccttcaataggagaaaccaattctcaattgctacaaaaatataaatattttgaaaaatgaaactggagctggtgttcataccatcacctggtgacggacatctccggccattagtggaggtagctaagcttcatgttgaccgtgacgaccatctctccatcaccatcatcatcatccctcagatgcatggatttagtagcagtaactcttcttcttacatcgcttctctctcctctgattctgaagaacgtcttagctacaacgttctctccgtccctgataaaccagactccgatgacaccaaaccacattttttcgactacattgataacttcaagccgcaggtcaaagccacggtggaaaaacttactgacccgggtccaccagattcgccgtcgcgtcttgctggattcgtggtggatatgttttgcatgatgatgattgatgtcgctaatgagtttggtgttcccagttacatgttttacacatccaacgcaacgtttcttggattgcaagttcatgttgaatacctttacgacgttaagaactatgacgttagtgacctcaaggactcggacactactgagctggaagttccttgtttgactcgtcctttaccggttaagtgtttcccctcggttctattaaccaaggagtggttaccggttatgtttagacaaaccagaagattccgagaaactaaaggtattttggtaaatacattcgctgagcttgagcctcaagctatgaagtttttctccggcgtagatagtcctctgcctacggtgtacacagttggaccggttatgaatcttaaaatcaacggtccaaattcatctgacgataagcaatcggagatcctacggtggctagacgagcagccacgtaaatccgttgttttcctctgtttcggaagcatgggaggtttccgtgagggccaagctaaagaaatcgcaatcgcgcttgagcgaagtggtcaccgctttgtctggtctcttcgtcgtgctcaaccaaaaggatcgataggacctcccgaagaatttacgaatcttgaggaaattctcccggaaggattcttggaacggacggcagagataggaaagattgtaggttgggctccacaaagcgccattctagcaaatcctgcgatcggagggttcgtgtcgcattgtggatggaactcgacgctagagagtctatggttcggagttccgatggctacgtggccgctttacgcagagcaacaagttaacgcgttcgagatggttgaggagctagggctagcggtggaggtccgaaatagtttccgaggagatttcatggcggcggatgatgagttgatgacggcagaggagatagagagagggatccggtgtttgatggagcaggatagtgacgtgaggagtagagtgaaggagatgagcgagaagagtcacgtagctttaatggacggtggatcttcgcacgttgctcttctaaagtttattcaagacgtcactaagaatatctcttgaatctaagatgatgaggctcgtctcagaagacgaagaaacatatatattagcacttataagaaaaagacatgttggcagagattcaagacatatatctcttgaaccagattagtaacttactgtattttttctttctttacttgcattgatattaaaattacattcactagtgtcgaaaacgtcactgataaatctcttgaagacgttcgctaaaaaacatcttttgactattctcatccatggctaggatgaattccatgtttcgttgaaaatatctttataagaattgaaactcctgacttcactatacagagtttttgatatacatagtcagatattctagattcgtaactgccaaacgttgtacacttgaactattgagctttctaaacctaaaaactacatatataaattgtgtggccatataggtgaccctttatactatatgggtcaaacttagtctagtggacatttatgggccttgtttcatatccacttcacaatgtagtataaataaatggaattaaaaaatagtttcctctgctttgggagttgcttgaagcctaagtttgatgtcttgaattatgagtattcttaaaatggaatcatgagaaatttaaaatttaaaatagtcactcgtacttagtggggaagtaagtagtcttagctagacttatagttgtgcactttagttttatttttttaatgtaagaaaaaataatttataacctaaaagataaagacagtgaatgattaagagagatgaatcaaaagtctcacaagactctcaagccaagcaaaagatttttgctacgtcatttcccgttaattttggtgactatagttgttagacagattgagtgataagttttcaggtatttgaagttttttttatatggatgattatttaatgggtgatttacatgaataacacttttattgaaaataattaaagatatagcactatatatgtatttattaagtaagtaacttagagggtaggtaaaaagacctaaggtggtggtggtggaggttcagacgacggcggcggtggtggtggtctggcagcggcggtggtgattccggtgacggcggcggtgggtatccggcggtggcggtgggtatccggcgatggcggtggttgtccggcgacggtgttggttgtggtggtggttagtggtgttagtggtgagggtaaaattgtagtaatttatattatatagatgttataatgttaggtttttttgataggttactttgtgaatttataaattttttaggttatatctgcaaatttcccttatttaattcgtacacgtttgttatttactattgaaaaggaggccttcaaaacaaacctaaccattttaggttttttcaaccttaaccatttcaattttaggaaaaatattagaaattaattctctcataatctatgggtgaatatgtaaaagcattgaattctgaatattttttaatttggaactattgcttcttcttcttctttttcgttaaaggattttcttaattaaagaaacgaatgcctacaaattattttacaaaaataaaccctgttgaagaagtgaaccaatttcgaaagactttaaaggggacctgccaacaactatctgccaaacaagaaggagaagaagatatggaagctttatttggtatattaggtcaaatatctctaaactaataactaattgagtaataaaccacaattgcatatatgtgtataaaccattaggtattatgtctcagccattacaaaacgatttttatttttaaatctgaaaaaaatagtttaagaacatgtaaaagtaacttccaaacaatcgtgtcatcttctcattttcatatagcgcttttttttttgtatggataaaatcgttttcatactatcatatagatgaaattcttcattttagacttgtttcttgtgcgatacaatcttttggtttagatgaaatatcatattcctaatattttcatgtcttcaaattttttaaaatttaagatttctaagaaatgacgaatgacagaagatgacaatgtatataagaaataggacatcaaggctttggcaataaagcagacaagatgaaaaggttgttgtgaatgcacgggcaaattatatgattttttcatattcgatttccatgaataattatttatgttttcacattaacgataaaattgtaaattttttctttcaaaatgttaaacttggaaattcagaaatattatattacaaatacaaaaaaaaattaaacatggtctttcgaggatttatctaatttttactaaggttagtttgtcattccttgacgctatttcttctttggccgaagaagacaaggtagatatgcaaatctaacttttgctgaatttgtcaatacttcttccatacatatcatatgcattgtaaatatatgtatgcactagatgatccaacaattttagacaaataactaggaaaatgcggtttccatttatattacaaaagaattttatcataacttaaattatatagaacttagtttttttttattacagcttataatagaacttcgatttatggctaaaatttgcatgaaagcttcataatggcaactcatggaggtgtgagaaagaacaaaataaatattttaagacccaattttgaattttgccatgtgccatatctttaattagtgtgtatttctcttacacttttcgctattacgtactattttattctatccgtatatattcggattttttaaaaaatcgtaaacttatttttgtaagtggaaaagaatttgttagtgggtttaggtgattatgcgtcggtatctttccttttcattggtcctttttttatcttttattttttttttgtcttttgccaaatctattgttcattaaatcaaagtgaaaaagtgtctttggagattaaactattacacgatgctggaaatgttctgatccgatcgtttttcttcttgacgcgttttcttcttacagctgcctagcagcattgatcttccgagcaagaaaaatagtggttaataccgcattatttaatcaagttactattatccgatttgaaaaatgaaatttcctagttttatattattaactctaaagtcttggaatgaaattactgatcaagtagcgaccataaatattttcacacacatcacatattagagagtgggtgtataagacgacaaaaaaaaattagtctcaaatatatatgtagttttaattttgtgtaatttagggttaattaacagtactaatttagcttatttgcttcagtttgatgattacactggtttacaatttaaattatgctaatgaagttcgttaatgcatggtaattactattaagaaatcgatttaaccggacctttaattttatacagtccgggtcagctaattcgattcaatttttgattgaacattttgccttcaattttgctttctgcaaccctattataagattaaaggtccggttaaatatacaaaagggagactagcaagttgtgggacaattatttagacttcttctcctttcacttccttaagtcacatgccattattggggtctatcatatactattactacttttacatgttgtttaacatttttcttcttgatttgataattgaggcaaaaacatgtggaaaagtaaggtctttttactattcaagtgttcacggcaaataaatttacttgcttttgtctctggcatagtagtggttaattataattgaaattgtaggctgaaatcaccataaattagtttgtttagtttaacatttacgtttgagactagtattagtagatattatacatgtaacattcgcattttatgattaaaactatggatatttttaatttttaatgacatttattttagaagtgtctaattaatttttagtgatttttcatatatatatatatatatatatatatatatattaattttaacttcatttgccatcttatatttctaagtttattccgtatatactatgtatatatcaagtttaataaacatttgtaaaaaaatgatgtgtttactaataagtaataactaccttaccgtttttaacaaaacatatttatatatagtcatatagaccgaagaggagactatgtatatgataccttgatgagtgcatgttaaaagcaaataagtaattaacgtcttttctaaagaaataatttaataagtgtatatatatactgtcatagcccttctttatgatatatattaatgaactgttcacatgtgatattaattatttaagacctgatatttctataaactttatccttttgctttcttatatagaaataaactctacatatatatctttagttctttacttcatttagatgacctcaaattattatttttaataaagataatcatggagctaataaagggagggtataagctataaactataaacaaagctttttttgttcggctgtttttggcttctcattttatgaaataaatctttaccatcaacaaattaactaaaaatcacaaaactgacacacacaaaaaaacacaacattttgttcggctttttttttcacttcctttattgttttattaaaaaaaaatttagtttagtttttacataagttttatatttactttcaccataatgaacaatcctcttataaatagaccccttccattattgctctatatcctgtctctcttcagtgacacaaacccaaagaaaagtagtgagaaacaaaatcgaggtaactactagatgaagacgatgacgcaattaaatattgcggttgtggttgtagtgacggttcttattggaatgttgagatcatcggaggctcaacttcaaatgaatttctacgcgaagagctgtccaaacgcagagaaaatcatttcagatcatattcaaaatcatatccacaatggtccttctcttgcagctcctctcatccgaatgcacttccatgattgcttcgttagggtactacatatatataaattaataatcacacatttatattaacatattttatcctcttcttatttttaataaaaatggtaatttagatagtaaatttgagctagagcagaatatttgagatttattgcattttttcaatattgacactgaacttttgttttttaagggatgtgacggatcggtgttgataaattcaacatctggtaacgcagagagagatgcaccaccgaatctaacacttagaggattcggtttcgtggaaaggattaaggctcttcttgaaaaagtgtgtcctaagactgtttcttgcgcagatatcattgctttgactgctagagacgcagttgtcgccaccgtaagtgttacaaaactataaactcgtgacttaattcattagttacgcaaactaattgtaattataatctaaaatttgacagggaggtccttcatggagtgttccaacgggtagaagagacggtaggatctcaaataagacggaggctactaataacattccacctccaacgagtaatttcacgactttacaacgacttttcaaaaaccaaggccttaatctcaaggaccttgttctgctctctggtacgttcattaacccgaaatagccaaattggtctccggtaagttgttataaccggtttactattttttttttgttcaggggctcacacgattggcgtctcacattgttcttccatgaatacgcgtctctacaacttctcgactacagtaaaacaagatccatctctcgatagccagtatgcagcaaatctaaaggctaacaaatgtaagagccttaacgacaatagcaccatcctcgagatggatcccggtagtagcagaagcttcgatctcagttattataggcttgtcttgaagaggagaggcttgtttcagtctgattctgcattaacaacgaactcagcgactttgaaggtgatcaacgacttggtcaacggttctgaaaagaagtttttcaaagcttttgctaagtcaatggagaagatggggagagttaaagtgaagactggctcagctggtgtgatcaggacacggtgttctgtcgctggaagttagtaagcttcagggtcggaatgtggtgtgttatggtcattgttgttttgtgtgactttcggaaaaaacaaatgttgttaatttaattttgttgttgtttgatttgtgtttatgcacccaagaatgatgtgttatggttcaattaatatgtgaatcatttaaatttacaataattcttattattctgtatctagccttctaatccaaggtaaatgagtttgaaactgtaagaaactttcgtgtctccttgaatccggcatagatcttttcattattttcatacattcactaagttcatacacaaaacttaaaaatacatgttcacagaaataaaacagcttgacaatggcccattattcaggcccattatacaacattttcaatcgatttccctagctttcagtttccgaccaagcaatattctccgttacgtcttgaataaatcttttcaaagcagtttctgacgatccaccgtccattaaagccacgtggcacttctcgctgatctcattcactctcttcctgacgtcactgtcttgctccatcaaacatatgattcctttctcaatctcctccgccgtcacaatctccgacctccccaacaaaagatctcctcgccaatgcttcttgatctccacagccaaaccaagctcttccaccatctcgaaagcgttaaacttctgttcagcgtaaagcggccaaatcgccatcggaacaccaaaccacaaactctccaacgtcgaattccatccgccgtgagaaacaaaacctccgatcgccggcttcgccaatatggccacctgttcagcccatccgataacctttcctctgttagccgtccgatcgaaaaacccttctgggagaatctcctctaggtttgtgaattctccgggaggctctctcaatatattcggagatgcacgacggagagaccaaagaaaccggtggccgcttcgatcgagagctaatgcggtttctctcacttgttcctcactgaaccctcccatgctcccgaaacagaggaacactacagatcttggcggttgctcgtctagccaccgtaaaatctccgattgcttcttgtccacgtaatcacaatttacgtttttgagatgcaacaatggtcctactgggtaagcacgtggaatgttaccattggaaagaaacgtcaacgcttgaggttccaagtcaggaaccgtgtttaccaaaatgcccttagtttctctgaatcttctcgcttgagttacaaaaaaagtgagccactcttttgatttgaaaatgtaaggaagacatttcaacggataaggactagtcaaactcggaaccaccaactctacgtcagagtcttctaattcgctcatgtcatagatatcctctgcatcgtacatgaactgaatgtgaagcaaaagtccaagaaatccagcgttagaggtgtaaaacaagtaactagggacgccaaattcgttagcgacatcgatcatcgacgtgcagtacatgtcaacaacgaatcccgcaagacgaggcgcgtctggtagagtggaatctacgagtttagcaaccgcgtctctcaccagtggctttagactttggatgtgggaatcagttgctttgagctccgttggttgttgatctcctccggagattatttcgtaccggaggcggttgttggatgtaagagaggtgatcatggatgtatttttagaactaaaagatatgatgattacggtgatagagaggttgtcgtttttatcaactagttgctccgccatctctaccgtcgccatgagatgactaattgccggagagggaatgaatactagctctattttcatttcttttattctctctacttgttttcccaagtgctttaggagttcattacaaagataaataaaggcgataataggataagctttgttatatatcaaaatgtgaattgatgttatgtctttgaagtcatttttgacttgttcgcttcttttttctactttgttgtcgatattcaagtccttccatggttagagatagacatttttttccattcaactttagaaatttatggaccgtttagtttcaatcttcatgttacctatcattgagacatatcattcaaaatttgaatagtttctttgtttataaagacagctttcattacaaccatttatttttattatcttgttacctcaatctagtaaatgaggttctgttttaaagtacaagaacaaagatatcactttgtctaatatgatattttaaactttgggcctatcatttaagagctacatgctcaaattccttatctagtgaaactatattcttcgcaacctcttcaataaacttttgcaacgcagtacgcgacgatccaccatccattaaagccacatggcatttctcgctcatatccttcactcttttcctcacgtcactatcttgttccattagacacatgattgctttctctatctcctccgctgtcacagtagccgtcggtaatcccgccaaatgttcacctcgccaatacttccttatctccaccgccaatccaagctcctccaccattaagaaagcattgaacttctgctctgcgtataacggccatgcagctgttggaacaccaaaccaaagactctctagcgtagaattccacccgcaatgagttacgaaacctcctatagccggattcgcaagaacggctacttgtggagcccatccaatcactttacctatatctttcgttcgatcaaagaatccttccgggagaacttcctctagattagtaaactctcctggaagttctttgaatatattcggagatgcgcgacgaagagaccagagaaaccggtgcccacttcgctctaacgcgattgcgatctctcttacttgttcctcaccgaagcctcccatgctcccaaagcagagaaacacaaccgaacttggtggttgctgatccaaccaccgtataatctccaaccgtttctcgtccttagaatcatcacgttggttctcaagatgcaacaatggtccaacaggataaacaggaggagtatcactactagaaagaaactttaacacataaggttcaagctcagcaacagtatttaccaaaatacctttcatctccctaaactttctcgcttggtttacaaacaccgggagccacatattagctgccagagcgtgaggaagacacttcaccggataaggacgactcaaactcggaaagttcaacacagcttccgagtctgcataatcattttcactaacatcgtacttgttctcatcgcacaacatttgaacatgatatgtaactgagagaatcccggcactggaggtgtaaaacatataactcgggaaaccaaactcgttcgctacatctaccatcgaagtgcaaaacatgtctagaacaaagccagcgatcttcggcgagtccggtttagacgaatagtcttcaaggagttttgcaacggtgcttctcacctttggttcttggttcttcatatggatttcaattgtcgtcatctcgatggttggttgatctacggcggagataacttcgtagcggaggcggttgttggatgaggcggagagggctgcgatgtaatcggaagcaccgacttcgccttcggaaatgaaaggaaggatgataacggagatagagagacgagtttcacggtccactagtagctttgccatttctaccgttgatcggagatgaccgattccgggataggggatgaaaacaagctcaaatttcatgttagtccttcttctaatctcggggagaagacaagctcctgtttcttgtttttgactgaatctgcgaagcgataacgctcgctagtggtaataagcacgtaactgtttccgtgtttcggcttcattcatttacctctgtttgttgggccgattgattaaggcccattagaaaatattttagtccttttcggcatctcctttgataacaaaactgatgaggaacaataattttcttttcttttttgtcaaaacaataacaatttcccccccctcaaatagtattaatgataagattaaggtatcaaagatcccttacgggagaacttcttcgatattcatagactctttttgagattctttaaaaatattcgaagatgctcgacgaagagaccacaaaaaacggtggctgcttcgatctaacgctttggcgatttctcttgcttgttccccacgaaagcctcccatgctcccaaagcagaggaacactactgacctaggtggttgctcgtccagtcaccctctcgtcctttgagtcaccaactccaactccgttttcgagttgcaacaatggtgctggataagcaggaggagtatcaccacttgataaaaactttatttaccaaaataccactcatctctctgaattttctagcttgatttacaaacgtcgggagccattgtttagatgcgtaagcgtggggaaggcacttcaccggaaaatgacgagtcaaactcggtacgtccaacacagcttcggagtcttcataatcactttaactaacatcgtattcgttctcatcgtacaacatttggatgtgaactttaagtgctaaaacccccgcactcgacgtggtaaaggttagcttcatatcttgggaccttgggtttagagagatgtatgagtttcgtttgggaacttcataatttacaaaagaaaaaagaaaaaaacaattggcaaatatacaatttatctatcatcgaaattagtttttataatttatgaacaaaaatatagataagcataccatattctaaaataataagtacaagagaacaagcatcgatttcattttttcgggtatgaacttctatttttttattttttttagaaaagaaaaattaaacactcacaatcatttgaaacactcacacatccacatatataacacatgagacatctgctagctttctaatcccttcctggacggtcggaccttctatgactcgcacgttggagagcttttgagaaatcactttcgcaatgcacatcgtaatcatgtgtcttcatccctaaacctttatggccttatgggtgtcttaaagatttagggatgaagatggtctgtttaatcttatcttcaacgtttgaatcctgacgatttaaaaaaccacgtggttacgtaaattttgcacgaacatacagttggtaggagggggagtatttgagatttataatgtctataatttcggattttaaagatgtatctttatttgaattatgaatatatatatatatgtggtgaaaccaaattacataatttattattagtttatgtgctttgactgaattaagatttagttttaaataactacaatcaatcagctacagtctcattttaagtatataatgttttacaaccaataatgaacagattgatattgaaaaactcttttacaaactttagaaatattatttttctcatgatcactcaaaagatagaacacacgtaaatagaacacatgcaaattatcatatctagtgataaactgataatatataaaagggacacaacattcaagagcgttgcatgctccggtttagctattctcaagcaatatacttcgtaacgtcttgaataaataatttcaaagcagattgagacgagccaccatcctttaaagccatgtgacatttcttactcatctccttcactctattcctcacgtcactatcttgctccatcaaacatctgattcctctctctatctcctctgccgtcactatgaccgtcgccgttcccaccaactgatcgcctcgccaatactttcttatcttcactgccaaaccaagctcctccaccatcacgaaagcattaaacttctgctcagcgtataacggccatggcgctataggaacaccgaaccaaagactctcgagtatcgagttccacccgcaatgagtaacaaaacctccgattgctggcttagccagcacggctacttgtggagcccatccgatcacctttcctttatcctttgtccgatcaaagaatccttccgggagaatttcttcaagattcttgaattctccgggaagttccttatctatatctcgagatgcacggcgaagagaccacaagaagcggtgaccacttctctcaagtgcaatggccatttctcttgcttgttcctcgttaaagcctcctatgcttccaaagcagaggaacactaccgatttaggtggttgttcatctaaccaccgtaaaatgtccgaacccttctcgtctttagaaccgtcaacatggttctcgagatgcaacaatggtcccactggataagcacgaggagtatcaccactagagtgaagagactccaacgcataaggttcaagctcagcaaaagtatttaccaaaatacctttcatctctctgaatcttctaccttgatttagatacataggaagccactctttcgttgccaaaccataaggaagacacttcaccggataaggacaagtcaaactcggaacatccaacacaacttccgagtcttcaaaatcagtttcactgacactgtactccttcttatcaaacaacatctgaatatgtaacccaagagcaagaatcccaacgtttgacgtgtaaaacaagtaacacggaacactaacctcattagccacgtctatcaccgagatacaaaacatgtcaacaactaaaccagcgagcctcggcgagtccggccgccttgagtagtcatcaacgagttttgcaacggtacgtttcaccatcgggatgtggttatcgacatgtaacccgacggttggttgatctccgtccgagatcacttcatagtgaaggcggtcgttggatgcggcggaaagagctgagatataagcggaagcactgacgtcgtctccggaaagaagaggaaggatgataatggagatagagaggcgagtttcttgctccactagtagcttagccatctcggcggttgatttgagatgaccaagtataggaaatggtacgaagacaagcgcaaatttgttcatgtttctctcttcttctttttttttggatgctttgtttcgatagctttgtttataggaggaataacaagaaaagaaaaaaaaatcccccttaaatcgatatcgtttataaaaaaaatctgcctagttttcctccaattagttagttataaaaatgtttcatactatgagtcacgaaaatctattattttctgattttctcatgatgaaagggtacgtacacacgtgaaacatgcaaagtagtatgtagcagaatcctagtcacagataacgttcaagaccgttgcattgattgcgctagtttcctagatatcgtcatgcgtgcgatcaatgcgagaccgagagaaagccgcttcaccacacaaagacgagtcaaaaaaaaattaaaattaaaactcattgtgggcttttaatagggacttataaaacaggccattttgtacttattgggctttcttcaaaacaaaaccctaaacccaaaaagaaaaaatagacggtgtagccgctgaaaaaaccctaattcccaaagctaatccgccggcgtttatttgagtatatatacgtttcgtcttctttcctctattcagaacaacatatgcttctttctgcttaataatttcaatgagtctagggttttgttatcaaagttttcgtttttttctggggcgtagaaagggtttatggtgatgaaacgaatatttcgtggactagagtttcagatctgggctcttcacccagaatttgaagaaacaacccttggctgtctgagtaaatcctttttcgcccactataatgaaagtttttgttttggtgttccctttgaattgcctatgatgataaaaacaattatcttagcggatttcagtgaggtttttttaaaatcaatgatctgaattgttacacacactgaggctttattagtttgatttgtttttgtttattggggaaatttggtttgcgatgatgataaaatagcacgaaggtgcgtgaagggcagtggacaaagcaatgaaaatttgttttgccgtgagctctctttaataaacgacttctccttccactgagcattttttagatcttccctaaatctttgtgtttgttattattgttgttaataatgaatggcgtcttttaccaattctgaaggattaaatatggttcctttaggtataatggcattgacgcaatattgattgtggtatatcctgatcatttggcttttttttctatgttatttgatcctggaaatgcctcacacatttgttctatcttctttttcattatttacgaattgggtttcctctgaatttacgatgaggtttgttggttgaatataaagttgttggagcgagatggattgtttggagtgcaatgatgttttcttttctcagatttggtttttctaactgaaattgatgattgttctgttttattattcgattaagaccgtctccaatattaatccctattttttcgttggagatgctcttgcttcttcctgttttagttgtcaaaagtcttatgattgttaatcatttgattaaagacattcgcatacaattctgttatcaataatgagaaggaaaatgtgatgatttaacatacggaacaattatggttgctgtcattacttatacgagttcgatgttgagaattgttggtggataatttgtgttgccttcttgatttcctgcgttgaaacaaaaaggttgccacattttgctggatgaagaattgttggttctgtgtgatgttgtttatgtgatcttcaggtgtgatcttacatgagagactaaaaagagagcaacgggtttggtttgagtttgtttaggtcaaaccatcagagagacattacgagatatcgtatcatacccttgggccaattctgcaatatgcgttggagttttgttaatcttgatcatacctttcatatgcctattatcggctttattgacttagttgtatcacttggtcctatactccttgttccctttctctgataagtctatgacttcgctgttatgatcattgcgtttggtttttgtcgtccctgtttgtaaatttgccaagattgaaaatgtaatttcgaagaaccaaaattgtatcacaaggcaaatattttatatacttctaactctcccaaaatatcgagcattatcttaatatctttactatgtcaacttttggcaaaactttattagaaatctgaaaataaaactcacaagattaattatttttcagaaaagagaaactaatatataggacttacctatattaattgtttagagatattcatactccatttacttgaacttttttattaagtgttcagattatgttccatctcttgtattttattgcttttttctctacacataagaacctttcagtttccatttatgaagatttataaaatggtacagatactttagtaaaatgttgtatcattatatggagagatgtacaaatttatatagagataatattcagtaatttaatttagacagatcatacaaatgttaataacaaaaaagaaaaagaaaaaagacaaaactggaatagaattagagaactaaatacctctaattaaaccggatttgatggtagtatacaaaaccaaaatcttgacattttgttaatccttcgaatacataagggcaaaatagtaaaataccagctctgtttttacttattttctttcttaaaagaaatatataaatacgaaggatcgatccttaaattgtttcagctttctttttgttttcattttccggtaatatcattttcgtccgacttgttttctcctccttgccgttaagttccattgaagaagaagaagaagaaggtgtgattcaacgataaacctagcgagaaaacgaaccgcataaaatcgccattgtaggttttcgattttctcagtcttacatagctcgaaattgatgtataactggtttttattcatgctcgattctagagatttttagaaaatcctattccagtgagaatctagagatttccattttgaagcgtttcttctgtttcgtatgtaggaacgagacggtggtgttaatctatggttatggaggtttgcttgactttttgaggttggcttgacttttgaagttttgatctgaagaaaagaggtttcgttgtaattggtttatacatcatgtctgggtcgagtatgtataagacgaagctttgtattctgttcaataagactggtgattgttcgaggccgaattgtacttttgctcatggaaatgctgagcttcgtcgtcctggcgaatcttcttttacaggtaatgttttcgtttatgcatttgaataggctatttattctggtttaagtttgttaatggtggaaggattgatgaatttatgagtgcttctttttattagagtaaaatagaaaagtttttatttaattaagtctcttttgcttagactttgcaagatttttatattatactttgatgattctgtgaagtatttttcttctgaagttttgtggttcaatgcatttgctttgtgagtattattccatattttatgagattgtgtaaaacgtttcagcctacagtgttctgtttgataaacacatggtaatggtatcagtattatactttgctttggatttggttttctccatatcaacttttactgactagttttgtcctgcggaatcattctggaatatgcagaaagatagctactcacaggcttagtattattttttatccgggaatggaatctactggtctttctggctgcaatttatattggttttcttattggagtggaatctgctgggtttttttgtggtgaaatttatcttggttttcttattgctcttgaaagcacattctttatgaagaaaatctatcatgggttttgcggggtacttattcttcgacaactatggttttcagactcccgagatttggttgcaagcaatgcttgttattaggatttatcaatgcctgttgttattacttctggcattttcatacttccagttatgtatgtggagcacgtggtattttctgtgattatttatatcttcaatggtctttcaagcggtttcttggatcaagaaatatgcagtttatgggggtttgattgtcagtatatcaaatttggtggattttgattgtgtaattaaatggaacttcaagattggttcttattttctctcgtccaacataatctgaagccttctcaacctatgatttatcaatgagattcagtgactccacttatttagtacccaattgtggtttctttccaactgctggtaagaagaggacattatattgtggtctctttgaactgggaagtaatcaccattacgtttttctttatgttactagtagttttctgtgatcttatccaagtgttgttgactggcatgattctgattgtttgaaatggagttcacatctgtagcacaagtatgctttactgcaaagtctgtttcgtctactgcaggaagacgtcacaatatggatagtgacttaagagatagacgtcacaatatggatagtgacttaagagatagacttggtagacagttttctccagagcggagaccttccttagacagaagtggaagacgggtacaaaggtttagtggtaagatctacagctttgggtttatggagttctgttgtcgattaggcagagtcaaaagtctctgtcaactgtttgttctgtatttctttcttttcttattaccgacggaattcaaatttgcaggacatgacaattctatgccatttgagaatcgaaggtatcttctcccctcggttttgcttatgctcatgctatgtgaaatttcagtggtaatttgatggccatgctttaacaatgcggctttatatttcttattatcacagagataaagactacagggagaaccgtagatttgatgaacgacgtgattatgctggtggtttgaaagttgggaataggattgaagacagggcagaagatggaagaaataagtttcatggttacaataatgttctggaagagcaggttcgaaactttcattttcttggttgggtgttagttgaggacgtgatttcgctttatcttaatctaatgtttagtggatgtaaacatttgtaaagatgttgctaaaggacccaagtccaatttgtctatatgcagttaaaagatgtagagatggatgttaagatgctaactgatgacaaactacgattggaggtaaatttctccattccacaattgatttgattgcatcgtaaatacgagttaattgacaaatttcttttgtccaaaggcgtccgttgaaaggaaggcacatgaagtagacattcttacttctaggatccaggagcttgagacccagttggatagagagaaagatgaatgtaggaggtaatgactaattcctttttgatgtttgcttgaaattaattatgatgcgatatacttgaagaaactttatttggcaaatctgggacttgatcttctggtgacaagtattgttcaatccttttgtgtgtcaggattacttcaagctcgaagaaatttgtgaaagaatataaccgtttcttgcgggcacaagatgatctaaagaggcaaggcatttatctctatttctaattgcttcttatttaagaatgcaaaaattcattcaataacacaatgccaaacctataggtcagaagcccgtcttcagaaattgggaaaccaacttagtacgtatcttgctggaagtgaaggcaataatagggatgtaggcctggatattgtgagcgatgaagagactaatggtcggaatttgagaactgcttgtgatccacataacgagttgcagaatacttcttcactgtccaggaaaaagcattatgtggatcaatatactacgaaagaacctgttgaagatggtaaacttatctatactattagatttatgtctaaactaaaaatcagttcatacacacgttatgaaccttctccatctgttttaggcttgatagggagaggtgaagaagagaaggtggagaatgagaagaagagaccaccttgttggaatatgctttcttcaaaatcatattctgaagaagaaagtggagcgtggaacgatgaagacacaattaacaggtcctcgtcaaaggaagacaattggaaaagaagaaggttctctattggcacctcagctaccgataaggtacatcatctttcttcttctgcagaaatggtgttcacttgaagcagatcgacgttggggatcatgttaattcttagtgcttttgatgatctttcacgttgtagatgtgtttttgttaaaagccgagataatagacttggttacatggttacggtgcttcaggttatattgtctacgagtatggcagctcgggaatttgatgatgttgcagaatctgaggaagagaatcccgaagcagccaacggctctcctctcatatctcttcctccacccccacctttcagagatgcccatgttcaggtaagcacgagtagattctcgaaaacttatgttggtaaactaaatttgccaaaaagtaagtactcggagatgatgatcctcacgaatctcgtgtgctttgtgttcagagagacgaggatgatgtaaacggtgatgtgatggaacagaagaaagcctatgacgatgattccgtctgatcaagactttgaacattaaaaagtagcctgtttgttaggtgcaatattgacgaccatgattagaatcggtacatgctttgttcatcatctttagatatatattgaaaaagaactaaagcttgatcttcaaacgaagatgtccttttattgtttcaatgttgcgtagagaaactaacgccatactctttatttcagtagtgatttccagtgtaatcactatataggcaaaattgaaaatttctgttcttttgaaaacaaaaattatgcttcaaattgatgaagaatcttcaagacacttagagcacttgcagctgaaaccatagtctgcaagtaatgcttgtctctctttgtatggaagctcctcgtcgatatatgaaatcgtcacctgttgttttacatatggaactcaaaagcaagctctcttttccaaaatattcaattgctattacgattaaagagaagatgcgtacctcttcgttcttgctgatgcgtcttaatgcaattatcactgcttgtccgtctctgtcctgcaaaacccacaagacaaacgagttacacttggattcagtctgaaagtgttgatgaaaaatcttcgatccttaagatttgtaggccataaagaggacgaagatgtaagaaggatacctcttctcttttgaaggcttttgcattagggcaacaagaatggttcatacagctttgcagagggaagaaggccgttcctaaacacaaatacagatgatgtaataatgtcaaatcttggttacaagttacataactcctctgttttatggttacaatgttcccttcatttctaaccttggcaacagtccgagtactcatcaccaagagcatctagaaacggtcttgtgatttcctcggtttcttcctatcataatgagaataagaaactggtaagcgtcgatagattttggtcaaagaacaaacaggtggaaagcattactctgttcagaccttttctgcatcaggaagatcatcaatatacaagaaatagtcctctactggtgatgctaccaccaagtctctgccagagatcaaagcatattgtgggtaaattcattgtaaatgtaagagtataaacaggagttgacgactcttacaggttattcagctcaaacatgccgatgatattcccatagatttcgagggagaacacttatcagcgtcaaggaatgaccctctatgagtaaaaaatagaagtaggaaacgatggtacagataatatatcaaactgactaggggggatacgggcttcacattctttgtcaaatatggctatcttcaggagctccaaagactggagataaaacaatattattcagttggcaaaacagtcaggatttgaaattgatgcactggcgattgtgatctctacacaaaacacggcaagtaaactcaaccttcaaatgatattatacaactgaaacacctaccgtacacgcaaggttctttatttgcatcctgaaggctccttcatcagtaggatcaacatcatctggcaatgcaatgcagtcccaccacctaccaaagagttttagataatttatatgtggcgtaggtatatcaccgaaaagcttattaagtatgatcatgaggtaccatatgtaatttggatcacattcagaaacacatagaaaaaaaaagcaagtgattcattttcttcttcaacagtcaagaaatatctaatggcaacatcaatgtataccttcttttgtatccaatcgatactggtttccatgcttccaagagaagcgactgctttggctcactctgtttcgcttttttgtccacatgttctgctttcagtttcctgtaccttagaatggtaaaggcgattgcctagccataatacattttccagaacaggttagtttattttatttatatagtatgcgaaagggtcattccccgtaaactaatatgtcgaaagttccatggcattttatatacgatattcaaaaagtagacataacaacttatacaagatataccttcgcagccaggagaaaaatatcattggtatctgaaaataaaaaaacgaaagatataaatatagttatcgcaagacaaaacattcaagtccaaagagactaataataattttaccattagcatgtttaataaactctccaagcgcctctctagatattgattcagacctctcaccagtacaaagtaaggaatgagaactctcccaatctgccgctgcgcatgattcactatatcatattgaaacaacacattagtataaaaacgataatgtatacgaaagctgaagaccttaaatctcaattacctgcagtagaaagcctcctgacatcctccaggacacgaaagaggcgacggcaaaggaaacttatcagtatgcggcaatgccatttcaccattcatcaaagaactaacaactccttctggaagagtattatggcttgaactgcttccaccacattgttcctcatttccattgtacttcacacattcatcttcttcggatgaatcgtcgtcacaacaaccagagacaccgagattcttgaaatagagtttcctgccgatttgtttctcgattgatccaatgaaccggaaacaaaaactgcaaactaaacaatccaccttgttggaagaatgttggataccaacaagaatctcatctttcaaaatgagttcatcttcgtcaaactctgaatttgcataaacacctaaacatttggaagaaatcaaatttgaataaactacattagaaccactgagaaatttaagaatctaaacaaaaactaaagtaagaacttaaaccttttccaatggttccattgtttttcacttcaattccattgcatcttctactagttataagcttgttgaaatactcctgaagaagacacaaattgagaaaccagaatcgagctcagtcactataacattctatggagattagcctcaaacatgcgtatagagagagagagagagggagagggattttacctgaagttggggagttggaagcggagcaagaagagcggcgacatccgcggcgaagttttcgtcggttttgtaaacggaatccatagccggagattttctcgtacggcggcgcgtctgtgtttttaatttggtgctattttgactgtttgggtccggaaggaccagatagactctttggagttgagatggatgacccgagccggatccatacccgtcctcaatttctaaaccaaattagtgaaactttgtctttgtgaagtgattttaggcattagaactatttgtaattgatccataatatccaactttttatttgaattgaaattaaactattaaaagttatcaaaattaggttatagtaaggaaacgtataaataatttttaattaaatctctttaatttaaatatttcgactgaattatgtaaaatttaaaatacattatatagggttaacttaaacaagcataacctaccaaaaatttaatcaaagttcaaaacaattatatgaatcaagaagtatgttgttgacacaaaaaaagaaattgaggacaggaaaatattattagaaaactgagtaattaattatgagaatccttttacgaataagtaagataaaagacatgcctttcttagttttcttaattaatacaacaaaccttaaacttaaagtattcactaatttttttttaagaatatgatgatgatcatatttattatactaataattcttcttttacttatcatctgaaaaaaccaactaattaagatgaagaggaagacttctgcttcacaatagaagttcctgtaactttgatcatagatttgagtcgtttatccatctttagatattcaattgtcttcatatacttgggatctatacctcggtttgttttagtgaactcgatcattctcttctccaaatcctagattttacaaaggtttaactaatgtgttctacatagaataaaaacattagaagtttcaaaaataccagaaaaaacatttaccttcacttgctcttcatctacttccggtgcttccatgagacgatccaattcggcttcaatctcagcctctgtaagaaccatttcttgaattcttcttttcgtagtagaacaagagaaaaagagttttgtatatatattttgtttttgttcttcttcttcgttcttgttaatgctttcctcaatttatagatgtattgtgtgtcatgtaagtcacataaaagcatcactttatatatctactcatgttgatgttgttcttccacaaagtctttgatatatttacctattctgtgtcattttgattaaaactgcaactttttttttttaactagggaaactcttgcttacagtatttaattactcctaaatttttatgtagttcctttttttaatccattgaactttaagcaccgatcgactcaaaataaagtattaaacctttttcatatagtatagattaatgcacacactttctgtaaatgcataaatatcacgtcttatatgtgaatttgaaagacatacccaatgttaacaatctacaacctttagttaaaattttacatgtttcaataattgttttgcaacaaatttataaatctcaagaactcttttgtttgttaaacaattttgtatatatctcaattttgttaataaggataagaataagaataagaatatgtcagtatagttttttaattaaatctataactttaattattttgactcaagatatgtataactttaaatacattttataaggtttaaacaagacataaactatcagaattttagtcaaaacaactataggaatacaaaagtatattattgagtaaaaaggagtattttttactttcacaaagaacgaaatatatgtctactttcattatttaattaataaactttgatgaagtcatcatcaattacattgatcaagaaattgaaaaacacttaaacacaccaaagaaaaaaaagataaaagaaagaaagcagctgctttcattattggatcatcgaacgtagatgaagtcaccatcacctagattgataacgaaacacatactaaataagaaagaaaagaaaagaaagaaagctgtttaggttttgataatccgctcattcaaaagcccatttattctccctacgaatcgctgcttcttcctcaggtgttaaatcattctcaatgttgaagaattcgcgcatctgcttcggagtgttgcctttgatcatatccgcgacggtttggcctgctagatgaagaaggcttttgttgtttaggaaattcgcagcattggtgagagcaaagatcgtggatttatctttttccatgaactccttgtcccacttctcgagatcatcgtcggagcaaggattagcggcatcgacgtggtgcttgttgcagtactcgatcaccatctcaagaatctcgcttgtcatctttaaaaccaggattacgttatctgtacattcggcttcaatcatatgagctatggtctggcattggcgtgcggtctcttcttcaatctcaaacgttttaccctcggagctcttcaacatgatctttttcgtcgacattgttgttttctttgtgggggagatttgttttttttctctggaagaaattttgatgaaagattgaagaattgagaaaatgattgagtaataaggtaatgaagttatgaacctatgagtcttgtctatttataagccctaactttcatagatgcatgtatcgtgtcaagtaagtcacgaaagcatgaagttgtatgtctactcatgttgatgttgttcttccattaagtcttttttttatgtgtctttttgattaaaaccacaacatttttatgtgtttacttgtaagttagtatgtaagccctaactttcatagatacatgtatgatgtatcgtgtcaagtaagtcacaaaatcattaagttatctactcatgttatgttgttttaatttccactaaagtatttttctatgtgtcttttagattataactacaactttttttttaattagaaaattcgtgttttacagtgtttactcctaagtttctatataattcttcttttaattctttgttttttattattatatactggactcaattttcccaaataaactttttcatcaagaatgcactatacgatgttgttttatacacattaacgcgtcttcaaactttctataattgcatgcataaatatcacgtcgtcttacgcaattgatagtattacacggcaattgatagaggccctcgcagtaatatctaactccaaatgtatatcaaactttaatttagacacaatcaaagaaaaatgaaaaacaagtttcaagtttcagactatactaagagactcgatcaatgatgcttaagtcagaactcaggacaacgcatttgaatacggcctttagttgaaatttcaaatgttttaataattgttttgcaacaaacccatgtaaaaaaagaaatcatttcatcatcgtattacacggacggtaatatagtctttgtttcactttaacaaaaaaaaaaaaatatagtctttgtctctttttctatatctatttgtttttcttgatactaaaaatgtaaaagcgtatcattttctgttaaacagtaagtatcatttttaatacattttatacggttaaacaacccaaaacctaccaaaattaaaccaaaacaattctatatatgcatacaaaagttttttagtatacaaataaacgaaatatagtttctttgatatatttaatatttttatgtgtttggattaaaaccacaactactttttattataggaatacaaaagtatttcatcgagcaaagaagagtatgttttttagtatcacaataaacgaaatatatgtctactttcattatttgattattgaactttgatgaagtcatcatcaactacattgatcaagaaattgaaaaacacacactaacgaagaaagaaaaagaaaaaagaacagaaagaaagcttctttcattattagattgtcgaacgtagacgaagtcaccatcatctacattgataacgaaactgaataacacacactaaaagagagaaaagaaaagcaagaaaagcttcttaggttttgataatccgctcattcaaaagcccatttattgtcgttgaccatatccgcgactgtttggtaagctagagcaagaaggcttttgatgtgtaggtcatacgcagcattcatgagatgaaagatcgtgtattgatctttttccatgaactccttgtcccacttcttgagatcctcatcggagcaaggattagcggcatcgacgtggtgcttgttgcagtactcgatcaccatctcaagaatctcgcttgtcacgtttgaaaccgggattacgttatccgtacattcggcttcaatcatatgagctatggtctggcattggcgtgcggtctcttcttcaatctcaaacattttaccatctgagctcttcaacatgatcttttttgtcgacattgttgttttctttgtgggggagatttttttttctctggaagaaattttgatgaaagattgaaaaattgagagaatgattgagtaataaggtaatgaaaatgagtcttgtctatttataagccctaactttcacagatgcatgtatcgtgtcatgtaagtcacgaaagcatgaagttgtatgtctactcatgttgatgttgttcttccactaaagtatatttttttttgtgtctttttgattaaaacaacaacttttttatgtgtttacttgtaagttagtatgtaagccctaactttttcatagatacatgtatgatgtatcgtgtcaattaagtcacaaaatcattaacattgaaaggttatataatctgtaacctttatttgaaatttcatgtgttttaatactttcaatatatggtctttgattttatattttccatatctctttgtcatttcttaatgtataccaaaaatgttccaattaagtaacttccgcacacagttttaaattttaattaaaaaaaaaaaactcatccactgttttttcgcataaaaaatataagaatttattcaattatatgaaattttactttataataaaatcaaaatccagtagttatacgaaattaagttcattacttcattgttgctttacgaataagtctgaaatttgaatatgtctatatcttatacgcatctataaatatatatattatattgcagtttttgtttttcgttaaaaaatattgtatagatctcaattttttagaaaagaaatatgtcaatatatataactttttttagttaaatctatttagcttttaatatttcgcctgaattttgtataattttaaacacattttataagattaacaagccataacctgtcagaaatttaattaaaaaaaacagaggaatgcaaaagtattttatcgagtaaagaagagtatttttgtaagtatcatcacaacaaacgaaatatatgtctactttcattatttgattattgaactttgatgaactcatcatcaactacattgatcaagatattaaaaacacacactaaagaagaaaacgaaaagaaaagaaagaaagcagctgcttccattattggattatcgtacgtagatgaagtcaccatcacctagattgataacgaaacacacactaaataagaaagaaaagaaaagaaagaaagctgtttaggttttgataatccgctcattcaaaagcccatttattctccctacgaatcgctgcttcttcctcaggtgttaaatcattctcaatgttgaagaattcgcgaatctgctcaggagtgttgcctttgatgatttccgcgacggtttggcatgctagatcaaaaaggcttttgatgtttaggtaattcgcagccttgatgagatcaaagatcgtggatgtatctttttccatgaactccttgtcccacttcttgagatcatcgtcggagcaaggattagcggcatcgacgtggtgcttgttgcagtactcgatcaccatcgcaagaatcttgcctgtcacgtttggaagagggattccattatcggtacaatcattttcactcatatgagctatgataatctggcattggcgtgcggcctcttcttcgacctcgaatgagtgaccatcggagctcttcaatatgatcttcttcgtcgacattattttttcagtgggggagattttttctctggaagattgaagaattgagtaaatgattgagtaataaggtaatgaagttatgaacctatgcgtttgtctatttataagccctaataactttcatatatgcatgtatcgtgtcaagtaagtcacgaaagcttgaagttgtattgtatgtctactcatgttgatgttgttcttccactaaagtctttttttatgtgtctttttgattaaaaccacaactttttcatgtgtttacttgtaagttagtatgtaagccctaactttcatagatacatgtatgatgtatcgtgtcaagtaagtcacacaatcattaagttatctactcatgttatgttgttttaatttccactaaattattttttatatgtgtcttttaaattataactacaacttctttttttttttttggaaattcgtgttttacagtgtttactcctaagtttctatgtaattctttttttttttttatctactggactccatttttccaaataaactttttcatcaaaaatgcactacgatgatgttttataaatgaatgcataaatatcacgtcttacgcaattgatagtattacacggtaatatctacctctttgattctaactttttttagatcttaattaataccacaaacacaaagttccaaataggaaacttcagctcacaattttaatcaaaacaattacatatgaatacaaaagttttttacaatacacaatgaatgaaatatatatgtcattattggattattgaattcacaagtacttgccaataacttatgtcgtgtgtaactgtgtaattagttttgctcttcttaactattccttcttgttactgatttcctctacagttttgtcattgtattgtgtcaagtaagtcacaagagagtttagttgtatagttgtatgtctttatatatatatatatacggcaaaagctaattatcgttgtatgtctactttttttttttttttttcgaaagttgtatgtctactcatgttgatgttgttctccctttctttttaagcaatgctgttcttctacaaaagtctttgatatattacctttctatgtggccatttgagtaaaaccacaatttttttttaattaggaaactcgtgtttgttgtatttactcctagatttgcttgtaattccgtttttatccattggactaaccaccaactcaaattttcaagaaaaaaatgaagattaacaatgcactatgatgttgtgtacattacatacgcacttgaaaacattgaaaggttatataatctgtaacctttatttgaaatttcatatgttttaatactttcaattaatatatggtctttgattttatattttccatatctctttgtcatttcttaatatataccaaaaatgttccaattaagtaacttccgcacacagttttaaattttaattcaaaaaagaagaactcatccactgttttttcgcataaagaatataagaatttattcaataatatgaaattttactttataataaaatcaaaatccagtagtttgcgaaattaagttcattacttcactgttgctttacgaataagtctgaaatttgaatatgtctatatcttatacgtatctataaatatatctatataatatatattatattgcagtttttttgtttttttttttgtaaactgcagtttttgtttttcgtgaaaacatattgtatagatctcaattttttagaaaagaaatatgtcaatatatatatatatatatatataactttttttagttaaatgtatgtagcttttaatatttcgtctgacttttgtataattttaaatacattttataagattaacaagccataacctgtcagaaatttaataaaaaaaaaataaaggaatgcaaaagtattttatcgagtaaagaagagtatttttgtaagtattatcacaacaaacgaaatatatgtctactttcattatttgattattgaactctgatgaactcatcatcaactacattgatcaagaaattgaaaaacacacactaaagaagaaaacgaaaagaaaagaaagaaagcagctgctttcattattggattatcgaacgtagacgaagtcaccatcacccatattgataacgaaactgaaaaaaaaacacactaaagaagaaagaaaagaaagaaagctgcttagtgtttgcttcacccgctcattcaaaaccccattgattctccctacgaaccgcttcttcttcctcatgtgtataatcattctcaatgttgaagaatttgcgagtgtgctccacagtgttgtctttgatcatatccgcgacggtttggcatgctagatcaagaaggcttttgatgtttaggtaattcgcagccataatgagatcaaagatcgtggattgatatttttccatgaattccttgtcccacttcttgagatcctcgtcggagcaaggattagcggcatcgacgtggtgcttgttgcagtactcgatcaccatctcaagaatcttgcctgtcacttctggaagcgggattccattatcggtacaatcgtcttcactcatatgagctatggtctggcattggcatgcggcctcttcttcgacctcgaatgagtgaccatcggagctcttcaatatgatcttcttcgtcgacattattttttcgctggggggagattttttctctggaagattgaagaattgagaaaatgattgagaattgagagaaggatttcagtaataaggtaatgaagttatgaacctatgcgtttgtctattaataagccctaataattttcatagatgcatgtatcgtgtcaagcaagtcacgaaagcttgaagttttatgtctactcatgttgatgttgttttccactaaagtcttttaaagctaaaaccacaactttttatcgtgtttacttgtaagattatatgtaattcaattttatatattggactaaccacctactcaaatattccaaataaactttttttattaaaaatgcactatgatgttgttttatacacataacgcgtcttcaaagtttctataaatgcatgcataaatatcacgtcttacgcaattaattgatcttaatattattacacggcatgtcgagatctctttgttttcacttaataccacaaatgttccaattaggaaacttcagtacacagttttatttgatcatccactgtttttcacagaattaattgatcttagtattacacggcaatgtctagaagatctctttgttttctcttaataccacaaatgttccaattaggacaattcagtacacagttttatttgatcatccactgtttttcacatacagatcaggattttttttaccaactatatgaagtattactttataatataaatgaattaaatcaaggaaaaatataagcaagtcatattttctttaagcatttcgatatagaactaatccacacttcgtcgatgaactaatgactaaacaacggacatttgtttatttcttaaagaattttgctaagttgctaatacaaaaattacaaacttggatactttcacagaggcactcgcagtaatatctaactccaaatgtatatcaaactttaatttagacacaatcaaagaaaaatgaaaaacaagtttcaagtttcagcctaagagacactcgatcaacgatgcttaagtcaggacaacgtaatatctttcacctctctttttttgttgatattaaacacttccaaagaactgttctattgactgcgaggtgaacacatttggagctgttcgctcgggtttcaccgtagcgacatgaagctgatatttgatgaacctctgcaaataagaggggaatgagttaaactaaaagctaaggtaagaatgtaaatgagtaaacaaggaaatgactttacagctagttgtgtgctgatttccgggtttgtatcaatatgccagtcaggttctagctgtctgacaaaggaagttcttcctatctctgtactacaaaagagcacctgcaatttcatgtttacagaattgtgattcttacattttctcgaaacatacacagcaatatcgaaagtcatgctttgatacgattattggaaggctttctaagaccgctaacgagtgcaagattttgtagaagaaagcttgatttgaataccttatctttgactaaaccaccagatgtaaaaactcctgcattctctaaagcctgtaaaactttggcctgcaaattagagctcaaaatgtgagtttcagaaactactgacaataagcatatagtaacaccaatgaactcgattcctctaataatgtaaagatatgtgcttaagaatccttctaattacacattattcatcgaccaactattatcgatatgaatatccatgtaatgttatgacctactgcccgagtatttaagctaaccatgttcaataataaccacaactaatttactctgtcctactagagactagttccaacacgaaggcaaacaaaagaacacgaatgagagagaaaaacaaatgctcacctcgctttcatcgtcaagaactctttccataagatacaaatcactatactttgtaatctctagtagaacttccaaaacagatgacctcactgtggcttgtttctgcataaaatcactcgtctcagatacaaacgcatcacacactatataaataaaatctcaaaacgaaaatatcattacttggagttcttctggacttgtttcctcaagaattactccaagaagacggcatgttacctacaaatgcatattagacaactcaataataaaaccaacgcttcaataaggtgcctaacatgaccaaacactatccatagctctgagaatattaatactgatataaaattaccttccttccttcactaagcttctgtctaactatttgccccaaagtaggctgcaaaaatacagaacaaagtgaataatactctataacacaaaatttcaaactgtttagagaaaaagaatgttactttaacaggttgaaagaactgatcaacaacatcttgcaccgcattatcctcacgaggcgaagaaacttccggagcaaccgaagaagctagattcgactgagaagcagcagcagcagcactagacgtttcagcattgtgaatcctacgcttcggctgccttctctgacgttgctctccgggcgttcttatcgccctccacgtaaatatcaccgcaatcgcaagccccgcaatcgcaccaattgatcttgaatcctaaatcacaacaacatcaatagcaaaaacaaatcaacttacataacaataataactcaaaagtttcgatc

SEQ ID NO: 450 - DNA, 83205 bp, Arabidopsis thaliana
gatcctctctaggtaaatattcttactttggtcgattttcgtatcaaagtaatcaatattgaaatggttgcatgtaaggtatatataagaacgtgctatgactttttttttggtggaaaaaaaattagatatctgcaaatttggtcacgtgcttcatgtttcaatacgagggaaacaaatatttataaagaaaaatggtagtttttctttttctttttctagtgagtatatgtatatcaattttgagtctgaagaagtattaagtatatagagtaatgtgaatctaatttgcaattgattgtgagtggtgtctttacaatatttttattttacatgctattatgatttcaatgatccataagttaaataagttttattatgtatgtgtaaatttaaaatgtatgtttgttttttcaatatatatttgtgttgtctttttgaaattttaacgatcatgtgtttgaaaaaaatcaatataagacttgtgaatctgacttttggatttgtgaaaagattggccacatgtagtgtttgtgccatgtgaggtttggagcgatttggtttaatatactttccacaaatagaaagtcgaaccataaatttgagtggtgagtggatttcttaaaaaaaaatttgagtcattagggaatacattttctgaaagcaagattaaagctaaaggtaggtatagaaaagctgatatagtggatgaattaaaacacgtgaagcatgttttacaaactattcacaatacgcaagtcacgtgtttttctctttgtttacatgattttgaacatgggtcattaatatgactttgatcaatattgatattgaaaagatgtgttaaagggttttgatgtttagtctgactttagtattcacgacacggaccatttggcccacgactttatggcatgaccttatgaagaacactacattaattcatgtactaagagaggatggtttgagcaattctttttctctaaaccgagtttttatagagttgtctaattgttttagggaccttttatttttttttgtcatctaggaagtagaaattcttgaattaaacttgtcgtggaaccatacaaatatacaatatgtaaaacgtccaaacgaaggaaattatgcccgtggacgaatatacatccccggaaactaaagcgataccaagagatataaaaattacagagcaaaaaatttaaactcgaaatagaaagaaatcgaaaaatttaagtctgaaaaacataacgtgattgctttttgggatctgaatccattaaagccattacacaccaatctatttattttgttgtcgaaagcatatgtaaaacgtgattgctttgtttaacaaaacacccctttgggttgttagtttcttgatggaagtttgagtttgggcttatgggtccctattgatacctccaaatgaaaaaggcattgataagacggctcaatcacgtttcattatgtttttgtcaaccaatccaccgttttgtacacaagtataaacctcccatgtgtaaattatacatatcaagattgatattagcaggagtaacatattagtactaaggtctatgtgatgcagtgatggtgtttaagattttcttcaagggaccaaaacacacaagttgatacacttgcaaagtaggcaagaatgtattcacaatctactttaatcccttggaattctttgtatttttctttgtttagcaatatacatcaaagtgccagaagacaaggaaaacacatcctatcaagtacgaggggattatataaataaataagaagagtatatgtgccaaattgataacttctaataaatggagggtgcaattaataaataaggagagacggaaaaagagacgccgttgaaacaccgcaaaacagagaagcgccttttgattgtctctctcccggagatctctctttctcttcttctccatccttcttctctcggcgcgcgcttcatccccaccaccttcgaattcgtgtacgatctctaaaatccagttttgctatcgacttatctcttattgcgccattgttatgcataagaaggggattttaacaatctagggccggtgaataagatcatacttgaaaaatctgattttgtagatgaaatcgttgtgggcaatttgcttgtttggttaggtattgtttttgagctagaccctttagatataatcgccatggaagcgctctgctttgtttggatcgagaaatatattgtaagaagaagagaattgcatgttttggctatattgtattatctgatgttggtttgtaatatggtaggccctttgagggaagctgctaggatgggtgtgaagcaggctctaaggagcattgatgcgtttccaagagcagaggatcatttgcttcagaagacacaatctggcgctgttggtaatggattcttttttctattcgctcttctcgttattttagaatccccctatgtgtgtttgaatatgttaacattttgaatttgttgttattgtagtatctattgttggacttcttataatggctactttgttcttacacgagctgagttattatcttaacacacttacagtgcaccaggtatgtgtttagttcgagcgaaatctggtgcttttctgtttgttcctctgactctagccttcaaactgctaggaatagtcctatacattcaagttaaacatcttcggtttcatgtgtcttatgaaatccgtagatggatcatgtgaattagtattcttccatctgtcatcgttgagattcattgatgccactttgtgtatgattagttaagattacgtgaaagtatgtcattgtctcattaacctagttatcgtagcgaactatgcatttcttctataggtaacttaacttgattgaggtatgcaaaataattagaatgtcatactcaaagttttgtgattcatatcatttgggaaatagggaattgaagtctctctgttgagttaacttcattgataccctagtttttctatgtcaatatgactgactcgtaggtttttttttttctcattttgtttactataaattatcgtaatcaaattggaatttgtatcattttttttttgtagatgtcagtggacttaaagcgtggagaaactcttccaattcatgtaaatatgacgtttccatctttaccttgtgatggtaagagaaatccattgatcacttataagtcaagtctatattacttttcttccgccataccttctggaatacttgtcattgtagacgtaatcatttgattttttttctttttgtagtactgagcgtagatgctatcgacatgtcagggaagcatgaagtggatcttgatacaaacatttggaaggtaagatgaatccagatgctaatgcaaatcacaaatttcttcagatgttttcgtttccacctttttgaaattaccaaagttcattttgtttgattgcgcctaagacattatagctggtcatactgttcatatataggttaaacattatatttgaagggaactatttgaatatttctcttcgcatctttatctcacttcgtatggcattttgctctagttgtactgttttatactcatgttaattgctcactaattgtgaatatctgcagctccgtctcaacagtcatggtcatatcataggcacagaatatatatctgatcttgttgaaaaggggcatgagcatggccactcacctcacaagcatggtaacattctcaactttatgagcctttaccgagtttgtaccttttctgagagcttcttttcccttaactgttgttgaatgtaatttgtcttgaatcttttggaagaacagatagtcatgtgcactttgaaactaggttcatgtcaaaacttgtagtaacaatactcagatataactgataatatgatgtacgataatcaagtatgttgtatctggagaaccgaattactctaaattttgtgcttccaagcaaatattaataggaatcttacaagtctaattgaggcttcttagtaaggtgagtggtagatatgtaagagagccccagcgatagttttcatggtagctaaatgtttttgggtataagaagaaagacttaatcatgtatacactttatcttttctgcttgctgaagatggcaaagaagaacacaagaatgagactgaaaccgaagcattgaatattcttggctttgaccaagctgctgagactatgattaaaaaagtgaagcaagcattggcagatggagaaggatgtcgggtattaaccgtttctcttgtcattacacaaactagagattttgtgttcccggcgtttaagaaaacagagactaatatttggctattttccaggtttatggtgtcctagatgtacaacgggttgccggaaacttccatatttcagttcatgggctgaacatctatgttgctcagatggttggtatcctcatctcgctttattaaccatccccttactaagaacatgctttaaattcagattcgttaaagtagtttaatttagtaccgtatgatcattattgacgtttgtttccattgatttgtcaacagagaaagtataaagccagaatttaacttatcaataaccgataaattactctcataatttgtgtttgcacctcattcactgacttactacttgatattccttgttagtatataactagtctctttactctctgaacagatatttggcgggtccaaaaacgtaaacgtgagccatatgattcacgatctatcatttgggccgaaataccccggaattcacaacccacttgatgacaccaaccgaatactccatgacaccagtggaacattcaaatactatattaaggtgtttatccaaattcgttactcttcttgtactcgtatctctccgctggctgtatattttatatacttcattatttgtttactttgaagtttgaaatcatttacctgtatgatccattttgtttcacacaaatccgtatttgtaaggtaaggtcactaaattctttctaatatggcgcagattgttcccacagaatatagatatctttcaaaagacgtactgtcaacaaatcagtactctgtaactgaatatttcacgccaatgactgaattcgaccgtacatggccaggttagtcgatcaaacttcatttccagtatgcacctggttcttattactctctttctgttttctgatgtatctttttttcttccagctgtttacttcttatatgatctttcacctatcactgtgaccatcaaggaagaacgccgtagttttctccacttaatcactcgtctttgcgctgtattaggcggtacatttgctttgacaggttagtcccatctcagtcttgcctccaatactcaatctttcaaaatcttttgcctaatatagtttatctcataccttaaaacaggaatgttagatcgttggatgttccgctttattgaatctttcaacaagaagccgagtactagagcgtaaactagctgaaacagagacaaaacaatgagaaacaaaaaaaaccaaaggaaggaagaagaatctctcaaatcccaaaacttgtatctgccttcttcagacaacaacacccaccagagattccaggattgatgattacattactcagaaactctagaatccatggatatagtttttttttgagtctctcttatgtattactctgattatctctggttaaactagtagagttaatttgtaatttttattcaccttgcttcctgggattttaacatttttgcatcttttcacttgtctcagtaaaaaaacaaaattatactgtagctcaccgtaagataacgtacactcgtcacaggtgatcctgtcctcacaattctctctgatttcgcttactctttcactgaaaccctaatttggggtttttcagatttccttcaatctctcgtcgtcatttcttcgtctcaccgttgaatctgaaaatgatcgccggagtattgcgccgatcttcactcccgtcgaggcagactctctccgccgcgttagcctccttcaattcgtgtatttcgcacaatctcactccagccaccaccggagcttccgtcagctctcgattcactctcgcgtcgtctcctaactcgtttggcatcagagcgaggaacatccacattagatctgagccgtcgatgattgttcccgcaggaatcgcgtcacaaggttacgccactgtcacaaaggatcgcaaaaacgagattaagaaagctaagattaaaatttctccagacaatgtcagaccattgagtaggaaggagatcgctctccaggtatatgcatttttgttcaaattcatagaatattattcaaagtgcttcatcagattcaaattcgaataggaatcggaatgtgaaattcattgaaatgatttagaactgttgtttatgttgttgttgttgtgtgtttggggttgaattgtagaaagaggcagcagaagaaagcacatcaaagataaaaggaacaaagatttgtatagcgattcggtcttttgttaacccggaaaagcaagcttggtgtcttcctcctcacactcgtaaagtcgcaatgcccgatacacgaactctgtacacggtgctaagatcgcctcacgtcgataagaagtctagagaacagtttgagatgaggttcaagaaacggtttcttgtcatcaaagctcagagtcatgagttgagcaagaagctgttttggttaaaacgttatcgtattcttggagctcaatatgaactccagttccattgcaagacccgtttggatatgactcaagtgttaggcaacatcaatggctccaccaccaatgcttactgagatggctaaagacatcattttgtagaagtttcaagacccaaccgggtactatgcaataatttcgaaccttacggatccatgaaaccagctttgcttcacatcagatcaagtagttattttcttgcttagtataaacatgtgtttttggacgattttgaaagatacaattgagtttcagttacagtgctttccatttattcattagccaatcaaagtctttatacatcaccaaggattgagacacatttagactgctaaaggtgtcattttgagaagttatagaaacctttgacccgaccatggaatgatgtcgaactttaaggatccaagagctcacattttaggtgtattcattcattaggcaattctaagacttttacattgtacataatcactaatgatttgagacatatggtataggttaatttgatagatctgattccgaacctgagctattgccaatttgccacactacacaaagttacaaaaaacagaactcattaactctttgcttcacattcaagaacacctttgggctcaagcaaaaaataataatcaactctgtttccttacacaagcttgcacgtgtaggaacataccatacactcacccgcaggtgattataacaaagttccctttatacccgcctttgattcttcttcttaaatctctaaacccttttgccgtctccctaaaaccctaattctcatttctggggtttcacatttcatcttcaccagaatccatcacactctctgaaatctgaaaatgattagcacagtacttcgccgatctatccttggtacgtcaaggcgtactctcgccgcttcggtgacctccattaacgcagctctatttcataaccttgctccagccgccgccacagtctccgatctagcaaatggagctactaatgtcaagtctctcccttcgaattcgagcccttttggtgttaaagtgagagactttcatgttaaatctgtaccgtcggagtttagatcgtcgattgtttcttctgcgggattcgcggctcaagagtatgctccttcttatgagaacgatggagggattggagattcggagagtgttggtagcagcggtggtggtgatgggcttgcgatagctgatcttggtatatctccggagattgttaaagctttgaagggtaggggtattgagaaactctttcctattcaggtatatatgatcttcttctctgttccatttggttatagagatcaattaaaagtttagatttttttaactgagtttttgatgtttgtgtttggttgaatagaaagctgtgttggagccagcgatggagggtcgtgatatgattggccgtgcaaggactggaacgggaaagacacttgcttttgggattcctattattgacaaaatcatcaaattcaacgctaaacatgggtttgtgtttactgttatatataacgatcatttgtgattgagagatttgcacttcctttggttcttatgttgtcttttgatgtgacagtcgtgggaagaatcctcagtgcttggttttggcaccgacgagggagcttgctcgtcaggttgagaaagagttcagggaatctgctccaagtttggatactatttgtctctatggaggtacaccaatcgggcaacaaatgagggagctgaactatggtattgatgtggcggttggaactcctggtcgtatcattgatctgatgaaaaggggagctttgaatctatcagaggttcagtttgtggttcttgatgaagctgatcagatgcttcaagttggatttgcggaagatgttgaaataatattgcagaagttgccagcgaagcgtcagagtatgatgttttctgcaacaatgccaagttggatcagatctctcaccaagaagtacctgaacaatcctttgacaattgatcttgtgagtagtcttatacctgcttgtgtttatatcttagaattgctgtacaaattgcaaatattgatcttggctgtagcagtgtagttaatgaagtgacattttttaatgacacatgtactcttatgtaatttaggttggagattcagatcagaaacttgcagatgggattactatgtattctatcgctgcagattcttatggaagagcatccatcattggtcctcttgtaaaggtatgttttctttactttgcttttaagccaattatctgtatcttgttttgattcttcatttttgtttccagtcgtgattttataacatcttctcctttacaggaacatggcaaaggaggaaaatgcattgtctttacccaaacaaaacgtgatgcagatcgccttgcatttggattggcaaaaagctataaatgtgaagctttacacggtgacatatctcaagctcagagagaaagaacacttgctggtttcagggatgggaatttcagtattcttgttgcaactgatgttgctgcccgtggacttgatgtacctaatgtcgatttagtgagtgaaaacaataccttttcttgcgcttaactagttctgtttctcattttattaacctgtattgtgctttgtgtacaggtaattcattatgagcttcctaataacacggagacgtttgttcaccgaacggggcgaactggtcgtgctggaaagaaaggaagcgcgattctcatccacggtcaagatcaaaccagggctgttaaaatgattgagaaagaagtcggaagcagattcaatgaggttaatatctttctttaccacctttgtatcttttgtatgaatagcttgggtaacaaacagttctgaatctatttggttttgaattcagctgcctagcattgctgtggaaagaggaagcgcaagcatgtttgaaggagtaggtgctagatctggtgggtcgttcggaggaggtcgatcaggcggtggtgggtatggtagttacggtagcagcagtggccgttcaggtggtggtagttatggaggttatggtggcagcagtggccgttcaggtggtggtggtggtagttatggaggttcagggggatcaagcagccgttactctggtggttcagaccgctcatctggtttcggaagctttggttcaggcggttcttcaggaggatttggttcagaccgttcttctcagtcaagtggaaggagcagctttggtgggtttggatcaaacgatggtaaaagatcttactgagagaagtgttgtgttggttttgacccgactcagcaataatggagttgacttaggagagaactcggtatctcgagttgagtagtttacaaggagtcgagctatatataaattctgtagctacttcttgtctcataaaccaacataagttatatcattatttcatatcctctaattcatttttatttctcaatttgagtgaaatgtgtttcccttacttcgccacttccatttatgaatcttgttagattgtgagaaaaggaaataatgtggttgatcaaagattcaaatcatccctagttttgatttcttgttagatcttgcaagtttttggtagaaccatacacaagaaaaattgttttaagctttaattctcatatctgaccaacaaaaataaaacacagtcgacaattattgttcactacaaaaagcattactcttatgtttcacaactaattagccttcatttcgcaaaacttgatgcactgcatagcaagagcatgcaactagctgctgaacgaaaaggcttggctctgcatagctagcataataataccaagctccttgggtgtgatcccctttgcagtgaatccagatttagtttcatccagtcttataggcccaagaacgggttcttgtacacatacttggtgattctgagggttacaaagctgagatcccataaacgttgaaaggcgttcaggtggtggtataagaatcattgagatgagtaaaacagtcaacaccacccacaagggcatgcaaatcaatggtagccatctcaacaccatcccccagcttctccatttggagacattttgaaaaaaactcaagaacggcgcctgtacaaccgtcaacactcatccacagctgatctgaagtcagtaatactctggaagaagtatcagttttgaacattttaaaaattgatatttacgatttttttctttttagggtgttaaggaatggggattatcgacaaacaagtgatgaatcagattattaacaaaatatggcatttgttgggatgaacaaatacaaacaagtcggaatcggatcttgcaagtttttggatagaaaactaatacaaataagttgtttcaagctttaatttctcctatcggacaaacaaaaataaaacacagtcatcagtttggtttagtacaaaagcattactcttatgtttcacaactctcagcgttcaattcgcattacaatccacaaaagccttttgctttggcttatacaacataacgataggtaacataacgaccagccgtttcactcggacgaatgatcttcacgacttgcccacgttttagtccaaagtatcttgcgattggatcagtcacttggatccttggaagctaacaacacccacaaagttccaaacatttaataacacaacaaaaatttcatcaccaagaattcaaacaaagtttctatatactactaacctgtgtctccttcactgtgtatctctccagtaaagttttcttctcttcagtggtaagaacttgatgctcaggaacaagaacatgttctttaatgttcactagcatttccgcctcctgcagcatccaccaccaaatcatggtttagtaggattgtgatgtggatacatcatcatcaagagtcaagacacaaagtgatttgttttacctggaaaacttccagatgaaacttagaagagatctcactaatgcaagttcgagcaaacggggtcaagttctgttgcacaaccaaaatagctctgaacacattctctgatttcatcctgttcgtgtacattttcatcgtcttcacaccaactttcgcctcatcagggaagaatatatagagctacaacaagagcacatgaatcagcgactaaatcaaacacacataaacaatctttctaccatatccacagcttcttagagattaaagagatgacatttatctatacttttgtcaaaatctagctctctgtaacattccatgtctacttactattcacattcaacaactagataaataatgatagtctccagctaaagaacactaaagagaagctgataatcacattgaaggagagacatacaactacaaacctgatcactattatcatttcgcttagccttaagagtaacaagatcctctcttttcatgttatcaccatgtttcctaataaactgttgtttagtcatcgtaagttcagaatccgcgataaaatatccacgatcccttaacatctgcatcaacgtcttctggattctgtacaatcttttgagctcctcttccgtcaacatcttcttcaccaagttatctgcagctttaccaaaaccatatcaaaattagggtttttcaaaaattgacagaaacaattaagagtttatcaatctctttgagaatatatacacagatacgaaaacttacgaatagagacaaatccacagagatgattgaagaagcgatttacagagagaacgacagtggaagaagaagaagaagaagcggcgtttcaagctttctccttttacctcgaacccttttctcaattctattatattgaagcttttattgcatttgaaactcccaatttataccgactttatgttttaaccctcaactttattttcgatatttaaactccaatccttaatagcctgataaaggcccaatgggcttgtacgacccaacatacttaaaccctttagttgatttttctcaacttattacactgttcttgttggaactaaaaccctttgccttctttcttcatctctctaaatccctaattctccaaattttggggttttacattttccttatcaagagaacacctgaatctgaaaatgatcactacagtgctacgacgatctctccttgatgcgtcgaagaggaatctctccgcttcgttgacctcaatcaatactgttctgtttcacaacctggccccagccgccactagagtctccgacctagccttaattggatcttccgatgtcaaagctgggtttccgtttggtgttgaagcgaaaggaattcattttcaatctgggccgttggattttagagcttcgatggtttctcaagctggatttgcgatctctgagagtagcgagagaagggttggtgattcggagagtgttggtggtgatgggcttgcgatatctgagcttgggatatctccggagattgttaaagctttgagtagtaagggtattgagaaactctttcctattcaggtatgtaatgttgtgagatcaaaattttaaattgttcagcttttcgtgttcccatgtttttggaagaagggtaagtgggttttaagttttgtggttttgagtagaaagctgtgctggagccagcgatggagggtcgagatatgattggtcgtgctaggactggaacgggaaagacacttgcttttgggattcctatcattgacaaaatcatcaaatacaacgctaaacatgggtttgtgtttactgagtcatttgaggttcagagaattatgttttctggttggtttactgatttttggggttttatgtggtttttgatgtgatagacgagggaggaatccgctttgtttggttttggcaccgacaagagagcttgctcgccaggttgagaaggagtttagggagtctgctccgagcttggatactatttgtctttatggaggtacaccgattggacagcaaatgaggcagcttgactatggtgttgatgtggcggttggaactccaggtcgtgtcattgatctgatgaagagaggagctttgaatctatcggaagttcagtttgtggttctggatgaagctgatcagatgcttcaagttggatttgctgaggatgttgaaataatattggaaaagttgcctgagaaacgtcagagtatgatgttttctgcaacaatgccgagttggatcagatctctcactaagaagtacctgaataatcctttgacagttgatcttgtgagtagtcttgtaccctctgaaatttctcacaattctgaataattgatcttggagttagcagagttgttaatgaagtgatttcttatgtgaaatgtgcttctatgtttttgtttgcctaactgtgatgtgttattcaggttggagattctgatcagaaactagcagatggaattacgacatattctatcatagcagattcttatggaagagcatccattattggtcctcttgtaacggtatgctttccttactttgctattaaacgagtatgagttaaattttgtgttattcagtaactgagtaagttatttgtgtattttttcggagttgtcagttgtatatggaaagagttaataatatcaattttccttgcaggagcatgccaaaggaggaaaatgcattgtttttacacaaacaaaacgagatgctgatcgcctttcatatgcattggctagaagcttcaaatgtgaagctttacacggtgatatatcccagagtcagagggaaagaacgcttgctggtttccgagatgggcatttcaatattcttgttgcgactgatgttgctgcccgtggacttgatgtacctaatgtcgatttggtgagtcaaaactacacttttcttgctcttaacgagttttggttctcatctaactaaacctatatatccgtgttgtgattgtgaatagatcattcactatgagcttcctaataacacggagacatttgtccatcgaaccgggcgaacgggtcgggctggaaagaaaggaagtgctattctgatctacagtcaagatcaatccagggctgtaaaaataattgagagagaagttgggagccgattcactgaggttagataatctgactttctttttacttctttgtttcttttcctgaatgtatgaagtcaatgtttgtatccattgggttttgaattcagctccctagcattgctgtggaacgtggaagcgcaagcatgtttgaaggaataggttctcgatccggtggttcctttggaggaggcatgagggatcgtggttcaagctttggtggtcgttcaggcggtggtggttatggtggcagcagtggtggttatggtggtgggcgttcaggcggatcaagcaaccgttattctggtgattctgaccgttctggttttgggagcttcggtatgcgttctcctgagggatatggttcggatcgttcatctcagtcaggtggaaggagcagctttggtggtggtcgttcaggcggatcatcaaacaatcgttcctctggtttcggggactttggctctgaccgttcttctcagtcaggcggaaggagcagctttggtgggtttggatcaaatgatgggaaaagatcttactgagagaagtgtttttggagccgagccggcaataattggtttgaccctaggaggagggaggattcggtgactcgagtagattagttactacggcggatacgaaggagtcaagttatatatataaatctgtagctatgtaaaacaaacatatactttcgaagttatgttatcatcatttcatatgaggtgattatcttcttttgcataatttgtttgtttatattgttttgatatatgaggttccacaaaaaacagaaacacagaattattgaatttcattagattacgtagcaaaaataccaatgaacattaataaattggaaatactctctttttctcaatgttttcaagcccgattcatagtgttttcttagactatgtattcttgatgttttagatgatgaagaagactacctatgttgatgaagaaaactctcaataccgcctgaagtgaatgacttatatggtgagagaagcaaccaagattagttgttttgagtttgcgatgtttaattaatttatttttttcattggtgatcttataaccactttagacttataattggatttaaacattttaatattttaataatataatatttgttatgattttagacttataattggatttaaacaatttaatcactttattattatagttaaacttcatattttattactggtggtatgactatttttatttgtatatttataaaactatatatataacctcaataaaatattaagtatattaaataaatttcaattaataacatgtgaccaaatctggttgactcagtgattcggtgatttagaaagtaattcaccgtgaattaaaaacattgttttttcacatctactaactttttaaaaatcaacaatagttaataataatttttagaaaaggggaaattgtctttatatataggttaaacacgtacaagtaatttctccgaattcttctgtttgtttcgtgacacataaacaagcataaaccctaaaagttaactatggcaatggagccgaagaagaagacgaagttgattagttccgacaacgattcaaagtggtcgatgctttcccccgacctgattcgatcgatcttagaacgcttgaactttatagactttcatcgagctaggtacatctctttaaattggtattcctcttcggaattatgcattatacaaaatccaactccatggaccatccgcttttcaaacgacaaccatgtttcattgtttgatcctcttcatgcaaaaacctatgtaataacagacctagggtttgatttaccaaggagtcgttgtttggctacttctggtagctggttgttgatgttagatcatagaaccgatttttatcttttgaatctgtttactcgagagaggatttgtcttccgactttggaagcaatcgatggatggcagatgaagtttgagagggttggtgagtctgatttcttgaagacattcacttatcgtgaaggctatacaagttattcttctcgtataagcaccaaaattagaatagagaaagcggttttgtgggtcgatgaaagaagccgagattacttagttgtgtggaaccttgagagcttctttgcgtatcataagaaatgagataataacaagacctggaaagtgtttcaattaaagaatcaagggtgctcggatatggtgtttagagaaagcaagctttacgtgcttagtccaagtctagacatcactgtttttgatttctctagtggtgattctccaaaggaatgtgcaagcttcacatcgccggatgactattcatcatatggaccattacgtttcgagtctttcgaccatcttgttataactttgtccggagaggttttgttgatcaaagtcgaacgtcggggattgcagatatgttcattcgatgtttacaagatggatcaaacatcatcaaaatgcaaaaggatccgctctatagggaacgaagcattgtttttggatcacggaacaacggttgaagccaaagatggaattaggaataattgcatatattttagttacgttaagtatggtaaatacaagaacattagtttacgcaatacttgcgtctacgatattcaaagggggttcgttgtccaacggtttcaacaccttgcagattcatcgccaatgcctttcaagtgtgttcgttgggttttcttttggtggcaaatggttgcgttataccgccaactaaagactttttgacccaaaaaataacattggcttgtgatattcttcaggagcaagttagggattaggttttgattgattatattataaatttgtttcttttggttcttgaaaaatccttccaattaaaacagagatttgtttctcttgggtcttttttggtcaaaatttgtctaactcttgatattatctctgagacaggacttcttggtgctcgaccaactacacatccgattgaacagaatcatcaactagcattggcaacgggtgattttcttacagatcctcttcgctatcgccgcttggttggtcgtattatctatcttggagttacacgtcctgatatttcatatgccattcatactctctctcaatttatgcatgctcctcggatagaacattgggaggcggcagttagagttgttcggtatttgaaagggaatccgggacaagggatactattacgtgcggatgcggagcttactcttacagcttggtgtgatgctgatcatgcgacatgtccactaacacgacgttctcttacagcatggtttatacagcttggtggttctcccatttcgtggaagacacgaaagcaagatactgtctcacgttcatcagctgaggcggaatataggtccatggcggatacggttagtgagatcttatggttgcggcagcttcttatcacattaggagttgattgttcatctcctattcctcttttctgcgacaaccaatcggccatttatctcagcgctaacccggtgtttcatgaacgcactaaacatgttgggtcggattgtcattttattcgtgatgagattgttcgtggtgtgattgctcctcaacatgtttcaacccatcttcagctcgcagatatatttacaaaggctctcggtcgcaaggagtttgtgacctctatactccaacttgaggggggtattggggaatataggtcctcttatgtaattagtatatttttaagttatagtttggtaattacatctttgtatctaggtcttaacatatgtatataaggcacagccttgagatcattatcgataagaaaacctttatactaaactaggtattcttgacaggtcttccagctacactatatatatatattaaaaaatattaggaagttgtgtaccaaaacatgtaatcctttcatactcaaaactacaacatgaaatagttctgagacaaaacatgtaactctcttcgatccgaaataatatcatataaccaaacgtcattcgaatcggcgatctttaaatttcgcctaaaatatttaccagttgagctaacgacacttgatattgtttttctcaaatctttccaactgcacgatattgttttcttttaaattttgccgaactaaaaatctaaagccgtatatgatatttcgttatgaaaacgactccatcaaggatgtaatgtatcaaatgttcattggcagttttattacgtaacgtaatgcaatccataattctgttttcgtcgaacctttgtttcgttaggcagagagacaaaatacagaagtagaaaaaaaacgaaaaaatgagtagaatttattttacccagatttattaattttgatttaatttggcaaagtatatcttaccaaattaaattgttattgactctcttttaattttcttcttcccaaagaataataaactctctttttctcatatattaactttttaactcagacataataattatttatttatttttataaatgaggaaattatctttatatataggctaataacgtaaaaaaaattgatgaagaaacaatatcccaaatttactcataaacaagcagaaaccctaacgagttaactatggcaacggcgccgaagaagaagttgattagttccgacaacgatacagagtggtcgccggttcttgcccctgacctgattcgatcgatcttcgaacgtttgaactttgcggagtttcatcgagctatgtcaatttctttagattggtattccactgcggaattatgctacagacaaaacccaactccatggctcattctcttttcaaactatagacatatttcgtgtaggttgtttgatcctcttcatgacaaaacctacgtaatacgagacctagggtttgatttccataggagttgttgtttggctacttctggtagctggttgttgatgttagatcatagaaccgatttttatcttttgaatctgtttactcgagagaggatttgtcttccgactttggaagcaatcgatggatggcagatgaagtttgagagggttggtgagtctgatttcttgaagacattcacttatcgtgaaggctatagaagttattcttctggtctaagcaccaaagttgtaatagagaatgcggtgttgtgggtcgatgaaagaagccgagattacttagttgtgtggagcattgagtgcttctttgcatatcataagaaaggagataataacaagacctggaaagtgattcaattaaagaagaatgaagagtgctccgatatagtgtttagagaaagcaagctttacgtgcttaatccaaatctaaacattactgtttttgatttctctagtggttctccaaatgaatgtgcaagtttcacatctcaggatattggtctcacattatatccactatcttgtttcggccatcttgttataactttgtccggagaggttttgctgatcaaaacccgccgatatgggatatattcctttgatgtttacaagatggatccaaaatcatcaaaatggagagaaatttattctttagggaatgaagcaattcttttggatctaggaacaacgatcgcagccaaagatggttttggataaaacagcttatatttaagtaatatacaatgggagtagtttatgcaatgaaaacagtaattacgtttacgattttcttaggaggttggttgtccaacggtttcaacaccttgcagatttatcgccagtgcctttcaaggattctcgttggtttttcccaactttttgtggcaaatcgttgctctaaagctatctagttttatgtttttggtaaggattatttctcttacattttgctacgttttatgtttagggtataacaactattctcaaatattcctctcggatattttctttgcaaattgtgtttctttctgtttttggattcaaaacaagtgacacacttccgttcgtgatagatgttgaatgatcctaattagtgttttgcattattaggtttagcttcatgcatgcatgatgcaatgatgcatgtcctttgatatggttacagaattgtgttgcattgcatcattagatatgggatcagtttatcgatatatcatatttcagacttttttagttcgacataattttaaagaaaacaacattaatgatatgttcattcgatgtttacaacctacaagatggatccaaattcatcaaagtggagaaaaatcaattgtattgggaacgaagcattgtttttggatcatggaacaatagttgaagccaaagatggagaattagggaaaattgcatatattttagttataatgagtatggtagatacgacaacattagtttacgaagtacttgtcttgcgtctacgatattcaaagcggattggttgtccaaaagtttcaacaccttgctgattcatctccacaccttgaagattcatagccaatgcctttcaagggtactcgttggattttcccaacttttggtggcaaatggttgcgttataccgcgaactaaagactgtttaacaaaaaaaaaaacatattggcttgtgttattcttcaagagcaagttagagatttaggttatattagattagaatttgtttttttttggttcttgaaaagtcctctgttccaaaacagagatttgttgtcttggtcttttttttggtcaaatttttctaaagtcttcttccagctgcacgatattgttttctttcaaattttgtcaaactaaaaatctcaaccatatatgatacatcgatatggagacgactccatcaaggatataatgaatcaaatattcattggtatttttgttatgcaatgtaatccataattatgttttcttcgaacctttgtgtcgttaggcagagagaagatacgtaaaaaggaataacgaataaaaggagtagaattaaaatttaattcttataaatagggttttaactcaactataatcattatttattattttataaaaggggaatagacttttattccaaagaaaaacaaaacaaaaccctaatttggtaagccttccagagtagctaaaaccctactggtccgtgtagctaaaattcttcattcctattgggatatatccatatttatgttaaataaatatatttaggagatatatactttatgttaataaactttatctccaagtttagtttaccgctcttgtatatatataaagatgtaatcatatgagatgaataagagggaaaacatatcctaaacctagccgcctctagtttctacaattccgatcatatgatgatgtctgatcttcctttggatttggtagaagaaatactctcaagggtttcggccacatctctgaaacgattacgatctacttgcaaacaatggaacactttattcaaaaaacgaagtttcagccagaaacactttcatatagctccaaaggagtctatggttctcatgttgaaggagtacagagtttgctcaatgaatatcaatctcaatgtttctcctccatctgtagagtttcaaggtacacttggcataaaagatgattcccattctaatttaggacaagtcgagatagtcgaagtttatcactgtgatggtttgttgttatgcgccaccagggacaatagactcgtggtttggaatccgtgtttgggggaaaccaggtggatccaactcaaagatgaatgcaggagatactctacgtttgctctaggatacgaaaacaacaaattttgtcgtcgtaactacaaaatcttgaggtattggggttggtttcacgatcacataccagacgacggcggacgtttcaggtttgaaatatatgactttagatctgattcatggaaggttcttgatgacgtccctgatgaccgcttcccaccagtaagtgtcgtgtctttaaagggaaacacttactggtttggttctaataaaaaggacttcttacgtagttttgattttacaacagagagatttaatcatattggtcttccgccatctcgagatcatggttttatggctctatcagttgttggagaagaacaactctcagtgttacaagagattgagacatcaaagatggagatatttgtaaccaataaagttggtactgaagaagctgctttgttgtggagcaaatcctttatagtggatttacccattggcggtcattgttctgaggttttcgcgagtcttttaatcaacgaggagaagaaagtggccttgtgttgtaatttagatttcgagaccgacgggaacttgatattcactattggagaagacaataaatattactcagaaatcccttatgctacaaacaagccatggtggttatgtagattttctgaaaaatttacaaaaaaatggtggtggtttccatttatttacaattatgttccaagtttggttcaaatcttgtaagagagatagagagtaaaaaagagaagaaaaaaaactagtcgataaaaataagatacactagtcctctctcatttgttttccctttggttgaataatttaatgaaagttttttggtagtttattctttttcttcgtgttgtatagtttatgattcttacctttgagagcctgctctaggctggatttcagaaacaaatgacaatcatcttgttatcactctgtctggagaggtttcgatcatcgctagcggaatcaaaaacccgaggatatcctacttcgacatcgtcaagatggattcaaaatcatcaaattggggggaaaatcgattttattgcgaacattttgggtaaattttagtaatgatcagtttcatagatacactgagattcgtctatattgtttgaatggtggcggcggtcgggatggacaaatccactcagcagtttagtttgctctatttttaggatggataacaaaccgatgtagatcaactctatttgtatatataagcacaattctatgaatggtaaataactacagacacaatttatgaatggtaactaaatatcggtcaagtccataaacggatttgtccgccttaaccgctgcaaccattcagaccctatggtttgaaacaagtaattgcgtccatgatattcaaaccgagaaggttgtccaatggtttcaacagtttgcgacacagttattgttagatacatcaaagaaactataagacactacacaaatacgtctctgttttggaacagaggatttttttaactttttaattatattaatctaattaatcaaaacatgaattaaaacggctgacgaatatcaccagccaagtctatagaaaaaagattattactacaagcttttacttaaaaaatgtccacagtttttgagcataaacttgcggattagtttgtcttttcgtgtgctacaagtcttttagtcaaattagacgaattttacgctttcttgtatacattgatcctagagttccgtaattgctataaatagatgtcagtttaggagttaccaaatgcaaaaaaacaaaaaaaaaacactatcattaatcaagttccactgttcattttcgatctgcataatgatgatgagtcgtcgctatggagccaagctaatggaaactgctgtgactcacagccatcttttgaatcctagggttcctctcgtgacggaaaatattagggttccggcgatgggagtcgtgagagttttcagcaagatgacatttgagaagaagaaaactacggaggagaaaggatctagcggtggcaaggctgatcaaggtaacaaaggggagcaattaatcgttagctactggggagtgaagccgatgaagatcaccaaagaagatggaactgaatggaaatggagttgctttagggtacattacatctttggtattatattagaactctgtggtcgatttatatgtatgatttgagtttttgtgtggaataactgtagccatgggagacatataaatcagatctgactatagatttgaagaagcatcatgttccatcgactttaccggacaaactagcttattggaccgtgaaatctcttcgatggcctaccgatcttttcttccaggtgacagtcttagctttctatggttttgtcatttcaaatgctttgtatgtttggactaatcttgccaacgagttaaccgcagaggcggtacggatgcagagcaatgatgctagaaacggttgcagcggttccaggaatggttggagggatgttagtacactgcaaatcgcttcgacggtttgaacaaagcggtggttggatcaaagccctacttgaagaagcagagaacgagagaatgcatttaatgacattcatggaagtcgcgaaacctaattggtacgaacgagctcttgtgattgccgttcaaggcattttcttcaatgcttatttccttggatacctaatttctcccaaatttgctcatcgtatggttggataccttgaggaagaagcaatccactcttacactgagtttcttaaagaactcgataatggtaacatcgaaaatgtgcctgcaccggctattgccattgattactggagacttgaagctgatgcgacgcttcgtgatgtcgtcatggtggtccgtgctgatgaagcgcatcaccgtgatgttaaccactatgcatccgtaagtagtgtgaattgtattataggaaacttacttatgtttaaaagatgattagattgttttcatggttttaataaaaattgcaggatattcattaccaaggtcgtgagctaaaagaagctccagctcccattggatatcattgaatctgaagagcttctagctttgttttgtcgttttgatacggtccagttttgttttccttgttcctaaatgggctttaatgggtatttgttaaaatttagtgggccttagagtaagcttatttgtgcttgctttctttttgcttcataaaagagtgttttgtttgttttcattctcctaataaatcagtgcttacatgatatgtttacatatacacttaggctagaaataaaactttacaaacccaaggctttgaagtttgaatataaccatagatatgtccattaaaccccactaaaatgaagtaggcttgaatccatcatatataaatgttaaattaataggggtgggaaaaaaaacgaaaaccgaaaaaccgaaccgtaccaaaccaaaacaaatggtttggtttggttatggttttgtataaaaacccatttgattgtaatttttatttaagttttggtttaggtttggtttgattaaaaaccgtaaaaccgaacgttttttttgtttttgatttaaattaaaaataattgtatatatatatatataatgttcatttgataacatgatatctatcaaactatcgaaaaacaaaaccctaactgtaacctaaactaaaattctatataaattacatgccgtcatttaggatttgagtttacaaattagattttgattttatttatgcatcacacttataattttttttggtaaaaacatgaaaaaaccggaaccaaaccggaaccgatccgaaccaaaatacatatggtttttaaatggttttaattttttaaaaccaaaaactgtaaaactgttaaaaccgaaccgtaaccaaaccgaattttatatggtttttatatggttttacttttcttaaaatcgaaaaaccgtaaaacctaaaaccgaaacgaaaccaaaccgaaaaactgaacacccagcccttaaatataatgaaaatcgaataaatttgtttgaaagaatcgaacaaaattgacaataaaatctaattaggactattttcgtctaattttgacttagttgaaacagaatattagcaaaaatactaaaacaccacaacgcgtaataatacccacacacgatatcattaaatttgaccaataagaatctagctcttggcgaccacgcaagtatcttccatcttgctctccaagaaaaatctacaccggctttaaatttacataaacaccctcagtcaaagaaaagtcgtaaacatagtctctctcatgaccacaagggtaacacagtcatcctaaatataaaccacacaagaaaactgttatactttatacacgtgtcatagtctcattacatctacgtgaagagtttcgatcatcaaccgttcgttttcttactatataaaccttgctcgagacctgcgtgtgaagcgtataaagacgacaaagtaaaccaaaaaaaaaaagagttctcctacaattttcctaaattcttggatttgagatttcactttttccgatttgaaacaatgatgataactcgcggtggagccaaggcggcgaaatcgctgttagtggcggctggaccacgtttgttctcgacggtccgtacggtttcgtctcacgaggctttatcagcaagccatattttgaagcctggtgttacatctgcttggatatggactagagctccgacgattggaggtatgagattcgctagcacgatcactctgggagagaaaactccgatgaaggaggaggacgcgaatcagaagaaaacagagaacgaatccaccggtggagacgccgccggaggtaataacaagggagataaaggaatcgcgagctattggggtgttgaacctaataagattactaaagaagatggttctgaatggaagtggaactgtttcagggtacgttatagctagattcgtatacagtgttgttcttcgttgatctgtgtaaatttgttgaaatttctttggatttttgcagccatgggaaacgtataaagctgatataacgatagatctgaagaagcatcatgttccaacgacgtttcttgatagaatagcttattggactgttaaatctcttcgttggcctaccgatttgttcttccaggtactgttcttcttcttcttctcccatggaaaatttctttacattttttgccaattttatgatatggaaatgatccaaatctgatatcgtcattgattacgtgtaaccttaaatattttatttcattctttttatagcaactagtcaatattttgtttgattattttggaatatatgtgtttattatattaatcacttcgttagtgctttggattcttggttaattgttggttaattatcattatgtaatgaattattggttaattgttggtctgattgtgatattgtgaattaaaacagaggagatatggatgtcgagctatgatgcttgaaactgtagcagcagtacctggaatggttggaggaatgttactacactgcaaatcgcttcgacgttttgagcaaagtggaggatggattaaggctcttcttgaggaagcagagaatgagagaatgcatcttatgacattcatggaagtcgcgaaaccgaaatggtacgagagagcgctcgtgatcactgtgcaaggagtcttcttcaacgcttatttccttggttacttaatctctcccaagtttgctcatcgtatggttgggtaccttgaagaagaagcgatccattcttatactgagtttctcaaggaacttgacaaaggtaacattgagaatgttcctgctccggctattgctattgattactggaggcttcctgctgatgcgacacttcgtgatgttgtgatggttgttcgtgctgacgaggctcatcaccgtgatgtaaaccattttgcatctgtaagtatattatttgcttgagactaaattctaaagcttaaaatcgtgtgttactgatcaattatggttttactttgtaggatattcactaccaaggtcgtgaactaaaggaagctccagctccaattgggtatcattgattcgattaaaagaagagctttttctcaagtttaaaactttgttctaaagaatttaagttctttgacttgtatatacatcatcacctctgcttaagccatacttggattcggctttctttgaatgttgctacgaatgttctgatttcttctttacttttcctgtcaatgggcttttgggcttatcttttgctattgtatggccttgctatttagaatgagagtaatagtttgtagaagctgctactaaatcatgtaaagataccattgatatcatcataactattcaatttcatatggaaatcaattaatataccatctacattgacaaaattacaacttttcttttcctgattacacatgaaacaaaagaaagaaaaagaggacccaatggatgtggatcctttatttatggcatggggctatattttctttcagggccctcaaagctttcaaatataaagcaaaaaaaaaaaaacaagaagagaaaacagtcaattgtaatagagaaagtataatcaaacaatattataatttgttgtgattatgtgtacataaccactttctttcaaacgtatcagagactctctcttatgccaccaaattaattgtatagttgtgtccattataaaaaaatgggatctctctatcatgcctattgttttcaatctatcatggcaagtttaggtcaaagtaatagcaaatcgccattaccaaaaaccttaattattatttctttccatattttatatcagcaaaatggttttagcataagcaaaaaaaggcttccacatacctcatctctcatcaattatttaaaccgcaaataataaattatatctcacactaaatgttggaataaaatattttgacttttctttatctaaatacatatcgaattataggtataataaatacagaaatatacaaatacgtcctaatcagttgcctagccttctatcaactgtttctaatataaagtaatgtttataacttcaacgattaatctagtctcataacagtataaaatattataatttgtggcaatgtgtactttctttcttgcattttcttagatttgaaatgataatgattataataatgaataaacagtcatggtgccatgttcgctgtatattattttaaagacctctatatgatttatccaataaactatatgatcatacgattaaaataccaagagctcacaattttcgatatgccttagtgcgttaatgaagggaattttttacacatataaacgtatcttcgcatacgacaaacaattataaaatagtagtacaaaatatgtttaatactatttgtgtttctttttaattgaaaaccattcgaattttaaaccaaacaaaataatcgctttatgtaatgtttaatggtctgattgagaaattttcctctgacggctagggttaagcggacgatcaatactattgccacgttggcaaaaagcaataactcgaaaagtcaccacgtgtcatctacatagtcaatcagttaattttctttttattcgtcgacaagttaagttaagaaaaagagagcattccgacagatttatttggcgggactctaaactccgacgtggcattttctttgctttagaattcttttcactgtcgtaaaaagtccttttggtgactactcatctcaaaagataacgtaatccaaccaatctcaacttgccacctaagaataattcggggctgttacatttaatattcgtgaacggccgtgagtttagttttctatggatatttaagctaaaagagtagcttcgacaaaaacaagatccgagccgacgaataagagataggagatcctccaggtggcattttagtaattaaccacgtggaaatagactgaaaccacgtggatattttagaattttgttgtgcacgcgctttgtaggcgcgtaacgttaaaaatgtgaaatctactggttagagttactccactgttattaattattagtaagagttatgaatcctgaccattgaccaaagattgttggtgttttcaaattcaattaattacacaaaatctatattttacgtggggcctaatccatgtcactatcattcttatatttaactataatcactaaatttatgtattattttaaataaatatagagtattaaacatttgaaaatactgttattgggttatgaagtaaaaatagaaatcctactgtattcctagtttccttttatattcccacgaacgattttgctgtatgtactcgtatgtatcttacgaagtgacgttttacaccatgtcagaatatgttaacagtggtattaaatagaaataaaactgtactttaatttagttatttttgttaattaaaatattaatatttaaatacaatatcctatattctaattagtttacaaaaaaagtcaaagttaacacttttgcttaactgtaattttatcttttcaatatgttaaaattattaaatggaaaccaaaataaaattcgaaaacaattttttttaaaaagtgaatagaaatacctaatatttagaaatatcaattcaaatttttacccatcagtaaccttggaaaatagcgaaacaagccaacttttatttttttttggcaacataccaacttcttcagaaatacttttcaaaagaaaaataatttataagtgggggtaattaaaaagagataagagcagtgaaagatgatttccacaaaaggaaaaaaaaaaaaagggaaaagagaggtgaaaaaaataaaaaataatgtaaaaagagcggtgaaaaaagtaataattgaaaagaaagaaaaaagatgataagagcaattccacattggcagctaactgtggaccccacacttctcggaagttccgtgaccgcgacttgagtgaataaggtcccacatgcatttccctctcttcccatctcagccgtttaatcttttctaaatcgaacggttcagatcaacgggtcgggtgccaactcaacgccttttttagtttttattttattttatgttttttttttggatgatgttttcttctgccaagtcagattgtttaaaaaccaaaaatagaagaaaataaaatactaatataatataaaacgatctaacggttgtgagagcatttagctaattggcaacaaatggtattggccgttgatttgtaattaatgagttaaattattttagactatggtaggacctgtttccttactttataggtttattgtttagcttaccttccctaatagaattaaaaaaatctaaaggatattatatggtttattactattttagaaatatccaaatatgaccagatttaattagttttatagaaatttatagttatgtcaatttgactaatctaacctaggaattatcaagatttaatttctcttttagattttttcattataaattaagaatgttgataaattagtaattaaaaatgtggtagatacttccaatattattctccatatattttcatttttaattattagattctaagaatttaaaagatcaattttgcaaacctggcatatttgaaaaggtaaatttaatttaacagcttttattgcatgcacgtaagaaatatcaaataaatcaataagaaggaaagtaaatatttgaatatttattttccatgagttgaagaaaaaaaaatagttagtggcaagtaaaaaactatttagccatttgatcttaatggagaaaagtaaaaaaaaaaaagatgaaggtagagaagtggaacctgatgtgattaatattaccggttggatcggtttgtataggtggtcacaaagattccattctgatcgtagattgcctttaccaaggtctctgtctaccggtaatagccggtgatacatcttctcaagacacattttgaattttaataattaaaataacatcatatttgtgcgtgtatatgtcagtatttttgttttcttttcacacgagtcatcgcgattagtggacaacagtacactaccccaggagcctttttattgcacaatatactattgatgattatttttagatttaaatattattatcttaatctttccgactttcaatatattttattgtttttttatttgtttgtttatttctagacagtgcaaagtcaataaaatattggtagcgataatatagacggaagcgtgtgatgtcaaactcttgacacgtggcagcttctgtttaataactggtaacagtccaaaataattttttcacatgaatccgactccgaaaataatattcttttaaaaccgaaaaattaaatgttatcaaatactaaaatatcataacaataagatatcatttttgagtgggtcctacctacggatgctgactaataaaataattaaagaatacgttttttaatttaataataaaataataatcggtggtaaaataattaataaaagaagaaatatcggttatttattattatatgcgagatctcttataacggagggccaagattttgtcacgctggtatatagcgtatcgtgaccgttggatgtattcacaccgacggtgaagattgagaaaatgttttacggcaggagatatgagccgtggatttattcgctactctgcttttatgaggagcacaaataaaggagataatgggaagcaagtagagagatagaggagagagagtttgataaagagagagaaaaaggggttgcgatttgggagaagagaaatagagaggagaagcattagagaagaagaagaagaagatggatagaaatagagaagctagaagagtacctatggcggctgccggaaatggtctttcccggcggagacatagagccggaagtttcagagattcaccaggtttgtttttgaatctcttgatttggtttgtttttcatcagatctgagagaaaacgtttggttctgatttttctgaacgtttttttcacagaggaggaaggtccggtggagttaccggaggcggcgaggttgagagatcgaggagggagtaataagaaggatcgagatcgggaacgtgatagagacagagagagggaaagagaaagagatagggagagagatcggttaaatagccggagtaaacggcggagaggagaacgcttaatgatggttcacggtaatctagacgacggtggcgacgatagctcggaagagagtgtcaacgacgatgaagaatatgacgacggaggtgtaggaccaccttcttcgttgaagatgcttcctccgacgagcaataatatctcagctgcatcgttttcatcgtctctatcaaatcatcacaacggaggtagcggtaatctccatcaccaccatcacagccacaacaataaccatcagaggaagaataattttccgccgacgaaagttttcagatcgtctccttctccggcgccggtatcacctcttgtctcgacgtggaaagccgccgacgagatgatcggtgtttcggttcctagaaaagctcggtcaggtagagaggtggaaatttacatttgtaaacatatctctcgctgatctatctcgattcacagttcttctaatctcttcttcgatttttgcagcgtgtacgaagagacctcatgaatcatgggcgtcaagtactaccggaggtggtgtttttgcttccggtgaacaaatccatcggcaaatatcatcaacgtctccagctaatagagttagtccggcttcgattttagcatctccgtctcctcctgctcctacgtctccttcttcatcaagcatttccgtcaggaaaaaattggttagtctctcaaaatttacactcaaatctctccatctccatcttcttctttgactaatatatttttgcttctagccgtcggggacgaaacagaagccgttaccgccgaagtcatcatcgagtaagttatcatcgccagtggctgtacaagacgagatcgagatcgagattgcagaagtgttgtatggtatgatgaggatgccttccacatcaaaacaagaagcagccggtaacgatttgacggaggcagcgaaatcaactgtagaagtcaaatctcgagtctcttcaccgatctcaaatcctcagactcttcctcaatcatctatcacactagctgcaaattctagctcctctaatgtttcagccatcggtaacatcctctctccattcacaaatcggaacgactatttttgtttttttttttcttttttgctcactttgttttaccattttcgcttcagctcctaagagaaagaagccgagacatgtcaagtacgaagacgataacagttcacgcgtcactacaatcaaatccgaagccgaagctccttcaaaaagtcaagttccgttcagtaatcaactaaagagctcaggatccggcgaaggaaacagctccgtattggattctatcataccactgacgagagaaagcaacgcttcgttagattcggagaaaaaagagaacaatctgtcaaaagacgaaacaatattgccgaaagtggaatcttcttcaggatttagatccgatggtgaaggagctaaatcgtaagcattcaatctatacattcattttttctggattttttacccaagttttggtactgaatgttttttgtttttaatcatgcaggagttcgccggaaaaagagaagtttgagatagatctgatggtaagtgtcaataacatatatattttattttattttcctttttttttgaagttccgtactaaattaattgtccgtcggttcaggcgccaccgccggtgagatcgtcgtcggagagaggcggagagatgatggaatgtgtggcggcagaagctaaacctaaagtcacggaagtggaaacggtgagtggggcctacttttgtttggtaatattgtgataattggggatatccatcattactttttcatttttgctttttttggctctctttttcttatcttcatctttttggctccctcttttttttaattctctcctgtgtccacactaatgcatgtagcaggaagcaaagcctctgcttaaggaagatagaagtgatccggcgattcatgattctcaggagaagaagagacctagaatggttgctgaagctgaacaccataagtttgagaggaattgtgaactcaaactcgacttggataaatctgatcatgtgggtttagtaaacaagcatcatgttcagaaaccgccaccgcaacagcaactatctgttcctgataaaactggtaggcctttttcatctttcttgagattcattcttcttactctgactggactagtttcgttttttgtatactgaattaactgggcctctttttaaaaaattccagctcaagctagccatttgcctctgcatatgtctatgcctggctggcctgggggccttcctacaatggggtatgttttctttgtaatttaagcatgtgatacttttcctaagtctcctttttattttttggttgtactaatgtaaaactctgtgattaaacagatacatggcacctacacaaggagttgtgcctacggataccagttccttatcagctgcagcaatgcaggtaattttgattggatgtgccattctaatatttctctttatatttttttgcctttactgatttaaattttggtcttgtgcagcctccacctcatttactttttaatcaaccaaggccgaagcgatgtgctacacactgctacattgctcggaatattcaatctcatcagcaattcacaaagatgaatcctttctggcctgcagcagcaggctcagctccaatgtatgggaccaaggcctgcaatctcagtcttatgcctcccacagaacttcaggggagtgttttgggaagaagttccaaccctgttcaagataagaattctcaatctacgtccaaaagctcagagacagctcaaagaaatcaattaatgcttcaacaagctttgcctccaggagcagctaatagcatcttggttagtttttttagtccatgtatcatgtttctcatcaggttttgtcgtccttcttataagctgattgtttttttactttcattgtagcatggtccgacattcatattccccttgggccaacagcctcacgctgccgctacaatagctgccgcatctgtcagacctcctaatagtggcatcacatcttctggaccaacagctacttctacctccatgaatggttctgcatcagctactccagctggtgccccaacaatgagcttcagttatcctgccatgccgggaaatgaaacgcagtacctggccattttgcagaataacggctatccatttccagttccagcacatgttggtgcacaacctgcttatagaggtgctcctgggcagccgatgccattttttaatggttcattctattcctcccaaatgatccagcctccacatcatcagccacaaaagcagcatcagcagcagctaactggtcaaatgctccagagccatgctcctaacaaccagaatgggagtgcttccactggttcctcagcagctcaaaagcatctgcagaaccaacagttgaggccaccgattaatcatgggaactctcaaggatttccaactcataaagtgcaatcgcagcctttgaattttcagcagaggcagcaacccagagaaaatgctactcaacatagtgagactgtaggggaagatagcccatcaactgctgatagccggggttctcgttccaatgttgcctatggccagaactatggtatgcaaatgcaaccaactaacttgggtttgatgagttcccctgcccctggtggtggggtggttggatcttcgagcagtcatggtgaaaagaaatcacagcagcaggtttcaaaggctggtgtagaatccttccagtcaccgggttatgctatgacttttgcgacgttcaatggggctaacactgctcctaccctaaacatgtcatcaattgctcagaatcacgctatgttccacagcatgcccgaagcagcaaggcaaggttatcagatgatggctgctcaagcagctcaacaaaaaatgaactacggtgcttcactagaagatggaaaatctgggtctattggtggtgctgctactgctaataatacccctgaggaacaaaggaagtcaggaggaggggcaatagggaaaacgagtggtgggaatggtgggcagtctattgctttctctaacaaacaggatttagctgatgcatctgtttctgctgtcacgagtggtagcatcgttgatagctcatcccgtttactcaaccttggttctgctctgccacagagttcgggttctttacccacgtctcatcatcaacaactactacaacaacagcagcaacagcatatgcaacggagtcaatcgcagcaaccttataccaccatgtacctccagaagcagcaacggtatgcaacttcagtggctgcttctgctgccagaaccaaagggcccgtggtgagtaacgggagtggtttccctgatcacaatatgaccacatcacctgcgggaaccaccaagtttgcaaatgctaattcagggttccctcaaaaccttgtccagtcgagtagcaatcaggttcagtctcagcagtggaaaaacaattcacccaggacaacaaatactacccaagctcagtctccttcgatgttgtcgccatcaacatcagttgctgctgcatcttcgctaagaaacatcccgcataaacagcaaagccgtccccagcaatcgcagatatcttttgcagcaaactcaaaaccaatgacttctggttcaccaatgcagcaggtacaaggaggaaccaaccaccaggctccgtctccaccaatgttagttgggtcgccttcgacgtcgtctgtctccaaaaatgccagcggaagcccaagaacaactgcttctgcttcctcggcggcaaacaaaggtggacaagcttccacaactactcactcagcatctcagccgtccaagaacttacagcctgcatctgcggcgtcatctgctggtggaaggaataatggtccttctgttctcggaaacccgaccacgagctctggatccaagtcgcaacaacagcagcagttgccaaagcatgggctgcagccgcaagcacagctattcttctctaatccttatatgcaagctcaacatcaacatcaacagcaacagatcaccatatctccttctggtgggtattacatccaaagacaccagcaacagtcaggttcagcacctgctgttccagtcacgggagctgtcaccgccacttcagatccagcgaaagccatagcggctgcatctgcagcgaataacatgaaaggaggtggtggtatgggtaaaactcaacaacatcagcttgggcctccagggttcactaatgttcacgctgtttcctctgcggttcaggtcaaacccgtggatcagaagcaacaggcgggtgagtgaaagatctttaaaactattttgtttagcataaaagactctgaatggttgggaagttccggttatagcttgtgctggcgagacgaaatgactttaaaagagtctgatgaagaaagaagcagacggaacagaacaactaaaaaaagggatgacaatttttttcggagttgggggtgctttttaaaagcattgtgtacaattagtgtttatattattctgacaggaacctacggtgtcaattccaaaactaaaacccaaaaaaaagaaaaggaagaagcaaaaacctcttagaagttctctaatttaaaaaatttattcatttttcttggggaggtttgagtttttgtttggtggtgatgttaggtagggaaccaaaagaaaatgggagaagtaaagagtcgttagacacacagcaatagcgagcgaacgtacgttcatatgctggccttgtgtgtagtttgtgttgttattagtgtgagagcatgaatcagtatgatgaatttatgattcgttctattttgtgtttaagttttcggtcagagattcagacgcagcagtaaaaagttgtagtaactagcgttatcaataaaaaaacgaaaatggattttaatcttcagacagatggagatagtggaaattcagaccacacgcgtgcagcaaacttgctagctttgccaaataagcaaccctttcttttttttaccattcacacctttttggtgttctcttaccaatcattacatttttacttaaccaactcaagaatttggattatcttctatcaatcaatagttcaatacaatacctctattgtcctactttacaactttcgtgtacttttttttgttttttcttttgtatatttttactttaatatattttggattctataacaacgagacacaaaatcaaaagtgggggtcccgtacggtaataattaaaacgtatggggttcaatatcgaaagttctgaaatgaatggggctcacttagcaaactccaaaatgagtcagcggtccactattaaactttgtgggctcagactttaactattatatgtctcgttgttcctggcccacttacagtataccgaatatacctatactttaatttatttattttgtcaaatatctacaacttaaaatatctttatataacatggcgaaaaaaaaaaactttttataacataatgtatattgtttcttgtcttcaaaatatattatatgaattccatgcaagtgacaattcctttaagaagacaatattaatattattgtgcttttgccactatcaaagaaaacaattttatttactttcgtacaaaaaaaacaaaattatgtgggattttattttcttggtggttgattaaaattgtaaatttttacatcttctaaatatttaggtgtagaattaatttttggaatatcctatgacaattttctttctaaagaaaaccaatgtaaagagataaataatgacaaagttcctttttaaccttttctctaacacagtaagaaaattattttcactccatattaagaaaagacaattttgttttgtttatttggggtggaaaataagacatgtgtaaaggaggaaagaccattgtcccacatgcattccccaatctccaagtaattgtaattctagagtttttgtctttttttttttcttttcttttttggggcaaaccattctagagtttttgtctactaccatatattgtaattaaaattagaatatgaatttgctataagtaaaaacctattaaggcatttagacaggaaatgttagacggctttaaatagtgggctttaagaagtctgttaaaatatattttaaaatcatagtttgggctttaccttagttacacacacgagtgacgaaattgacgatatgtccacataaatagaagacaaacgaagagataataataatacaagtacactactgtaacaggtttataaatcactaaataaggccgcctatttcggcgggtctaagatacaaaaataaatttttattgatagtatttgaattttgtatagataggcgggcataagatacagaaataaatttttatcgataatattcgaatttttctatgttatatttatacttatatatagaaaatattaggattttatggatattttagtttttttgtgtgtattttgagatatattcaagtaaaactactcgtattgttttgggaatttttgaaaatttcaagtaatttaatagattttcacacaaaatttgatatttcagtatataaataaactcgaacccgaaccgaacccgacctgaaatcttaaaatgttctattttcacttattattacctgagttaaaattcttaaaataaaacataagtatagtaacacatcaaaggatgcaagacactccatcatacgatgagttaaaattcttagaataaaacataagtattcaaaattttattcttataagttcattaatattttgtgttttgatttaacgaataaaaacattgtattacattgacgaatataattttttccaactaaaataatgttaaaaaaattatattactattttaaacttcaatggtgtttttaattagtattataatccatactaaattatttttaaaaaaaaacttaataagtgttacatttaaatgaccaataatacatgtaaaaacaaatttgttaattttccttttgttgaataaatgttaattgtttataaatatatagacatataaattattatatgtaaatttgtttactttttaagattttctattttttttaagagaataaaaaagttaaattttgaatgacaaatgtaaacatctgatcgtttgacttgacacgtgacacgatcctatgagttagtaacttaattagcatatgtaaatttgtttaatttttaagattttctatttttttaagagaataaaaaagttaaattttaaatgacacatgtaaacatctgatcgtttgacttgacacgtggcacggtcctatgagttaaaaactttgaaaaccatactttatataataagattctattttttttaagagaataaaaaaattaaattttgaatgtcaaatgtaaacatctgatcgtttgacttgacacgtgacacgatcctatgagttagtaacttaattagcatatgtaaatttgtttactttttaagattttctatttttttaagagaataaaaaagttaaattttaaatgacacatgtaaacatctgatcgtttgacttgacacgtggcacgatcctatgagttaaaaactttgaaaaccatactttatataataagattctattttttttaagagaataaaaaaattaaattttgaatgacaaatgtaaacatctgatcgtttgacttgacacgtgacacgatcctatgagttaaaaactttgaaaaccatactttatataataagattctattttttttaagagaataaaaaaattaaattttgaatgacaaatgtaaacatctgatcgtttgacttgacacgtgacacgatcctatgagttataaactttgaaaaccatactttatataataagatatcagacatacttagatgattcttctgtttgctgtaggaatgttgcatctatctatatactaagaagcaaaatgaagaaaccaaatagtctataccttcccatgaggtctacggacaatcacaagcaaaaagccgaatgcaactaccgtaattagaagcaaggaccaacccccacgagctagaagataagatatcgacgtattgaaaaatagctagagcaaaaagcttcaatgtcagcttcaaattctctatctcagtttcatcttttcacgcagagctgcataagaaacacatgattgttgtggttgaaaattgctcgttaaagagctcatagaaaactattaattataagatagaatcttccacataaacaacgaataaaaagttcctaattatgattgttgcaagaagaaatatctttcaagtttcaaactatggttttttctacattgtttatcaaattcttagttgaatataatatttaatatagcgggttcaaattggaaaagagaaaaatgagaaagacacctgagtcagaaaagaagatctcattatcgtgccaatgtgcctcacctactacgacgtactaccaacatggttcggctcattgggacagtacatatgtgtggaaccagttgtcatgattccgttttttctacttttcaaattattgggatagtgcataggtattcattaaccaatgttcttacattaaactttctaaatctacaatacttctatctgaattggcactatagttgtacttacttttacaatagaatatgatttaaaagaagaagcactaatgcacgttactaattccaaaccacccaatccctctatcaaatatcaacgcatgtgattcacatttcacttgaatattcatttctttcatgggcagcaaaaaaaaaaaaaggagtttccgtttgattccaatgccaaaaaatgtgtgttgattcctaacatggttaacaagtaaagaacagtatcttcaattaagaagcaaattaaaaacatgttttggagggtggttacgtacctactctcttcctaatctcttttgtattcttttttaaacatgaattttagttttgaagcttgttttatacttcctctttttccaaatataaaatgttttagcacatttttttcttattttatgttatacaatgttttcaagttttaacgtatattatacatttatatgatatttttagtttacatttatattctatcgtttctttgataattggttgaactataaacaatttaatgatagtggtaagtgtacttaattatgtttatgtactggtatttgagtgtttcagtgagaaatcttgttcaacgttgtatgttaataacaatggtagtaattaaatttaatgatgtatgtatattggtatttgagtatctcaatggacaatcttgttcggtgtatttttaataacaatggtagttacatttaatgatgtttgtgtagtggtatttgagtatttcaatgggtaatcttgttcaatgtattataataacagtggttaattaaatgatgaagtctttaatttatgatactagaattcgaatgaatttattaagggtcttactaccagcggtgtggttattcaatactaaaaattaggcatctacttattctggtttatttacacttgcaccaatattgacttaaacgataagatgccaaatcaagaaaaactttggcctctctagacttgttcagaacttgactatgtagtttgatctttaaaataaaataaaattcaaaatataaatattttatttatagtactatttgcatatggtttagctagttttcatagtattgtccttaaaattttaattcacttaaccaagtgtcgttagctcaattggtaaagattctaggcgaaccttagaggtcgtcggtttgagtgacgcttgggacgaaactaatattacatgatatggtttcgggcctgaaagattatgggtttcgatccagatcctcctagatttttttttttaaaaaaaaaaaaaaacataatccacttaacgtcaacgttgtggcggatatttggggtaaatcatcagcctctgataaatgtctttatccataaaggttatggtttttgcaataaaatctagtcgttgaccacaagaaaacttggataatatatatataacgactgaatttattcgataattttgaaagattatggagatggacgaagattaagttatggatggaaacaaggatactttataaaatttgacacaaatttgagtatacttacttattctttttggtcctataaaaagaaatgttaagtttaaatcctttagtaaggcatctctcgatcgattctttcttgtaattttcttcacatgcttttgtaatagacacgagttttgtcagcggtgtctcttttcttttactatttactgatttgttattataattatcacgtttggatttctctttccataaggttaggttttgcttatatatatgaataattaatggttgtttaatttcctactatgattataaaaaggaaaagtattcggtcattgttttctctttgacgataactttctcatatcagaagccatccaacaatttgaagcagttgcttttggtttttcctccacggcttgatgatatgaagtgattgaagatttgtcaacgaaactttggcaaaatggttttgcttaccaaaatgcaaaatcctatacgagaaacatcaccaaagatgttctctgtttctgtatttctttcgttttattcgtttatgtaaatgttacagcttgactttcttagtgtgctttgggtttagatgttgcattatttgtttgcgatgttgcatgcatctttggttagtgaattatttagataaaagcaaaaacataacaaaacaagacaaacgtagacataaaagcaatagaaacagatagacaaatatagtctatactctatatgaatagttgaccatcctacatatgtggaactaaaatagaatggcagtttaaagttgatttatgatggctggctacaagtaggatggtcaactattgatgtgtcaatctcataactctgtactatttccagttgtgcctattgccaatacataagagaatatgaactatttcattagcttataacatacaagttttacaaaaaaaaaaaaatgatctctcatatatggaattcatataatgacttatattagtatcattatcttctcactaattaaattcatatttgacgaaatgtacgtagtatgtttttaacaataaaagtccatttcatttggctagctatttcattttctgccaaatattaaagtctatcatcagatagtttcacgtaggtaggtacagaagagaatgtgaagaaaatacttttcaaaaagaccttgacttaggaaaaagtcattcaatttccacagatacttactatagaaactttttcgatcaaaaaaaggagaggaaattgctaagttatttcgcaccgtacgactcatattattccaaattatgtatgttaataagttacaacattattatatacacacattcactcatgtattcaataattgattctcaaaccattagctatgtacgatacatatgcttgtttcttcatacgacattattgtttatataggtttcactaaaaaaaaacatgcagacggaccagatattaaaatattgcaacaaaatttttcatactctaaatttacaattttgctcatcttatctaaagctataacacataacttaaagcaatatgatgaattcattgatatgtataccgtaaatggctaaaccgcgtgaaatatcttagcaggtaaaaaataaagggaatttaaatcatatttatatctttatattttaatcaaatctaaaacatcttctaagactattagaattgataaacaaaaaatatagttttattaatatatcccaaaactatacatgaaattgttattcatgtatagactgactcaaaacaaaatttagtaatgtttttttttttgtaaaactctacgttttaatttaaagactaaattcaactttgcaaaaatatatttgttactatttttatttatttttcgttgttaacgtatgacaactagttgtaatcaatttactaggtacagtggacaaaatattacattaacatccatatttcagattcatctccttttctccaaaataaaacaagattcaactccttttctttttctgaataaacacggttgatatatatttcagtacataccacttggtgtatagttttgggaaagaaaaaattactagagttggagaaagaatttattgtagcaaaaatgtaaaaccattgtgactgttcagctctagctagattcaatataaatatagtatcagatttgtgttatatgcataaaaagaacattcttataatcacacatctctctctcttcattccccaagcatagaatctctccctctctatctatctctctttcaccttttcttgattcttactcagagaaaattctgcaatatatatcgccatgatccacaccgacatcgcagagatcttatgcgtcaaacccaagacaacgaagaagacaaaaacaatggaggaagatgtcaagaagacgacgacgatgaagatagaaggagaagttgttgtgatgaagaagaatctccttgatttcaaagacgttatggcttctcttcttgatcgtgtcaatgagcttcttggtcgtcgtgtctctctccacctcatcagctctcaccaacccgacccgggtaacccattctttctttaacccgacccgttatcaaatccatcttaaagttcttgattactctgtttttcttaaatcattctttggttaatagtcactatactaagattcattgttgttataaaccatgatgttgtgacaaacacattttatactttatccaaatcaaaatctgagtgttttaaactaaaataatatttttgtgtacatatgtatcagccaatgagaagagaggaagacttggaaaagcagcacatctggaaaaatgggtaacaaaaataaaaacgtcagtaaccgctgaggaaactgcgtttggagtaacgtttgattgggacgagtcaatgggaccaccggctgcatttgtgatcaagaaccaccaccatagtcaattctaccttaagtccctcaccctccgcggcttccctgatggcgaaggtggtgccactgcgatacatttcatctgcaattcttggatttacccgaatcatcgataccgctccgaccgcgttttcttctctaacaaggtaacgatttgagacaaagtgggtaatagtaatataataatactactaattttatggtttttatattggacttggaatttcatatattattttctaactaatcttagattgctcataattctccatgtgcaaacgttatcataaatattcttaaaccataggtctttcttaatctttgtgtatccatgtatttatttattatctagataggtagagccgtagagggaatgaactaatacatttaagaggatactgattagtttgttacataggaattatctcctaatccgtatgacctaaatctttagaattatttatttgatttaatagatagttttggaatattcgtgtacgtgtgtaaaacatataattgtaccaaagaatgaaaccggagtctatctttacaagtcaccctcttcctttattccaataattttctaatctaatagaatctttttataacttgataacgacaaccattttaagttattgatattatattgttctgtttcatctttctttctctctttttttttttttagttattgttgatacaaccttgatttcctaacacaataaagtagatggggctggctctggctccactattgagtcaaaagttaaaaaagcatatattggttggacatttaattttatatttctttagtagttaacctaaatttaacccatggattaatgtatacacacggtgaagttatagttttactgattttattatttttccttaaggcatatcttccaagtgaaacaccggagctaatcaaagagctaagagaagaagagctaaagaatctaagaggcaatgagaaaggaggagaattcaaagaatgggacagagtttacgactacgcttattacaacgacttgggtgctcctgacaagggtcctgactcagttcgtccggttcttggcggttcacctgagctgccttatcctcgccgtggcaaaaccggccgtaaatccaccaaatcaggtagtcaactcaacatttcaaacttacataccacatagcaaatcttgatagttacttgttctaaacggcaccgttttttatcagaccctaagtctgaaagcaggctggctttactaaacctaaacatatacgtgccaagggacgagcgatttagccatgtgaagttttcagacttcctcgcttatgcactcaagtccgtgactcaagtgcttgtccctgagatcgcctctgtttgcgacaagaccatcaacgagtttgactccttcgaagatgtttttcacctctatgacggtagtattaagctcgccaatggtcacaccatttctaagctccgtgatgttatcccgtgggagatgtttagagagctagttcgcaacgacggagaacggttcttgaagtatcccttgcctgacatcctcaaaggtacgtaacgtatcaacggttagatattcgattcagacctaatgctttttatagattttgacataggtggtcgtctattgctacagagagcagatcggcttggaggactgacgaagagtttgctcgagaaatgctggccggtcttaatccggtggtgattagccgtcttcaggtttgattttcgtcatatcacaaactttgttcttatgaatatttgaaattatcaaaatttatgattacaaataatttgaatacacaaaccaaaaatgcaggaatttccaccaaagagctgtctggactctgcaaagtatggaaaccaacactcttccatacgaacagagcacatagaatcaaacatgaacggcctcaatgtccaagaagtaagtataatatacacttcttgtttaacaagtaacagagatttttttatttcatagccaatgtagttaactgctgtttggtttcgttttttgttatgtaaaaaaggctttggaacagaataagctatacatattggatcatcacgacgcattgatgccttacctgacacggataaactcaacaaacactaaaacctatgcgacccgaaccctgctgttgcttcaagcagacggaacactgaagcctctcgccatagagctgagtcttccacacgcacaaggcgaatcatatggatcggtcagcaaagttttcacaccagcagagaaaggtgtcgagggatcggtttggcaacttgctaaggcttatgctgcggtcaatgactctggttatcatcagcttataagccattggtaagaatatggtgacattgtgaaacatctagcatctgatttaagtaatttattaatgttttgtctttaataggttgcaaacgcatgcggtgattgaaccgttcataatcgcgtccaataggcagctcagcgtggtccatccgatccataaacttctacatcctcatttccgtgacactatgaacatcaacgcattagcgcgtcatgtactcataaactcagacggagttcttgagagaacagtcttccctagtcgatacgccatggaaatgtcttcttcaatttacaagaattgggttttcaccgagcaggctctcccaaaagacctcctcaaacggtatacatcaagtatcttgggtcacaagtaacattgaatcttgtggaacaagtaaccttacaatcccatgtttttgcagaggagttgctgttgaagatccaaacagtgacaacggcgttaagcttctgatcgaagattacccgtttgcggtcgacggtttagagatttggtcagcgatcaaaacatgggtcacagagtactgcacattctactacaataatgacaaaaccgtccaaacggatacagagatccaatcatggtggaccgagctccgaaccaaaggccacggcgacaaacgacacgagtcatggtggccttcgatgcaaacccgcgacgacctaatcgaaacctgcacgatcatcatctggatcgcctctgctcttcacgcagcagtaaatttcggacagtacccttacgccggttttctccctaaccgtcctaccgtcagccgccggtttatgcctgaaccaggtacggatgagtatgctgagctggaggaagatgctgacgtagcgttcttgaagacgatcacgccgcagttacagactctacttggtatctccatcatagagatattgtctatgcattcaacggacgagatctacttagggcaaagagattcaccgaattggacggcggatgatgagcctttggaggcgtttaagcggtttgggaaagaacttgagctgatagagaacaatattatacgaagaaacaatgacaagaggttcaagaacagaaccggaccggttaacataccgtacacattgttgtacccgaatactacggattatacgagagaaggtgggattactgggaaagggatcccgaacagtgtctcaatctaaagataaaccctctctctctttaaggtttttttgaattatttattttttatattttggctttgcgtgtaatattactcttatttttttatttttatttttaattatcatatattactcttgttataatccatgcaacaattattgttttgttttaaattttctatatttataaatttacctgaacatttaatttataagagaatttacattttccaaaaaaaaagaataaataattttaaaagactttcaaaattcacctttaattttgtatgagttgtaagttttttttgccatattttgtagttatcgtagtttaataatattttaaattttcaaattcaaaatataactttataattaaattatttaactaatttaactatttttacaagacttataattcattattattttcaaaacagccaaattcaactattaccattcaaattataaactattccaacatataccaacagatttaatcacatttagttggattcaaccaaatgtagttattttttttttttctgtttttgcgtaaattaaaacgcacaccactccatcgaatcagtgaaatataaagaagaagctaaattggatataatgaaataaacatgattttattgtattttaaaaatatttttatgttcgacatttatcttagcacatttttaccgaggttatatcaactaacatatcaataacaatcttcgggcttgcaacccgttaactgtttattgttagcgttaggaccaatggtggacgtagtatgaacttgatggtttatgggaggaagacaatcacattcagcaggtgctctatcactagggcaatgacaaagcggtggttctggttgtgttcgtgcttcagattccgatgaaaaatccgcatgcaaaaggtttatatattaagtaatgttgcaaaaagaagaaagaaaaaacgatattttgaattcaaagctatggtttctgtatatacacacaagataaaacaataaggagagcaaagaggaagtgaatgataagtttcgccatagcgtttgagttaagagagaataaacttttgtttggtatgaaattgaataagttgctcacttgctctatttatataagaattttgtaaactagataagaacgtaacgtatgaaaaatattaataaatttattttggcttcataaattcataatcataaagaattaattaataaaatacttcattgacttcataaattttggcttttgtcatttaatatgcagaaatttgggctctttttgagatatgaattagcaccaaaaacaaaattgcttttatactagaaggggagaatttttagctaattagcccaaaatatagtcagagtctctgcatattacatgcaaaatagtcaaagtttctggatatgaatatataataatagtcatagtttttgcatattacaagaatatccgtcttaatagcatattgattgatgttgtgatacatatatacatatattgtttggatatgtattggttaatgtctggttagaatcacattacaaaaatttaatatgaatgattctagttaatttccgcagaagaacgtattaaaaatgttccataaaattgttcaacgtgacgaccacgctgtcttaattctaacaattgacttcgaaacttcaaattcatacaaacgtcgcacgtgtgcatttttttagtttttggttttaaaagttgaaatttctacatgaagttaattaatgatccttgggagcagaattggatctcctaaatcattaaatcgcattcgtcagtatcaacgtcaataaaatgtagaaactaatactactaaatagctttcctccgtctctgaattggttgatatctaaagttaacgacgtaagggtacatattattcaaacatacattatccacaacattttaggaattttaaagttatttaactattaggagtaaaatgtagtagctaactgaatttttctctcatatataaaaaatttcataaaaccccttcttaagagaattaaagaaactcaatggctaaatgtagcctaatatcaccgtaatagacatgcaagtctagaaaaaagcgtatttggaacagatcaatgtgattatcttctaattatatgtactcgttccccaaatctcgtttgttaaatcagaaccgttgagataaagacacgtggcgagatcttctgtgagaagacacgaccgacagaaatccacgtggaccacgtaacttagacctatacgcagtctcatcgtacggtctccggtaaaacttcagatacggtacaaacgcttcacgtgacttctcgcctcctccaccgacattgttctcccgacgaaagaacatcgccggcgactgaaagaacgaaggacgtggagttttccgatacgaaaccgtctttgtcttctccggcaacggcgtcgatggaaacagactctttctgcatgcggctggtttcgcgtctttgaaaccacgcaccgccggagacgcgaagggtaacgaccgtgcactgagaggagaaacaggagcagcggcggaggatgagacggcggggttataaggtgacgtgtcggtgaaggaaagataccacggcttcaacgagttctgagagactgtgaaagcgaatcttgaagaagctgaaccaatcgaggccgttgatttaatcgacgatgcgtcgaatcttaaagatgttgatcgaggatttgatgacacgtgggtgatatctagcggttcgtcgtagtctagagacgacagtatcatcgtggccgttgagagctccacaaaaggacgaacaccctgacaattggtacgaacaaacaaaacgtacttttgagcttatccatactaatcacaattagagaattaataatatgtaattaatgggtttagggttatagaataattaccttccaaaggtaagagaaaaaagagggagggtcgatgataaaggctttgtaaagtcggcatgggtaattatctgcgatgatttttagggtcgccaaaagcaaattcgcaaatgcagaggatgatctgaaaaagcctgttttttttgtatggtattaagaaaaaggaatattaatcgattttgtacaaatatttaaattgtctaatcgggtttgaaatttttttgaaggtgtatttttgcagagaataaaatgtacttacatttttatataaaggaataaaattcgaaaaggttgattcaaaaaaataaaataaagtttgtgcagaacgtaaaaaagcataaatctttaatagcgtgatactaaactaaggtattgatcttttgcattgtaaaaatataggtatttgtaaactaaggtatacgccaattattaaataatatttgttagtcagttaagcttttctcaaatttaaaaatattattttagtaacaaaaaaaggtgaaaaatcgtataaatatagataaggaatcaaaaataaaattcagactggaaattgtcgttttggctggtttaattactcaaaaacttaaaacttttcaagacaactaaattatgattagttagtggataattaacagaagaaattgacgttgacacataaggggacaaatcggacatcaaataaatgcaaatacatgtccgagtgtttttggtcccgacatgactcaatccacaaaataagaaaaccaaataaccaaacaaaatcacggattagtacatagaaatttggaaggttgctagggattaaaaagtaaatttggaaacagtaaggctttacttacttgcatcaaagagaagaacaaagctctgttccgtgtttctggacatgcttgaaatcgcagtctcaatcgtgaacgctaccaaacgcgtaaatcttcaaacaaaacaggaacgtttttaagaatatcaatacagtttaaaatcagtaatatataaacttactgtttttgggtatgcagcttctgataatcatgcttaaaacggaaaatctgtaaaaatcaacctcacttttgttatcattcataacattaataataacaaaaaagatggatttatgaagaaattacaataacgggtcttgattctctgtcgtggccggagatgtaagctacaccgtcgctaagttccgtcgagaactcctctgctcccaatcgctcttcacatatataaataaaaacaaaagcttttaagaaaaagtgtttgatttcttaacaatacaaatggaaaacacaaaaaacataccaatatcgaaattttgtctccaagaaagacatgaactgagttgtttcgctgcttttttcacattatctcctttcaccttcaagaatctctcaacacactctctgttacagaacttctcctgtaaaaaaaggttttgttattcatgaaaagttcgaagcttttgtttatggaaagtaacacatgcagatatgagtagacgtacttgtttaaaagtgagtggagattgtttcttgaccaagcgaagaacagcttcgactttctcatctttcttccccatttttttttatgaagatctcttaaatctctctgttttggtttataagaacgaagaaacagaggatgatgaagagaaaggaaaaaaaaaagattggatgttttgggagagaaagaagctgcgacaatgattgtatttgcgtgtttgtgccgcgagcttcttcttgtagcaaaagagatctttgtatctctctttctctagagagtgtgtgtgttgttgtgtcttacatatgttggagactggagagacgttattggctggtggatgacgttgttatgtcgttttgcgaacgttaaatgtttaaaagctaaagccgttgtggccgccagtgacgccatctaacgccgttaaatggctctgctttgtgtgaaccaaaaaaaaaacttgtgtttcattaattagtcaaatgtttgtttattacttaatcatgtgtttaatatccttaagtactttataaagcttttgctaagtgagttctgtaactatgatacttgaacttgtagattgtaataaaaatagaataaatgttttttattagtaacacctagttcatatatagtcaacgtctatataacctagctcaagtacttccaacgatcgacagtgacgttggccaattaaatgcttttgcagtaacaagagttctgaatttctgatcgaccagttataatttattttccctataactcggtaagaatgacataacaaattccatattttgttttcgttgcaatgtgacgttatataagcgagaaatgaaaaataaacaaacgttataagcgtgtcattaactttgtgtttggaacacacatgttagtttgaagttacatttcataaacttaagtgttatgacgagtaaaatagttttgaagtgacgaataactctataaattacattgattactatttgacaactaacgaaaaaatacaatgaaatttgaaataatattccagcactgtgaaggcgtgaaagaggttttaattgaaaactcaaacttaaaaatccctctgtttatttttgaaataacaacattttgtgattgaaattgttgatgtgactaattgttactattcgtttttactagtacgtcgtcacatttcgatcctagatgcaatgtatagtttcagttgcaaactgttgcacccatgtctgatttcatccagtaaaacatattttctataccagcaattaaccagatcaatttaccaaacccaacagatactagttaattacttttgagggtttaaaagaacagaaacactcgtaatctcatggagaggaaaaaaccacatttacataattagtaaaaatattaacattaactagattataactcgcggtataccgcggagacaattgttttttaaaaattagtatatataaaagtctgtaaattatatttatctataaaatatttatattttatagtttataattattattaagtaacatccttccaaactcgttcttccaaacccgtcccgttaaaaaaatatgcggtacaccgctaattttaaaaaatattttacgggattgcaattatattttagtttgtcaaacaaatttttgttttaaatagttgtcgaaatctaattcaaatattggagaaataagatttagtgaactcataagaaatgtatttaggtgcgttttgctcattttaagggattgcaattgtattttggtttgttaaatattttttgttttaaatagtttccgaaatctaattcaaattttggagaaatctacgtgatatatgggattgaaatatatttggaatattttttgtttgttaatcaatttattgccaaaagaaaatcaataattaaaagccagtggcagccattgtaaataagttccaactcgaggatttatttcacaaaatagctgcaaaaatgtatatatagattactaaactattatctttcctccgttcaaacgtgcaactttttttagtctatcgtatcattaaattcgtatacctgataattactagggtctaggttccttaatgacacagaagattgtttaattctacaaatcagtctttattaaccctaaactctactttttaacgggtcaacaatactgaatgacgatggtggagtaaatattcttgaaaaagaagaccgttgtcgtcacggcggcgacttgctcgtacgtggttagtggtagtaaaatctcgtacgtgggtagtggtagtataattacataatgaccagtaaaatccacatgtcaaaagcaaagattacacaaaaaaaagcgagttcacgttcacgtgctcgtttcctaatgctttctgtctaatgtccacacaccgacaaagaaagtcaaaaagataattgatgatctcttctgtattaacttcaattagcacagtgaaaggcacacgaaaatcgtttagttataatgatcaacgagacgactctatatatagattgatgatagtcttagattaaaagatttttattttatttttattgcaatttactttggcacttcaaatcttgagattggtaattgtgaaagtctctgttatttttaacccttaaaatcaaaatcaaatcactcggagttaggactataggagttatagagtctgtatcataccaatcatcactttttgaaaaatctatattcttaaactttgagacattgtttaagccagatcaaacttgttatatattccctctgttcctaaaataacgatgttttgaatttttcacacaaattaagaaaagtaattttaatattaactttattactttgttgttaatttaataatataaattctatttctctcttgtttctattggttactaacaaaaaaaataataatattaatctacaacatcaatcttcataaaacaaaaataaaatccaaaacatcaaacttcatggaacagagacagtatcatataacttacgatataaacccacattttagtacttttctgggactttttatcgatgatatttcttcactattttttttctctaagaaatgtattgaacatggaaattttgacctacttttctaaataatattttcaaaatttgaaatctaaatgtatctaattttattgcatcgatggtcctcactattccatctaaaatgtgttaagtggtggggataaggaaaagtgattatgtaattatgatgcttaatcattaagaagaatttaggtgggatggttcattttaagaagtttacaaaggagaaatagaaaactagttatttaacatttacaccaaaaaaataaatagaaaacaagtttttggatatttaaaacgatgaacatgtctttgatgatagattttactgtttcgatatacacgtttaaatgacaagtccgtaatgattttagatatcagcaaatagtgatacgtgaaaaggagacgatttgccatatcgcagagacgcagatgggacaatttaacttagttaggcctttattgggcctgctcatcggctaacacaggtttctttcgggctcgtacaacacattttccattcgttggatcataaaatgcttacacttacgcaactaaaaatcattaatcgattttaattttaattatttatggtctttcttacatgatattaaataattcgtaatgcaagaaagaccataaataattgaatttaaaatcgttatatcaacaagatacgttactaatcatataaacatatcaaatcaataatagatgaagtctctccataaatgataaatcaaagaagaggaagaatactgaaactaatgattatacaaaaagtgtgttatttttcgattcaagcctttaacttgagaaactttttcttcattttatgaggaattaagttgtttaattataaagttaaattacacaaaagaactatcaagtatatgtacccattattttgtatagaaagttgtttcaaaaacaatggtgtgtataaattagaaatggtggtattggtgagattgattttaaagcaaggaaagaaaaaggtaattgccgacttctaaggcaccctaacattaccactgctgtccctccacatttgtcatttgcttccatatttactcttttcttcatttttattttagttttctctcgcgtaaaatcatctttagaggttggtccaaattggtatacctttaacacgaatctacaattttgtagtttactgagattggcccacacacttcttttgcgggtccaaaggccatatttttacattaaaacattcgatgcttattggttcattgaccattattttagaatctatgtcttaaatattatttaaccattttagatcgtttacatgatcattacaaaaagttgattttattattcacaccaaaaactaactctcgaaaaaacataacaaattgttgatgaatccacgatctctctgcatcccaaaaatctgatagacaacactataatcacattaaatagttttgtatacatgattaggacgaaacctctctacctatatgctagaaatcttcaataatcttatcactattaatttataatatataataatcccatattcattagaatagaaatcaaaacacaacttggtgtgaaattatacccttgtcggtcaaagagttttcaaaaacctatatgaataatgaataaattcaccaagagtaaaaaaaaaaaacaggtcaaaaatctctagagaaaataaaattctacttctgttaatacgtacattcaaatatggagcatgcgtgtggacttaagaaatgaagctaacataaggttaaaacaaaaataaaaaagattatataaggtggcaaaaatcattcatataaaatatatatagaaagaagaagtgtgaagagaaaacatgataggtgaaatgggattgttcttgagggataagtgagcttcaaaagatagagaaaaagagatgtttgacaaacacctaataccaaaagagaccccatcacaataaaacattaagtcacagtttcatcattcttcatcgatattgcgttatacttcatcaaaactcatgaatactaataaaattctaataaactactacatttaatctgatgggatccatgtgtcacggttaaaagtatttggaaacatgtttattaataaatttgtagagagaacaaataaaagaaaaagaacaaagaaaaaagaaagatggagatggtggcttgggccatacttaataaaaggaacatataaaacacgttgatgtggctgcctgcattccttattatccaaggtggagcattgtcattggttggtttcttgagttgggtccttatgttatttatatacatatatctatatctactatatatataaagatagtgtaattaatatttcatatttgcaagagctaaggcattgtataagaaatgggatggctccattctttcttctctcctttgaagaaactatggtttagcgtcaattctgctcaaaagaagagtatgatctctctctctttctctattatgtatgtgtgtgtgtggatcatatactcctttgtttttttttgttctttggatcatttactctttttgtttgccatatgaacatatatctacatataaatatgcattctttgtgttaattttgaaagatggaaaatgtgcaggaagagggatatacatattatacgaggacgtgaagtcatgcccatacgaagatgtgcatgttttgtggtctatacttgtggagtctcacccacacactttgcaaatcaaacaatgataaatccatttcattactctctttttggttcagagggttcatacaccgaatgttcatgctcgaggtcaaaacgaagaagataattcttaatggcatgattcatatatctgttttctctcctcacgtactgtacatataatataaatacacagagactctctttcccataaggttcttgctctctctcgcgatatgcaactatatatagatgtataatgtacatatatgattctctagctcttgaggtcatatacttgatattggtatagagccgtggttaattagacttttgaggggtcatagatgatttcaaatttaccctattatatgtaaaaaaaatgattagacaataatagaatgaaaaagataaaactagtaatgatgaaaaaactttaaaacatttttttttaatactcagtatattcaatgttcaaacctttactcattctcatgtcactaattaaattaaaattcggggatctaattgtatgcttaatgagtggggctcaagacatttgccttatatgtacaagggttaagttgtcatggctctgtcggtatacatagatagattgtattatttgggaaaataattagatatgagcatgattgtgtatatgaaaatgtgttatatatatgtatgatatgtctgcgtaacaaaaaagcaagtaaacatgtaccataagtatgtttttctaattggtagacataaaaagataaagtttgatgggaaaaggagagctagtgaatagaagttggattgtcgtggacactgttggcttgtgtcggttgggttgacgttagttgaaagttgcggttgttttcattttgcgtttcgtagtcgtttgaactgaatgtagcatttatttatatataaattaaaaaggacaaacaaagaagaatgttatgatttagacattagatagccaaattaaaccctgttctagcacaatactacaacattaaatgttgaaggtggggatagattacaccaaaacattcgttctattgtcgaaagtgtcaacggttaggagagttcttaagatcgcattagctatgaactttttattgtttttgtcaggaaaaaaagaaaactagcaaatgttaattacatttaagagagatataattcattagatgaaagatagttttgtaagacataaaaaaaaactatgtgacaatagaaatttaagtgagacttgctttatgcttagggacatgtattggcaaaatgatattcaaaaagtatctcctaggacgagttttcttacttaattgcactaaaaacgagaatgctttggcaggatgggtaaagttaactataccttcatgtttccatgtttttagagggaaattatgataagaatataacgattctacaataacattgaacaaataaataccaaacatatatgttaaccaaagcctcaacaagtaaaagaggtctttgtgttttgaaaatatacatataccaatcatatgatatgaagccaaaaccggcacatccttaaaaaaatgcttcaggagcgttatcatcagtttcaacataataactatgttggaattaaaatatctacgtcggtccgaagttatactgaggtgtgttgccgacaaaaaaaagaaggtaatataacagtaacattaagatagtcgagattgaagtttgatagtgtggaacactaagatagtctctaacatttatttaatcgtagttaaggtacaatattttagagtcaaaaagctctttcgtaaaaagaatatacaaatagtgaaaacgagtcaattcaataaaatcactcccacatgcaactagttgatcttcttccatgcatgatgtagaccaagatcttttgctaaatcttcaaaaacaaaatgatttaatataagtgtatagatgaactctccaatttcagtgaaatagaatgatgcagttatgataaaattcaattaatatttttagaattcattcatttgtcgtaataaaatatttagtttcatatattttttttgttatcttgtcaaaaattatttgataaaatatactaaaacccgtgaccaatttcttgctctaataccaacttatactaatcaattcactcatttatccttgcacactgattaaaaatactgtagtctaggatatgatgactaccttactggttaagggagtcaacaaggttgaccggtacagtttggcaatccgagagcttctcttgtaaattcccaaattaaaccaacaaatagatttcactaacactattttatgatactgagagctttcattttcttttccatcttaaatcagacttgaagacatgttaataacattatattaatctataagggtataggaagcttagaatgcgacttgatcaacaagtattgccggaaagaaatcaaatatggtcttctatggcgaaatttcaaggcctcatctgttttctcatacatgatcatcagagagtcatgaattcatatatatggactaagaggtaagaaaaaccaaaaatgttaggaaactcatataaatgaagatgaaaggaaataagaagaggaggcggcagaagcggtgtaaggtggtgaaggtcagaaggtggtttcggcaagaagctagagctagagaacgatcgaggaggaaggaaagtctagaaagagagatggaaattttttgtaatgatggagaaaggtttatgtgttttggtttaaaccgcttccatgcatgtacttggcttcattcagttttcgatttaacgctaaacacacacaattaacttgcaaaattgtgaaacttggccaaaataagttgatagattttaaaaccagccacatatcccaaatcagcgctagcttagctaaggcttaaaccaccatcttacattgtcttggaatttataaaattatccgaaaatactacctttcaaaacgttagtaaattcacatatttactaagttataccaaactttaaaatttaacactttactactatttataattacatttcatgtcattcttataatttcttatggatcttatactctcataagatgtctaagttttccgaagggacaacacatcttggtagcgagggagattgtggagctctcacatgaggaagcagcatagcacgaagtatactaataacttgatacttataatggccttcatttggcttagacgcagctataacgcaataaatgacaatgtttcttttgttgacatttgtattggtgggatggtggccaccgactacttcaaccaatggattgaggcagatttggtttctgagacttggaatgatgcggttctttgtttgtttatcctaaaggacgattttccaagaatcctatgtatcaaacaatttactacaagaaacactattatttattaacatttaggatgtatacagtgatgccaacagagatatacaacaaaatctaccaagatggagctttctctcagccggaagatatagagaaaaacactaaatgcgtaccatctaaaatgtgtatctaaaatgtgtactatcagacgaacatcttccataacctgatttacaatcactagcagagtggtacatatatttctcttttaggcatatctatgtacctaatcttgatttcacgatattaagacaattattttaaaaccaactcaacaatcaataatacatgcataagattacaacattttaaaagtttgaactatctacaagctaaagctacaattaataattcacatgctagtcactccctttcaatccgtctagtttcatagctatggatttttgtattttaacttttacaaaatctatggatttgtgatgcgtacaaagagtagtgtgatatttgataagaaaatgaattgaagatgcgtgatcatacagagagtactgtccagttatatagagaagtgaatgcaaatttcaagagttacatgaatgcaacaattagatcttgataaaaaaatcaataatttagattgattcatatttttttttgataatgtaaaaaaaatataagacatgaaatgactaattaatgcaacgattagatcttggtaaaaaaaattcattactttagattgattcatatttttctaataatgtgataactgatataagacatgaaatgactaatcaatgcaacggttagatcttgaaaagaaaaagaactataacttagattgattcaaattaaattatttcttatgtcattaatagaacatctttctaaaaactttatgcttgattgaatatacatttcttgttgcacaaaaaaaaacaaaaacattatatacaagttcaattgctggtattcttttttttggtcatgtataaaccataacacatagaagaggaaaacaatttcacctttaaagcaacaatacagagtacatgatttagctatttcaaatacaacatttccacttagaagtttaggaacattttcgtgaatctgaaagataacaaagttaaacttaaagtaagagttatggttggtccaaatgtgtctctaacaccatcaccaaaaaagagactgtgttgctgccgtgactcagttccatgtgcctcctctttcactttctcacaacccgtgacacttaacaactatcactacacgacaaaaaaccaatccacaagtgtttcgataaacctacgactttttttgttttcgccttttggcatttccttcggttatctccgtaccggttttggaataacccggttcttggaatttagcttatccaaaaacaatcacagcttcataacaacgcatagcttatttatgtggtcttaaatccactctttagattctttgttcacacctgtcaagttgtataatatgcacaatttttcaaacattctttcttcaaaattccacaaatattagttgaccacaaaaattcaatagaagaattttggtatagttcgtacagatggaagttgaaattagttgaattgccgttttctatacgtacgaattttggtatttattgattagataaaccggaacaaaaccggtttagtaaaccgacgcatggtgttggtaaagtgtgattgggtaagaagcctaactagttgtctgttgataattgtcactaggtgggcacttaaagaaaaaaacacttgtttccttatatattcttctccctttaaacatttaatcttttcctcttctaccatctccacaaattccaaacatctctctctctttctctctcacacacaaaattgcagaagaagaagagtcatgaatggtgaagaaagctttgtagaagattgctctgtttttgttgagattgatccttctggaagatatggaagagtaatgtttcttctcaatcaaaagattttgacttttggtttacctaaaacatgattttgatttgttgttgtttgtgtagtacgatgaaatacttggcaaaggagcttcaaagacagtgtaattgcattcatcttctatctttctctttctttaaaaatttacactaaacaaaaataatcattttttattgtttaattagtttttttggttactttgttggtttggaattggttacttaataatccaaacactgttctttggttttatgaaatttcagatacagagcatttgatgagtatgaaggtatagaagtagcatggaaccaagtaaagcttcgaaatttcacaaggaatcctgaggaattagagaagtttttcagagagattcatcttctcaagactttgaatcatcaaaacattatgaaattctacacttcttgggttgataccaacaatttatcaatcaattttgtcactgaactcttcacctctggtactctcagacagtaagcaaattcaatcttatgtctctattacttctttatgaactcatgggtacttgaaagttcaaatctttttcgatttttagttttttgctctgttgttttgttaggtataggttgagacatagaagagtgaatattagagcagtgaagcaatggtgcaagcagattttaaaagggcttctttatttacatagtcgttctccaccaattatacatagagatctcaaatgtgataacattttcatcaatggaaaccaaggtgaagtcaagatcggtgaccttggactcgctgcgattcttcgtaaatcacatgccgttcgttgcgttggtacttcaaaaccttcacatcattggaactttattgctttaattatgttttttacaactttggacctacctttactatgtttatgtgttgttaaaggaacccctgagtttatggctccagaagtgtatgatgaggaatataatgagttggttgatgtatatgcttttggcatgtgtgtgttggagatggttacttttgattatccttacagtgaatgtactcacccggcacaaatctacaagaaagttacctcggtaaattatcttggacttgcttgttcttgaagctaatttgaggtcaagtcttgttttacttacattcttcatttcaggggaaaaagcctgaagctttttacttagtgaaggatcctgaggttcgtgagtttgttgagaagtgtttagctaacgtgacgtgtaggctaacggcattggagcttttacaagacccttttctacaagatgataatatggatggatttgttatgagacctattgattactacaatggttatgatgaaactggtgtgttccttagacatcctttgattgatgatcctctttaccatgatcagtttgagtcgtcacagatatgtgagatcgatcttttcgctaacgatgatgaagatcatgtcgacatttcgattaaagggaagagaaacggtgatgatgggatattcttgagacttagaatatctgatgctgaaggtatagtttcaatctttttcgatagttttaaaatcatcggtcttaaaaacgtaacacgctttcgagttttgggtaatgtaggacggataaggaacatttacttcccgtttgagacggctattgatactgcatggagtgtagcggttgagatggtgtcagagctcgacataacgaatcaagatgttgcgaaaatcgcggagatgatcgatgcagagattgctgcattggtgcctgattggaaaaatgatacagaaagttcccaaaatgtaaacaacaacaagaacaacaacactgcaggattctgtggagagtgtgcttcaaacgggtatatacaagagactgtatcatcaggagaaaaatctcatcataatcatcatgagttcgatagttctgaagacaagagctgttcttcggttcacggtaggtttgcggatatgtggggtttgcgagaatcatattctgatgatggagaaaaacagagctcaaggaaggttagaagtggacggtggtcggagaatgagatgagacgagaactgagatggcttaaggcaaggcacaagattcaacttatgaaaatgagaggtcaaacgatctgcgagacaccgatagagatctctcttacaccgggaacttcagtttcgttacctcttctttacagggctatatcacttcctgtggatgccgtggatatgtgacattattgtaaagtctgatgatagttatcacttatatttgtatgtttcgacatttttaacttttgttaagttaaaagttaatgacatagtgtactttatttaaagagaagaagagtaaacgaaaaacataaattaggcattgtaaattgtggactaatcatctaggttttttccttgatggcacatatctcccatagactacatatgtctcttcatgtgcaataagtctagatatgttttcatcatcacatcgacgtttttctagactgctttcttgtttcctttggcatcctggaggttgcttgatttgcactaaacttggaacataagagcacacaaatagtggggaaaagtgtttgtcaacatcaacaggttgtcctagatgcagttctttaacgtttccagcctctcccacgatgtaaactgtctcgcgattcatcggtatatcaaaaatcatagcaactttctttacctcgtcaatgaaaaaactcccttccagaaggtcaacatacatattcactgtcaagaacttgctccacgaaatcttgtcagtctcaatcttagtcgtaatccatacctcaacagtagcattgttacaaaacaaaaccgcaagcttctcttctctaacacaagatagagtcacaaggcttccggacgtatatctaacaaacggcaaaggcataagcggaccaaatctctcacttgtaaaatcaaaacagattatgtgatcaagatcaacaaaccaattagtgtttgacttccttcttatagcacaccagtaagtgtttcccttgagagtaacaccacggttataacaaccacggggagggaaatttataaaccattgtggagtaacgtcaagagtcgtccacaaatcagagtcaaaatcgtagatttcataccaaaaagggaaatcgaatgcaccatctataaacctcaagattttgtgactacgactcttattattgtatccaagagcgtacacgtacatgtacctgccataacaattctgtatccgggaaaaatatctaggttcgatccaccttgtttgtccccaatacggattccaaacaacaagactacacttatcgtcttccaagacgcatagtaacaaaccctcgcagtgaaagacttgagatatcttgacttgttctgaatcgtcgtataggcaagtaagtttacctctttgctctgcagatggatcaatgtcaattccattgaagaagatgctcattgcaaacaggtttttatccatcaacacgatcatcctagactctccttcctttgctgctgcttcttctttcataaagctccggtttttgaataaagagtcccagtttttgcaagtcaatctcactgctctcgtagactttaatggtactctagagattatctcatctaataactccgttggaagatgagagattgtcgtcgtcatagtcattacaagttgcaacaaaggttttctcttccttagatctgttgttgcgcgcgcctataggaatcaaagacacataaaaggtaccacgtaaaccttttaatatcggtgagacatctaaatggtaaccgccttgtacaaaaaaaaaaaaaaaaagttctaaatggtaaccagaatctaactgattttttttgcttaattaatctagctcaagttttagtgatttttgttgaagataactgattttttattttttttcattggtaacacttaacagctgaattagttttactgattttaggcaaaatctagcaaaataattaagactttaactgaaaatatcttcaaataattatgaatattaataaaataactaaacaatatctaaataaaatagataaagttatccaatagtctaattaagtcttgtactaattaataaatactaatataaactaatattatataaattaattaattatctagtcaatgtatggtttggtcttagttgatgcatggttgatgtcttggaccggttataataaccaaactaaatcaaaatttcagttacttaaccgaaagtagtcaaattatttgtcggttataatgtaccggttcggttcggttataagtaagattctgcattagctcgagattccattagctcaaggagaatcaaagcgtcgtctcttgttccttccgctgccaacaaaatggagctgtcgtctgcgtccgccatattaagccactcctcctccgccgctcagcttctcagacctaagctcgggtttattgatttgcttcctcgtcgagcgatgatcgtttcttctccttcttcttcgcttcctcgatttttgcggatggaatctcaatctcagcttcgccaatctatctcttgctctgcttcttcttcttcttctatggcattaggtcagttttgggtctagacatggctgagattaagctcatttcatgattgatattatttctgttcactcaaaaagtcgtcgtttttaatctcaatcaggtagaattggagaagtaaagagagtaacaaaggaaacgaatgtttcagtgaagattaatttggatggtactggagttgcagatagttctagtggaattcctttccttgaccatatgttagatgtaaagtctttgcctttaaacctttttgtcatgtatttttgatttcttcagtttccattggaagagagcttaacacagactttttaatttaaggatcttgttttgattcattattggaatgttgactgattgatgtttttatggtttcactctttgtctgtcttggtttagcaacttgcttcgcatggcttgtttgatgtgcacgttagagctactggtgatgttcacattgatgatcatcacactaatgaagatatagctcttgccattggaactgtaagtcttactgtctttcgttttgccagcttcttttctctgttttcagtcatgctcttatgagacctatgagcaacagtgcgttgtcttttcctacggaaattgtgttgtgatgaaatccctgtgtatttgtttcttttctaggctctattaaaggctcttggtgagcgtaaagggattaaccggtttggtgacttcacagctcctctagatgaagcgcttatacatgtttccttggtataaaattgtgaaacttttgcttgcatctgtgtttattctctcattactggatatttctctagactttcttgctgcttatagtgaacaaaaacctcttgcaggacttgtctggtcgaccatatcttggttacaacttggagataccaactcagagagttggaacatatgatactcaggttctctctttgctcctggaattgtcttcttttgggtttatctgtgttattcgttgtttagtaatcattgaaagtgttgccaaaaattgtttaacctttcgatttgtagttggtggagcactttttccagtcgttggtgaatacttctggtatgactcttcacatccggcaggtactttgtgattcaaatcttccaaaagctaacaaaatcatgcagtttcatgagtttcttctatcctctgtctgtggaccatttcataacagttttaatatttgtttgttacaacagctcgctggtgaaaactctcatcacataatagaggcgacgtttaaggcgtttgccagagctctacgacaagcaacagagactgatccacgccgtggtgggacaataccaaggtttgactgatcctcttatcctccactacattctacatacactaagtaaagataaatatcagatataacgcaagattcattacatcaaagaaatagataatcttttatgtcaaaacaagccaaattatcttgatgaatgtatatcattggaaaacgtgtttgatgtgtgatggttcatggcatttgcagttcaaaaggagtcttatcacggtcttgaaagctaatcaaacacacaagacagttcccagattcacacttcatcgtcgagttcatgagccatcgtcaattctcttatggtaccaaatgccaagcctgttggatcttgctgttccattccattacagaagcacaaagagcaaaatgtgaaaatagattagagatcacacagttcagaagatcataggctcatctttatattaatctgttgttgcagagtgtattaaacctcttaccattgctgtatcatcatcaactgagaacttactgtgagttgaagtgactgtaatttgctttaaatagtcaacactccaatcttggcaacgactgcgtttgactaaaaataaataaacgtctgcgtattgatctctaaacgacacacaacgacgccgtttaagagattccaaagaatgtttccctcttccttcgagttcaatgatttgattgatccaatccctaatcgctctctatatactcttcctctttgaaaaaccttccctttacgatttctccatagcagacacagattcatactctgcgaattgctcaaggtagaagaagcagattcacgatcccaattcccctattaacggccattgaagatggtcgggagcaacaacaacgccaagtcatcgacgaacaagcctccagcaacttccatccccaccgctgcagcttcatcttcacagaaccataaacctcgtgtgaattcaactaacaacgatggtggaatcagtaacaacaacaacaacaacaagaaagaaagcaagccgatgatgataggtgtccagaaaaccgccgataagaaaccactgaagcctaatccatctcctaagctagctccgatcccgaaacaatctaatccgaatcatcaaaatcaaacgggtccatcatcttcacgaccaatggctccgtttcctttccctgattcatctcccgcgctaggtcctcctcctcaaccgacttatggattccatatgttagagcgtcgcacaattgttctcgctgatggtagtgtccgttcctacttcgctcttcctcctaattacatggattttcctcctcagagtcgattagctggaccggtatttgggagattccctcctttttacccggaagagtttcgagatcagcggatgaaacggaagtatccaggtgaagaagagattgataggagagatgagagagctgagatgatgagacagagacagcagtttatgcagtatgcgaatcctaatgatcactcatttatggctggtacgagtagggatgttggagaggatgttagagctgctaagcatatgagggtaggatcaagtaggcatgacaatggaggtttccaggttgaccaggttgctctaaagaaatcgtttttgggttttgttaagcgagttttcgaggatccgatggagaagaagaactacttggagaacgggagaaaagggcggcttcagtgtctcgtttgtggcaggtttgatggctttcaatctgacttttgtgtttgttttttggttcagtttagtttgcttgtgttggagacgctagttgccttgtttttgattgttgttttaattagtcttatatgtcttagaacgctaaatgaacatgaagaaggtaagagagaacactaatatacgttggaataattattgtacatttgtatgattagtatgttaattgttcacagtattgaatttatcttgatagtggttgttgttttagcaatagtgttcaatttgttatgagctgctgaatggtgtttgctttccattgattgtgttcctcttttacgatgtatttatcattactggaattctttctttagtaatgtgctaacttccatatacttttatagattaggcatgtgtgatgactgcctgtcgataagcctagattattgaagttgtttacttagatattaggtatcattcaacttagttgagttagttctcattttctttctacctactgcttctgtgctactcttttgcagttacttttttggctggccttagaacagcaaaggttgtgggtttttatactgcagcctgcaggcattacgcttagattctattctgatccataatagtttttttttttttggaactaatcttgcatctcaatagttttaaactttttttaatctttggtccacagcttattaaatctttctcggtatctctcgactcaaactattagcccttgccttatgcatgcatattcttttctttctgaatttaatataatggtagtttttcgcaactgtttagatttagcttgctgatatttctttgttaattggtttttgatggtcatatatcttgcttactgtttattcgtcttaggattactcttatttgaattgattatcagataggtagttgcatttcagtttttcgaatcatcgttctgttctttggtatttgtgggtgaccttcaaatcagctctcaattatcagtagtaacccaacgagttggcattttttcccccgttttaatctacttgcttatggtcagatcatgaagtctgcaccatgcatttggtattgggcgtgtgcttagcattctttgcttgtcctcagtgctcgtgcttgtgatttgtggaactttcttcttgaatacagcatgttaagttgatcgacttcatattcataactctatagggaattgagatatctaactctatctttctttgttctaacttgctgattagatggaggttgacaattaatttggcatgatgagtaaatggtcaatttgatgaccatttcaatcagtgttaagggctaagttagtaggctttagtagcaactaatctttttttgaatgctcttttatgtcacggaataggcttgttttggatgtagaaagcttacgatgaagttctctaattcctttgctatcatcttcattctttaacattattcaactcttctgctatgttatgatggtactcctcataattgcgcagaggtttatgtgtgtttttctttatgtttatatgttatccgtgcatcacttattacccctagtcttagcttaattttagaatttggttattccatctacatttgattcttgttggttgccaagctgatatgtggatgtgtctttcatattcaatcattttagtgtgtatattcattagtcttggtgtccacattgaagagtctttacttcatgattctgatttgcttgagtttaaataccttagagtattttatacggtatttgtgtggtaaatctgaatgagtgtttccaattcgacttgtgctaaaacacaggtcttctaaagatgtccaggatacacatagtttggtaatgcacacatactgttctgatgattctagctcacgcgtgcatcatttaggcctacacaaagctctctgtgtattgatgggatggaatttctcaaaggctcctgataattcaaaggcataccagaatctacctgctgatgaggcagcaatcaaccaagcccagctaattatttggccacctcatgttattgttcagaataccagtacagggaagggaaaagaagggcgcatggaaggctttggaaacaaaacaatggataacagaattagaggtataacatgcggcctttcactccttattcttgcgtttacatacctgggcagaaccatctggaacagttcatgaatcttgcattggttaatccgcacattaggattctcttctctcttttccttttttcttccctccatattagagatgtgcttggaaagtactaaagcaggttatcttaatcaattggatttagacccagagccttagagatgattcccgtatacaatggccataatgatgtcgcatgtctttgttatccctgactttgtgccacaataatcatctccttatcttttagaagaaaggtcacggtccaaatccctctctttgttttgctatcactagaaggatggcccaacaggtgttttaaagtaagactctggaaactaacatgattcaattatcatctgacatagcttctcaggaaaaaccttcactatacttagacccctgcccgtttctctcccatgtttctctgtgattttgtaaatttaaaattgctatgacttagcatagaataatttataactctggtttgagctctgatttcaataccttacaatatcagaatctaggcaacagtggtggtctaagaagtatataagcttctttaacataactttgttgggccaccatcttctctggtcttttctctaggaatctcagcttctatttttagaacttgtggttaggctaatgatgggtgtgcaagtacatgtatctagttattagcctatatcgtgtaacaacactcaatgacacattttgtctgccttcattttgatttctatatataattacagaactaggactcactggtgggaaatcgaagtcgttgtatggaagagagggtcatttgggaattaccctgttcaagtttgctggagacgattcagggctcagggatgctatgagaatggcagaatattttgagaagataaaccgtgggcgtaagagttgggggagggtacagccactcactccaagcaaagatgatgagaaaaaccctggtcttgtcgaggttgatgggaggacgggagagaaaaagaggatcttttatggttatctcgcgactgtaacggacttggacaaagtcgatgtggagacaaagaagaaaaccacaatcgagagccttagagaactcacaagaacaaagtaaattacagttttcttctcccacgaaaggtacacttaactttcgaggtatttgttgcctattgaatctggattcttagtcgcaacctaaaaaactcgaaaggaggaacgaaagtttttttttttttttttttaatttatagatgaagtcttggtctctttgatccttcgattcagtgttcatattgcatagtctaatatcggttgaacctgatatatacaagttctctttaccaacatccttagaagtatattgtgatagttgcttgatgcttttgatgtccctgttgattctcctacgttcgtttcttctttccttgttctatctcatcctttcgaatagtggttcctgcttgttctttaggctttagccagcctatggaaatgagaatattgaaccaaccaaacaatgttgccatagtgccattgtattgatgatgtctatgacattgagttattgtttttgtttgcactctggtagtagctttatgtatttggtcaccttagattggtgacaacaatggtggtgtttagtttaagctagctatcttctttgaataaaaaaaaataaaaaaaaaattataaattggtatgaaaacaaaaataaacattagataagaggacttgtattttgtgggggcttttggtaaccactatataaattttgttttgtctttgtttataactctttaattgacaagttaggtataaagtgttttgacgattttttcccctctactttcttgtgttctgataaactttattacatgtcttcattcaaatctttggttcgctctggcttaccaatttacacgttttgttaaaggaagtttgatcagcttcggtttaggccgtgtgattaagaatttaagataaaccttaacacttatgaaagtaatcaagcactatccggtagtgaaagttaatataacatataggattatagtttggccaatatcataacaactaggatataattttatgaatgtacaatatgcaggacaaagtactttgtatcttttgatagagttacatgcactataagagaattaaacatattagaaaaaagactagattatgtaaaatgtcataatcatattactataagactagctagactgaggtcaaatcaatgcataaatttaaatcattatctcttttgaattcgattatctccctcacatttttcaaatttctctactcactttttctataaagcggaaacagtaatcggcggttcatatgtagtcggccattacggacccatttaattagataaattattcttagccgtcagtttcatatttcgtctcattctaattttgtaatgtttctctaacctttttgtaactataaaatcatactctaatagcaagaggtctaaaagagtaatggatatttcccctcaataatgtgttatatgtcactgtcccgttttaacattttgtacatatcaacagaaaaaagtttttatgatatatccattccactgatgtcaaaaaagcaatagctttaataaaaccaaattcaaaatttcgtttttattctattcttctgttttgatatcacaaagatattaaaaacatagtacgaagattagttttatatgtgtactaatgaatcttctttgtggttgcttcattatcacgttttaacatttgtcacgcgtgccctgatttcattacagccttttctacaaaacacatgcattgttcttcttcttacattactacattacactacacaaagaatttcatattaattataacaacatttttttttttttgctatactatatagttttttgttattcaattggtattttaccggcaatgcttcactggtttccgactcaacgcatgtggtggtcagtgggcttggcccacttatctctttcacctttttttttctttatacgaaaaattaaagcaaagctatagtaatagtacttattattattaccacgtcatcacccaactctcttatactacgcatatcacgctaagctacgcgtcgacggcgcaatatagaagaatatgtaataatcgcgcctttaatcagactccactgagacgtgtcgctatttcgagttgtccacgtcactgtttcttttgtctcttatcttcttcttcgtctctttacttttttcccatttctagggtttcttcaatttcactctctctcttgagtttattcttctctgctgtatcaatcaaatcaacggagtttgagtttcttttccgattccggcgatggggtcagtccccgatccaggcgagttaactgagttagctcagccgagtttcgaggagtttcagaaacagacgtcgttgatgactagctgtactcttctatggcaagagctctccgatcacttcacttctctagagcagaatctgatgaagaaatctgaagcgttgaagcagatgattgaaactctagataaccagactcagacctcgctcgagtctctgaagcgtagagaggtaacaatcgaccatagcgttgagatcgtagctgggaaagtaggtgaacgagctagagctgctcttgaatcgttagagaaagctagagatggttgtggtgatggttctaatgatgattccggtgatgttgacgatgaagaaggtcttctttctgctttgaaatctctttgtcttaaaatggatgcgagaggtttttggaactttgtgacggcgaggaagaaggagttggagaatctccggtcaaagattccggcggcgttggttgattgtgtagatccggcgatgttagtgcttgaagcgatatctgaggtttttccggtggatacaagaggagataaagttagcaatgattatggatgggcttgtgttgtgattcttgagagtttaacacctgtaattgttgatccagtgattgggaaatcgaggttgcttgttactccgagtgttaaggagaaagctaaggagattgctgagacgtggaagaagagtttggaagagagaggaaggatagagaatgtgaagactcctgatgttcatacgtttttgcagcatcttgttacatttggaattgttaaaagtgaagatcttgctttgtatagaaagcttgttgttggatctgcgtggcgtaaacagatgcctaagcttgcggtttctgttggtttgggtgatcaaatgcctggtaatcctcttaagctcttatcttctacctattagttttttatcctggcatgctcattgtaacttgtgagatcatatatggttttgaaattggctagtttactaatagtttaacccatctagatgtatagttttggtaggttacaaatagtttacgagttgattagtcgaatattaagtttgtgtggcaaacattgtatggcatagattgtggtgaagtctgagacattagtggtacaaggtgttattgaccacagactgtgtgaagttgaagcctttttctctgtatctcgttttataatatctgaacttacaagttgttgcgctgtccacagacatgattgaagaattaatcagcaggggacaacagcttgatgctgttcattttacttatgaagttgggcttgtggataagttccctcctgttcctttgctcaaagcttatctaagggacgcaaagaagtcagcagcttctatcatggaggactctagcaatactggccgagctacggtatctactcattgcatctactcatttctatcgcagctaaatatttttatctgtgcgtccctgaaagttaatatcttccttgttatgttttcttcctaagcatctcgtggcgcgcaaggagcaatcagcacttaaggcggttttaaaatgcatagaagagtacaaactcgaggaagagttccctccagagaacctcaagaaacggttggatcagctagagaagaccaaaaccgagaagagaaagccagcagctgttcctgccaacaaaagaacccgagccagctacaacggtccaatgccaccagccaaagccgggcgtatcacaaacgcatacgtctcttccttcccgttcatcagatcaccctctcactctcctcaatacgcttcaccagcagcttacccatccccacctacaacagtctacagcaacagaagcccaccttatccatactctccggagatcatcccaggctcataccaaggctctcctatcggttacccagcgtacaacggttattgtaatggtccagttcctgctccagctcctccagtttaccacccacaccatcatcaacaccaccaattccaccatcagcaacattactactgaattagaagacagtgtgacaacaaaacaaggaagaagattggtaataaccaacaaatcactgatactgtgacaactgctactactctggtgttctctctctctgggtctattgtcttcctacgtcgtcgtttttgtctgtaatatctctttctcagcctaactctcttagtaacttagcttatatcctctggtgtgtttattattaatcgcatataaaacaaaactcaagcttttgtaatgtctaatattcagtcaacaaacttatatttctgtactctgttaatcgaatgacaaacttctcttcgtcaccaactatctccgatcaaatctaacatcggaggtcgttgctttgaagacatacccaccagttctctgttgaattgcatttcttcttcattgagcaaagtggtgattcaatttcggtacaagacacaaagccagtggtgagaaatttctctttaccaaccttgcacaccagatgttcgacgatatgtctctttgaaatcttaccgtttagttttcacgtgcgttttcagaattggtctcttttccttcaatggctttgatggttttgagaagaaagtgtctccgtttgccagattttatctccgtttttcgacctgcaccgcgttgcttctcctcgagattttccaacagtgaaagtggtaaagttacagtgactggtttgagtggttgtggtatagaaactgtggatgatgatgtttggcatgtttcatcatctttatcccaagcttggagacagttccaagcagacactgcaaaaaactctcccgttacaatacaaggagtaagagaaacaatactcgatgatgaagatcccgatcacgatgaaatcgataacatgagaattcgcggtgatcttttcttcaagctcgatcgaggttcaaaagaattcgaggaatacaactatgacttccaccgcaagaatcaacacaagaacgctaaaaaggagcaaaaccaagaagaagaaacaaagataaagaaggataacaagaaggaagttcgtgacgaatacaagaagagaaatgactctttcacaggtgagacggatc

SEQ ID NO: 451 - DNA, 77273 bp, Arabidopsis thaliana
gatccggcgttgtgagagagagcttattaaaaagcgtcttggagaacaagccttgttcgttttttactcttacggagaagaaggatgattgggtaaattccacatgatctcaggggtattttagacataagctaaaaaatacgagctattgcatgaaatgggcttttgttataaggcccatttattgtcattgttttggttttaacttggtcggtttgatgagattagatattgtgatgtataccgttgctaccagaaacctaccagtcaaagttggggttggcttgactttgtgtcattagctaaactccggggaggcttatttggacaaagaaggctctttgaaagtagaagtcgaatttaaagttgtttctaccaccaaatactctccatgaagatatcttcaacaccattagttttcattatcagctagctatttacttttggtcctttttatatattgtttattaagactttcgtttttaatttttttatgtgaagattttgagaaaaaaatggattgatttgaggtttattgcatcgttaaataaaagttaaggaagtaacaaaatcttctttttttgttcacctgtttgtcgaaaagatccacaccataaccaaaccatccggttatgttatttataaaacagagccgtcacaacaaaaacaatggctcaaaaaattcgatagacacaactgtatctaacgttttctttcttagactctaaacggattctcaaaatccgaaaaatttgaagaatattgattggaaccatatatggctcgcgtctctctggagtttgtttatggctaggactcgtagccatcaacaagtgagactaaagtaaatggatgacttgtgagactatttatgggttcacaagttagtataaaaattcggatatagacatagctgatatagataacatgcattaaattatgggttataactaaaccgttggttttattaaaactgtcacataaaaatttacaactcaagaaaccagtacatagaagttacatgcagagcgttaccatattttattgcatatcttcacaaagattatattaaactcttaaactctttcctttcttaggactgtaaaaaagcattttcaaaaaccagcaaagtctaagattgattgaaacgatggcttgtgtttctctggaatttgttgttggctacgactcgtaggtgcaaagtaggaatagttttggctcgtgaacagtttctccgcgactttacttccaacaccaaaggttaccctagttgccgccgggttgaggttgctcagcaaattctcttcccctaaacccaaccaaacaatataccttttagagtgggagaaactcaaaaatataattttagagaactatctgttgaaacccttttctttacctgcaaggaacgttcttttgctgttggtcgcataaataccaaaccctaccgcgataaagtcttgatcttgcgagagtatagtgaatggatgacctgccggaacgataaaaacttcgcctttacacactcgtgacacaactttgtgtacgttttcactcatatcttcttcttcttcttgtccttgtcctggccattgttgttgccctctttggaatttataaggagtagccatctcgaagcgggcacaaccattctccacaaacgttacaaatgtggtcttagagttaaaatgaggaaggaacaaggatccctgcatgtattacacaacccgatttttcgattagctagtaattaaaccaattgatacatcataccacaagatataagaatttttgaatgtaaacctgtgtcatgttagcccaagcggcggctatgtgaaggtcttgcagttgattataattcttaggatgtgcctcgtggaaatgaccaaagtcgttggagtagattggatctattgcaaagagattgaaaggagtccacaacgttcttaggtctttgtcttcctccttttcttttttggctttgtgtttgtttgaaggagatgtagcgtgctcagcaagttccttgatttggtctggagaaattcttcggataatcccttgaccaatttcttttgatctcgtaaccaatctccctagcaattcttccggcacctataccaaaaaaaataaattcttccaatccttagtatgtgcctgatttaataagaaattcataacatgttctagggaagaatagcatacgttgaaactggtagagaggacttctttggtaaacccattgaagtaggattgctgaaattgggatgcagcagggaagtaatcctgtgaaaattcaagattaaacaatgttagttattttctgaacattacgcaataactcggataactccgaatggtgacacaacgatgtcactatttttgttttttttggtcttaacaacatgcaaaaccggagtaataacacaacaacatcactaaaacaaacctctatgctcacgctataactatatactactgatcttggtataaaagatacataagaatgactaatagaacaataaatatgaaccttgtagttgccgggattgttgacagggacggtgatctgggcgaggcggagaggaaccgtctggttagtgttggtgataaagttggtgacaccagaagggattcttaccacatcacctttagttatgtggaacgattcttttgttttatccgtcacaaactcgatcactcctttaccttgtaggactataaaaacagcatcggcatccaaatggtgaggcacaaagaaagttgttggctccatctccaccaacgagaatctgtagttctcgattcctcggaagagagccggtgcatgttttgtgaacttaggcagcactctcacaaaaccttcctttgactggaaccaatcactgaaactccgcttcctgaagtggtatggatgattcgtcgactcttcctcccatccctcgccagagccaccaccaggacggcgacggggaccttcttgttctccttgctgtggtggctcgaactcgtcgatctccacacggaaggataagcagtggacgacagctatggagataaggagaagaagtgttatgattaatttgttggttattgccattttttcttgttgttttgttgatgtgtttgtttttgaggacaataatgggtggttttagtttatataggaaggagagcttgacatgcatggtgacgagtgttcgtacgcatcaaaaccacgagcagacgattatccaaacaaaaaattaaaaaaaattgagtaaacattcaatgagatctagaagttagtatagagactgatgatcagttcaatgatataaaatctaacaatctctaactaccttagaaaaaaaacttagcacctaaaagtaggatttgaaaaacatgtatgcttttaacatttaggatttagtaagcgaattggattcaaatcttgattctaattattatgcactatgtttacaagttaatgcaaaaaaaaaattgaatgaagatagacatgtagtagatatggataacacttaggtggacgtggtacgtacgataagtccgaagttagatcttgattctcactgatgttacgtgtctcatcactaagtttcgttctacttcaaatggcatgactaagacactcacaatttgttttgtcatgtttgaaaaatcttttatgtctagcatcatgtgatacttcttatgattcacacgcctttttgtcggactggcttggtctaaaacaattttttttttagtagtaaacaattccaaacgtatcgtatttactaattttccttcacactaaagaatttacctcaatttttagtatctcatcttcaatatagacctcaaaccaaactcgaaaaaggaggaaacttgtaataagccatatacggataaaaaccattctctcaaaaaaaaaaaactagaggtaacatttaattgtttattaccatccattcacgacgtagtataagaagcaagaccacttgtcataaattttctgattttttttctcaatttgtttttgcatggcttcatgtgaacgttcgttgcttcctattgatataatagaagaaatatgttgtaggattccagtcgaatatttgacgcaattcaaattgacgtgtaaacaatggtttgctctcttgaaggacaagagattcatctacaaatacttggatctttttcaagaacaagaacgtttcataagaatcgatcgtattgttcagatcatcgatccagtgaaaggagctcgttcatcttcaccaatcccgcaagagttcgacaatgtagctcaaatctccactatggtccattgtgatggattattgttatgtagatgcaagaacgaacgatcaagaagctacaaactcgcggtttggaacccgtttttgagtcgagtcaaatggatcgaaccaatggatttttattcgagtaatgatttctatggttttggatatgacaatgtatgtcgtgatgagtacaaacttctaaggattttcgatggagagattgaagacgagagtgaaatcgcggggtcttatgaaccgaagattcagatatatgatttcaaatctgattcatggagaattgttgatgatactcgtttggattggtctatagatccaccttgtaaaggtgtgtcggtgaaaggaaacatgtattggattgcacattggaataatagacccgaaattttcatccagagttttgatttctccacagagacattcaaaatcgtttgcaatcttccattcgaatgtaatgtattagacacggcagccttatcgagtttaagaggagataggctttctttgttacatcaaagtggagaaacaatgaagatcgaagtttggatcacaaacaaattgagcgatgaggtagtctcatggaccaagtacgtagacgtgactagccctgatctcccgacattacatactgatcaacatctcactcatccaagttatttcattgacaagaacgataatatcatggtatggtgtgagcaagagaccgaagaggaaaccgatgatgatgtttgcgttagcgtttgcatgattagtaaagatggaatagtgaagaaacaaattgatgcaggacgatgtgatttgtgtagtgataataggccttttgtttgcggttatgcatatgttccaagtctggttccagttccagaataaaacttcctagggttgctactggtttcaggattttttttttgtatgctctaagctttgttttgttgtatttctatcatataaagtttcaacttcaagtgttaactatgagacttcaaacaagggactttgttaattcaagtaatcactagtacaaaattgtattggttctaagacccttaccacagggtttccaaaacaaaatacatgttcttaaaaaaaacaaagaagacaaatagtttatagtagttttgaagtgggtttagataatcaaaccttttacctcttctgcctcttgtttccgctagcttttccaccacggaaaccgcctttgaaatcgtttgtcgtctctgctgtgttctgcttgctcaaacccttcctaccaccatgaccaaacttggaatcccgaaactccctcttcttgttgcccatcctcgaagtaggccttcctttacctcctgatcgatctccgggagacacacctggtcttttcttacctcctcctctctggaaactctttccactttcgaaatcaagttcaggctcaccagctttatcactaaacccactctgctgcctctgtttcctccacttcttcacagactcaatgttatccttcttctccttcgcacgttccttcatcttctgagactgtacttccttagccattctcttattatccctagccttcctcctctcttcagactcctcaatctgtttcttctcatgcaaaagccgagacttcactttctccatatgaacatccgatttcaccatctccgcatagtaattcgcaggcctgagaaaattcacacccatttcattgagtttaccaaacgcttctcttgtcccttcaagcgcttgagtgtagaacgccgtctctctcgcaaggtcatcgtttacatccacagctcctccctggtcaatctcaacagtaagcttatgagtccaatcaacatcttcaggccagctaatatcttgaagcttatcaagcaacccatctctgttgtatatcgcagtcttcgtaggctcagccaatttctcggtgatctcgttctctgtatccgaatccgaaagagactccgcttcggagtcagtagcatcatcctcatcaatcatgttcatctcatcatctgatactatatcctcttccaatgacatctactcaaaattcgataacaacaaacaaaattagattcagaatcaaaaaagttcagacttttatacctttgggtaaaaaaaaaacttggcgaatcacagaaactagggtttataagtcaccaacgcaaagagagattccataactggttccgttaccttctatatgacaataaagttcgatactttatctaaggacttaagattataaccatgaacaaaattagggtttatcattctattgacacaaaccctttgagaaggaatagaagaaaacttactgttgattacggagaagattgaagaagcttgtgcttgagtagggtttttgagagagagaagagagatagtgaacccgccggcgcaaggaagaagaagaagaaacttagttttaaaggcttcgactttgtaaaacccttttctgctttatactaaaccggaaatctcacaaaaccggatcataccgggttcaaattatcgctcaattggttcccgttactatttataaaccggatctaagacatgaaaacttgtgacaaattgattcatttcattttagtaaaggtcacatgatttgagatctaacatagtataagagtatcattcaacagaaaggaaaacaaaactttgagccaaggctccaaaactctaatctctacgaaacagataaaggactgtgagaatcaatcattgttttcgattgaaccaaactctgaatcttgagttttgcttctgccatatttttcttctcaagctcatctaccaacattttgcaagtgctatctctaggaaccattccttttcgtactgcttcctcaaagaacaagcaagcttcttcaactttcccgctcatacataaccctctaatgagaagaatatatgtcgaaacatcgatactaacatcgtttttcaccatgtgatgcaataatattccaagtagcttcattttcttcttatggcaacacatcttcaacaatggagcataagtctcaacgtttggactacatgattccccctcctcatcctccatccttttaagcaaacgtagagccatctcatctcgtgagtgatgaagcgcagcggaaatcatggtattgtagactaaaacatcacgacgaactccttgattcgtcatgtcctcaaatatctcagctgcatccttaaacctaccagtcttcgacaaaatatgtatcaatgagctataaaacttagcatcaggaacacaaccatcttctttcatcttctcatacactcctaaagcttcagctacttgtttagatttacccaaagaatgcatcacaatagtataagtcacaacattaggattacacccattctctcgcatctcttccaacatttcattaaccctcctaaaatccccttccttgcaataagcttccacaaagctagtgtaagtaacaacatcaggagtgaactcagtaaccttcatcaaatccatcatcgctctagcatcatcaaatttccgagctttacaaaaaccgtgaatcaaaatgttgaatgtccgcgcatccggcttgattgtatcgaaaagcttcagaaaaacttcatgagcatgctctatactattctctttcacaagtgcatccatcaaactgttcatagcaatagtatctgttttcacaccataactcttctccatctctaaaaaagcatcaacagctttattatatttccctgacttggccaatctcctcataaccttactcatcgtatcaagcgtaacaagcttagattcttcattcttgttcatctcattgactaattcccacatcaaatcaaaattcctacatttccccaacacatcaaccattgcattataagtatgacctgaatgcacataacctgtttgtgaatttgcccaaatgaaaaacccgtaagcttgattccaaccattactaaaccttcttagaacttgcaaaaccaaactctctgtaaccaccacatcgcatttactcaactctttaacaacatcctcatgagacgtgtccttcttattcaaaaagtcgcaaactttatcaatatcttccactggtttcttcactacatttccctctgagacttgttgacgactaaacttctggctctcgacccaattcgccaaagaagggataacaaaatcttcatcatctttggaaaccgaactcgatgaagaagaaggcttgtttgatagaaagtctttaatccaagacggtagctccggtgactctgcggcaacaatcggcgactcctctgcagtgttattcgttaccagaaacctccgttggaagattctccgaggtaaagtatacgaaacaagcttactaatcctaagcttagtgagcattttgttccgtttgaatctaaacgcagacttctctcctgtttttccgatcaaagttcgaatcttttagacctaaagcttgctgctttgtgccgggtcgggtcggttcgttaattggtacaaccccggttcgatttaatttaatttagcgtttagatttttggtttaccccacatctgacaagtgacgatttttactgacacgtgtacaagtcattctcttcgtcttcttcctctaaaaaccctaattttaaggaacctcgtgtggtcatcgtcttcgtacctttctgctttctacgccgtcaaaatctaactgctcgacagtgaccatgcaaagctcaatgacaatggaactacgaccatcaggtgattccggttcatctgacgtcgatgctgagatcagcgatggcttttcaccgctcgatacttctcacagagacgtcgctgatgaaggtacacgatttcaatggtcccttgtttctttcctttctcaccattttgattcaaaagttttgatttttacaaaaatgctctgaaattttttgagtcaggttcgttgctgagaagagcagagatgtatcaagactacatgaagcaagtaccaatcccgacgaatcgtggctcgttgattccgttcacaagctgggttggattaagcatttcaatgaaacagctttatggtcagcctctacattacctcacgaatgttctcttacaacgatgggatcaatcacgattcggtactgattctgaagaacagaggttggattctatcattcatcctactaaagctgaagctactatctggcttgttgaagagattcatcgactcactccttctcatcttcacatggctcttctttggagatctgatcctatgtatcactctttcattgacccaatctttcctgagaaatgaacaagttcttgaattgtgatgaaccatccttttttgtatctacttttgcttttagaaaccttgttcaagcattgaagcttatatgtataattgcagggtcttattcaataaaatgtgaatcttcctttccatcttttacttgtgttttctgtaatcaccagaagtcactgcaagaacactttccttgacgaatgaaatgaaaccggttgttgtctcttagaacgatttctctgttgtatacttcggatgcaaatttgtgcctttgtttgagctaatgagcccaaagaccattgcaagtttctcgctgtggctgctaagcataaagatcttctcatctacatccatcagaagttcaaaacattaccaagatcaggaacatgacctaagttgcttgctctatggtgagcattgctccaatttttggcatttcagggtgagactcatctcctgaagtgaactcatgggtcttacctcgaatctgtattaaacccttagcgtttgctcgctcagcgtttcctgccatagccattgctcctatagccgctgtccaagctgagacatctctgtttgtcaaactattgaaaatcgacattgcttaactctgcaataagctttcatctctcacatgtaataagcaagctttacactgtagcttaacacacaatcattcacaaaatggtatatggcacagagtataatcatattgcatcacactcagttaatagacacagttagataagttacctccgcagaaccatgaccagttaaataagaggaatgctctcataaggagaagactccagctattaagatgtcagatgttaagctgtagatgctgagaccatcatgtaaatgcggaaaaaaattgatgtttttattcactgataccttttaattccgttcataaaaatcattagactagatactactactacacatacatggaaattaagtgagaatcattgttgatgttcagttaaattcagaccttccaatgcctttctgaaatctcctcctccgctaacaatgcccgagagagattgttcatacactagtattcctgagtcagacgtgacaatgattcattcagctgcacaattggacagtacaggcaacggcttgtgcccagcatttgagtctagctttcacatcatccggattatcacctgtaacaacaacaaactgataacatttagacttcatatatcacagtccattccaatcactgaaattcttgtttaacactagcactcagcaacaaaccaattacataattgaaatcagagtagatcaaacttagatcacctaatcaatcgacggaaaatatgagatatttacacacgacgggactagagatcttccaattggcaattggagtgatggtgtatgcttatcgtctaaatttttttggctcattgaatagcaaagctctaaagcaggtaaagtcttgcagagcgcagggatctcgtcgtagttgaaaccaaagcctagatctaaacaacctttgagaacttcgagatcgtcatccgtcaaactctaggatctcgtcagatcgtccttttgatcatccaccgaggaagctgcagtctcaacataatcttcctattattcttttagttctgtttctgctatcaccagaagtcaccgcaagaacacttcccttgacggatgtaatgaaaccggttattgtctcttagaatgatttctctgttgtatactttggatgcaaattttgcaaatgaatgacaatcagagcatactcttaggttcttgactattcggattgttgtgcctttgtttgagctaatgagtccataggccattgcaagtttctcgctgtgtctgctaagcataaagatcttctctttctcatcaacatccataagaacattactaagatcaggtacatggcctaagtgactcgctctttgactaacttcatctagcattgcttctatgtttggcatttcagggtgtgactcgtcccctgatgtgaactcatgggttttacctcgaatctgtattgaactagtccctggcggtttacgtaaccctttctccttcatactcagtctcactttcgccatgtcgttccatcttccagctgatgcataaacatttgacagaagaacataactcccagttctctctggagccaagacttgtatcttctcggctgcataagctgccatctccacatttccctgaacacgacaagcagctaaaagagagttccaaatcacatcgtttggctccataggcatgtcctcaatgagttgcacagcttcctctaacaatcctgctcgaccaagcagatcaaccatacatccatagtgcacatcttctggagaaactccatgaagtttcaacatcgaatagaaaatttccttaccctgttggaccaatccaccatggctgcaagctgtcagtgctccaacaaacgcaaccccatctggtttcaacccttgttcaatcatatcatcgaaaagctcaattgctcgctcagcgtttcctgccatagccattgctcctatagccgctgtccaagctgagacatctctgtttgtcaaactattaaaaattgacatagcactttcaggatccccacacctagaaaacatatctactaaggttgtaccaagtctgacatcaagctgaattccgttcttctcaatgtagtaatatatccatttagctagatcaagagctcccaagtgcccacaagcagatgcaatactcatcattgtcacaccatccgcattgacaccctcttggctttgcatagaacagaaaacttcaatcgcttcctcaaacaaacttccttgcaccagaccgctgataatcgtattccaagaaacaatgtttttctcaggcatggtttcaaatgtttcccaggctgcatccacctcaccattctctacatagccagcaacaatcgagttccacgtcaccactgtcttgttcgacatccgatcaaagatcctaaacgcagtatcttgcctatgacatttcatgtacatatcaatcaacgcattgcatatattatcccaactctcaaacccattcctcaatacatacccatgacagctctttccccacaagatatttctcaattgtgaacaagatgaaatcgcactcaacatcgaaatcctatcaggtctaacaccagagtccatcatcagattaaaaacacctaaagcctccctcgttaacccttgccgtacataatttgatgccattgcattgcacaaatccaaattactagcaccatattcatcaaaaagccgttttgctacatcaatggcattgcatttcatgtacatatcaaccagtgcactaaccataagatcattaacttcaataccagaattacggataaaagcataaaccttctcgcccgtctcaagatcctctagcttagcacaagccgatatcacacacaccattgtaaccgaattaggagtcacctcttcatctctcaccatccgaaaaaacaaatcaacagcgtctttagcaaaatcccgcctcgcgtaaccacaaatcatactcgtccaagaaacaacatttctctcagacatttcatcaaacaccttacgtgcactatcaagctctccacactcggcgtaaaaatgaaccagcgagttctgcacaaacaaatctttcgcataacccatcttcacaatcaacccatgaatctgaatcccattacctttcgctctgcttttcgcacacgcactcaatccaaaaggaaacgtgtacttatctggagaaatcccagaattcatcattcgaagaaataacaatatagcttcgttgcataacccagaagatgcatatcctcgaatcaaagaattgtacatgaaacaagttccatacgattcactgttctcaaacacttctttagcaaagctcaaactttcacgagtacccaattcacaactccgtgctacaagcttagttatagtggagacatcattatcaagtccttgcttcgtgagcgaacgatgaaacattttgagttcgtctatggttttgcaattctttaacgacgatggcgtggctttggtacacttgctctggtttagaagagatggtttcgtagtcgtcgtggtggctaacaccattggagagagatgaagaacattacccaacatcgccattgttggctcttactgattcagtatcttaattataaaagttcgtcactttataatcaaaaaattcaaaaaaaaaaaaaaaaaatttggttacaaaaaaaaaagctctacattgttcataaacagatacttaagaaaaaaaataacagaggaccattactggatttgaaccaaactcggaacataactgataataattgaatgccattttctattactgttaagtagaactctttgtatgtttaaaggttgtacgaaagggatttctatatatccatcgtcctctccgataatgtataccatgttcttgctgatcttatcatcattaacaatttaacattacaacacaagacgactttcttctcctcctcgaaatagagacttgagaagattcgaacacaattaaagcgagtgtctaagtgcagtctccacaacaatgtagcatcagtatcaatgttattggttatccatatctccatctttggtgtagcacggctccaatataatactgagagttgttcttctctaacaaatgataaaaccatgtgaccaacattttcgaaatgcggaaggcatagacgtttaaatctctctgttttaaagtcaaacataagtaaagatctagaattgtcttcaacatcatcaacaagccagtaaatatttcccttcaaagacacgcgacagcaacgtcctaaatagttgtgattgaccaaagagtcgtgattgacgtcatcaataaccctccatttatcagagataaactcgtatatttcaaaccctctttgacgcggtgatgatttgtaatcgttacttttccacctccacaagattttgtagctacggcaagattcgttgttttggatatatcctagagcaaagctggagtagactctcccgtaatcaactttgaattggatccaatgggtttcccccaaacacggattccaaaccacgtgtctattgtccttggtggtgcataacaacaaaccatcgcagtgaagaacttggactatatcaacttgttctgaattagaatgggaatcctttaagccaagtgcatctttaaactctatagatggaggagtaacgttgagattgacgcttatttctttcaacatgagaactagagactcctttggtgctttacgaaagtgcttctctgtgaatcttcggtctttcaataaagcgttccattgtctacaagtcgatcgtaatcgtttgagagatgtggctggaaccctagagagtatttcctctaccaaatccaaaggaagattcgacatcatcaatggttccctatttgtgatctgatctcccaacgaagaagaaagactccgtcgtccctgtaaacagagagattagggttttgttttgtttttctcacgtttgccctaaaccattatttgtttttataaaacagaggttttaggccttagcccacaactcttgggccgattgaacttcacgtatttcacgctatgtagaaaggaaccataaataaggtaccaaaacctatccataattaaattattcacgtattaaataaccattttttaaaaatttgtgtattaaacaacatttttaccactaaaaactcatcatcgaatcaaattaatttttatttttggttagaaaaaaaaactctacattgttcaaaaacagatacttaattaagaaaaaaataagagatgaccattatagatttgaaccaaacgcggaacataattgaaaatagatgaataccattttttattacggtcaagtagaacccaatgtatgtttatagggagtaggaaaaggatttctgtgtaatatccattgtcctctccgataatgtatactatgttcttgctggtcgcatcatcattaacattacaacacaagacaactttcttctccttgtcgatatatagacttgagaagactcgaacacaattacgtgagaagacttgagtgtgtaagtgcagtctccacaacaatgtagcatcagtatcaatgttattagttatccaaatctccatctttgatgtattacgagtccaatgtaatattgagagttgttcttctctaacaactgatagatccatattaccaacatcttggaaatgcggaaggcgtagacgtttgaatctctctgttgtaaaatcaaacattagtacaactctagaattttcttcaacatcataagcaagcaagtaagtatttcccttcaaagacactacttcctataacgaattcgtgattgacgtcattaagaactctccatgacgaatcagagataaactcgtatatttcaaaccccaaatctctttggcgcggtgatgatttgtcatcgtaactataccaactccgcaagattttatagctacggcgagattcgttgttttggatataccctagacaaaacttggagacgtatctccggtaatcaactttgagttggatccacttggtttcccccaaacacggattccaaaccacgagtcttttgtccttgatggtgcataacaacaaaccatcactacttgttgagattgactttcaccgggcaaaccctatgctccttcaacatgagaaccatagactcctttggtgctttactaaagtgcttctcagtgaatctttcatctttgaatatagcgttccattgtgtgcaagtagatcgtaactttttcacagatgtcgccggaaccctagaaagtatttcctcgaccaaatctggcggaagatcgggcatcgtcatattttctctttgtgatcggatctcccaaggaaaaagaaatcggctactcggtctctcaaaataaaaattagggtttattctttctcccacatcttataaggattctactaaatttacttcccttttttttgtgtggataatttacttaaaaagtatttaaaaattacatctatgtatccagagaattggaaagaaataatcactctgatttacaaaaaaaaacaaagattattttaaatataatctaaaatataaccagtcctatatgactgatctatgtatatgtctctcaataatataataggatatttattttaaattttatattaaattggaagatttataattaatatcttttaaatcatatcaaaatatattttcaatatattcaattttattaattagatatatttgtttatataatattgatttagtattattgtaattttaactaataataattaaaataaaattcatatataatttaaactcatgaataataaacttgttagatagctagttttattttatgatttgtaataaaataaaataaaaattatagtatagaaactatataattaaccttttaaactacttaagtttggaagtttagatatatatgttaacataatgttaaaatctaattcgttgaaatattttacacgtgtcaaaatcttattaagatactcagattgaaaattatactttatataataagatatataaaacatgttacgtacgaccaaaaattatcgcaaacaacaattgcttgaattttgatgctgcgggagattcgcctgagagaactttagcaatggttctgatggtgttttagagtagtccgccaacacaaaatctttgaggtttctttctttgccttctgcactaatgcataaaaaaaaccaccaaaattactcaaaaatccattcatgttcagaccatcatagagagaaagctagttacttccgttcacaaggtagaaaacagaggacaaaataaccctaatttggttaaagtttatattgtatcttaattacacagtcgcaaggggacccttggaagtgaacaagaaccatgctggaatatcatagtcttccttcctcaagacgatcggcatatggttaagaagcaatgagtccttagtttaactatgcaagtaagaaagagtgtcttgttggtttaatgtctagctaagcaaagttgctaggagttgttgttgacgtctaaagtgatgtctagctagtactagtagttgctaagtctagagtgcaagtaattgagtggaatcaagtagtataagtatgtgttgtgttgtaagaaccatctcttgatccaataaacaaaatgtagacaattaaaagacttctctcttctctcttagttacaaaacgttgtgttcaatctaagaactaaaacaagaacaagagactaaagagagattgatgttctctttgtgtttctgttaaaacagagagacaagagataatagcttaataaggcgctggcctcaaagaagcatgaagaggtcagatgttcaacaatccaaacaaaaaatcgaatcataaacatatccaaaaaaaaaaaaaaaaccattcattaaattattcaaacgacattgtcttcaaaaacaaaaactaagaaagaaaaaaaaggactagtttctttcgtttcttttacgaatctaccttactggatttgaaacaaactcggaacataattgaaaatcaatgagtaccatcttgtagtatggataagttgaagcctttctatttttatagattttacgaaagggatttctatgtaatgtccatcgtcctctccgataatgtataccactttcttgctggtctcaccatctttaacattacaatacaagacgactttcttctcctcgtcgaaatatagacttgagaagattcgaacacaattacattgactgtctaagtgcactcttttccacaacaatgtagcttcagtatcaaagttattggttatccatatctccatctttgatgtaatacggctccaattcaatactgagagttgttcttctctaacagatagatccatttcaccaacatcttggaaatgcggaaggcatagacgtttcaatcgctctgttgtaaaatcaaacattagtaaaaatttagaattttcttcaatatcataagcaagcatataagtatttcccttcaaagacacgccacttcttattatggagttgtgattgacgacggagtcgtgattgacgtcatcaagaaccctccatgatgaatcagagctaaactcgtatatttcaaaccccaaacctctttgtggcggtgatgaattgtaatcgtaactataccaagtccacaagattttatagctacggcaggattcgttgttttggatataccctagagcaaatatggagacgtatctccggtaatcaactttgagttggatccatttggtttcccccaaacacggattccaaaccacgagtctatcgtcattggtggtgcataacaacaaaccatcgcagtgaaaaacttcggttatcacgacttgttctgaattagaatgggaataaccaagtgcacctttaaagtctacagatggaggagtaactttgagattgacgcttattggaaaaaccctatactctttcaacatgagaactctagactcctttggtgctttatgaaagtgtttctcggtgaatcttcggtctttcaataaagcgttccatcgtctacaagtcgatcgtagtcgtttgagagatgtggcgggaaccctagagagtattttctctaccaaatctaaaggaagatccgacatcatgaatggttctctatttgtgatctgatctcccaacgaaaagaaagactcggtctcgtccctgtaaacagagagattagggttttgttttgtttttttcttttcacgttagcccctaaatcaatatttattttgataaacaagaggttttaggccgaagcccattgggccgattacccttcctatatttcaactcttcctcgactccataaaccttttttgttttttaactttttttagttaaagtgtattcagttgaaaaacatagtacaaaggctatgacttttctaggtggtttaattagaaaaagtagtttgagagaaagaagcttaaacaaacatatgcttaagaagatatagggagtagctctcattaaatgactaagaccgactcggcctctacaaacccaacgtgcatgaccactaatcgaaaactcattggtgatgtgatggctccaatggtgtttggagtattccaacaacacaagatcttcccactcattctctctttgacttgtgccttaatgcattaacacttgaaatcagattttttttaatctgttatggttatcaagtttgaaactcataaatccattcttgttcagaccaccataagacttccccactgtttgatcagacaatgagtcaatgacaagtttgcgaaagagaaaaagctagttgcttctgtcgcaaggtacaaaacagagggaaaaggcccacatttccttggaagtaaacataaccatgccggaatgtcaataactccttaaggctgcttcattgcattacacaacagatgtatatatccccgaatcaaagaaaagtacatgaaataagagctatatatatgattcacctgtttctttcgagaaatcaaacacctagcgtggctttgataatacttgctcaagttggctaacttaaacggtccaaattttcagcccattcttgaggaccaagtctcacctaggtgtaccaaacattaagtgcgtgatatctctccatactagccatgaatgagaaattgagaagtgtcgtttagcagcctttgcggttgagtgagagagaagcgaaatccacaaaagagaaagtaacaaataaaaggtgatataagaaaaggtaaaataatagatcaaatcttaaaactaatcaagcgatagtgtttgcaaaaacaaaaacgaagagagaaaaaaaaaacagagaactcggtacaaaaattacgtccttgcttgcattgagtagtttcattcttttataatgcatccaccttcctcgatttgaaccaaacttggaacataattgaaaataattggatatccccacacttggtaactagattctactaaagggatttctgtgtagtatccattgtcctctccaataatgtatactttcttgttgcttttctcaaaattttcattataacacacagccactttcttttcttcgtcgactagataactcgtcaaatacggacaataatcaccgcgaatgggtatatccacggtaaaagatttgctccacatcagtacatcttcaataatattggtcacccacatctccattatctttgatgtactatcactttgacttaacagtgagagttgttttcctccaacaactgatagagccatcttagacacatcctgagatggtggaagacacagacgcgtaaatctttctgttgtaaaatcgaagcaaagcaagagtccatatttgtcttttttatcagacgcaagccaataagtatttcccttgaaagaaacgccaatatgtgatgctatgtggcaatcaagagcgacgagatcaagaaccctccatgaatcagagctaaactcatagatttcaaactcatcaactcggccagttggtgaattgtgacgatcccaacacctcaagattttgtagatacggccatatttgtttttctcgtatcctagagcaaacctagagtaaatgtttttgggccatcggatccaccttgtttcccccaaacacgggttccaaaccactattctatagtccatagttgtacatagcaataaaccatcacagtgacaagcttcatgtatatcgacttcttctgaataaggaggataattctttaggttaagtgcacctttaaactctatagacggagcagaaacgctgagattggcgatcattggacaaacgctatactccttcaacatgagaaccagtgactcctttggtgctttaagaaattgcttcttggtaaatcccgggtttttaaataaagcgttccatagtttgcaagtagatcgtaatcgtttgagagatgtggctggaaccctagagagtatttcctctaccaaatccaaagaaagatcggacatcatcattgcttctctttgtttgtgatctaatctcccaaagaagaagaaaggtctttgactctttgtgaatgctattaattcttcttcttcttttgcttatggttacataagtatatataagaaaatcttaaaagaagataaacaccaaaaaataaatcctaatcctaacaagatttagtaatatcatgtcaagctaaattcataaaaccaaaaccataaatcatagccgatcatgagcccatcagtaaacagaaattagggctttgggtgtttttttgcacctaaaccaatttttgaccataaaccggaagttttagaccgaaccccaaagttcttgggccaattaacatatttcaactcctcggcaccagacaaggtatccctattatatagcctctccttatcttggattattattacgcagtttgttgatgagcgtccatgtcatagcaaagaagtcgagtataagaaaagcttatttattcctcatagcttacaaaattaatacagcctataatcacttttatatattcgtacagcacaataataaaaatatgcttactataacatcaaattatcgtttaaactccattattatcatacgctaattacacagttgtctctaacatagtttaccattatttatagtttcaacatattagtagattacagaactacgcttgcgttattgtacattttaaactccttcctgacatcacaagcatagaaattcaccgttgacaagtctattgcccgaatttgggttttgatgctgcagaaggttcgtcggagagaactttagcaatggctctgatggtgtttggagtagtccgacaacatcctccaaacagagaagctcctgcatctctccatttactcacgtacgacacaaaatcctcctctgactctccctctgacttctgcattaacacattaaaaaatctccaaaaatcagaattgtaatttgtgttttactagaatttgatataacgaacactcacaatccatttcttgttcagaccgtcgtagacttccccgctgtttgggtatacaacgattggtttgcgtgtcatctggtaaaagaaatgaccagttgcttcagccgcaaggcacaaaacagagtaaaagaaaaaaccctaattccatcattgtttatacatacctggcgcaaggagataattaaagcatgaatgtatcttggtgcagtacaattgattccaatggccaccacgttcttgcatgaatctgccactttcgcacattctacaactgaatctcctcgtggcacactgactccgtccttggaagtgaacgagaaccatgccggaatatcgatatcttcctcctcaagaagatccgcataagcctatgattcgtgaaaaacgatatatttatacagtaacatcatgtaatattatcacaactaccaaaatgcaaccactactagactaacagtacttaatagttagttaagaactttatttggttagactgtttttttgtcaaccacgtcaatgcttgaactagggatataatacaacgatggactaacgaaagctactagaatagaatacatgttcagttaaaaagaaaattttagatacctctgcttcgagcttatttggaatagtctcgaatgctattaggtcggctccagattttgctaagatttgaactcttcttctatggaaatcctttaatgtctccttactcacagaatctccatatatcccactgcagaacaattatgaggaataaaattaaatttctttaactgaccaaaacttttgttatgactatgatttttccaattttatacacaaatgtaacagacaaaaatgactaggatcgatcaaagaacctgtattcggagccgtcagcgagataagctccatagctaccaacggaagctgcgacaagaattggtctccgggaagcttttccagcgtaggcgaaatcccatgaacccttggtgcatctgttgtagaaaatctcacgtgcctcgtacgtgatttcaacgctccttctaagtaaattttctgcttctcccaccgatagaccttttgccacaaaaccttgtatcgtcgcctgtataataaattaatttgtttaagtaccttgatgcattttgaaactaatttccttttttttaccacatttacttcaagcaaacaaaccaaatcaaactatttagttaatataggccaaagtacctggtaagatgctgttatgatgatatttgctccagattcaaggtaatccaagtgcacctattagaagaaaataatataattgtctgttacaaacatatttctgatatgttattatatatttctgattgtagttgttacttattagcagaaaaaggtaataaaaatctctgggaacaatggaaaagaaaagtggaaaataattactttgatttctatagaaattaactagtcaaactaaattcaagaaaaatacatatatatatatataggttaaatttccttaaaagtgtcgtaaatggtgtagcctgtaatttgttgttattttttgtttcctttgttttctttgaattcttcttttgtactctacagtctacacgtaagacccatcgtgaatcaattaaaagtggtactagaaaaatggagtgataatgtagtaaacgtcgtggtatgacgtacacgttagcggctcagctttactagtttactacgtggcatattactgtttttatctacatttatgcactaatataaacgggtcgagtagctctttttctacttactcttgtatgcatatgagtttcatccaatacatagaacttaagaaaactaaaaaaatgaaaaatgaactcgttgcaaagaaataaaaccatgtttataaagttaatggaatcaagaatccaactaaaatatgtttggacaaatacgttattttgatgctatttaatcgagtccatcatccaataactagatcattctaaattttgcttaacatgagaattaatttcatagaagaaataaatatttatcaacgtacgactaaaaccatcttagaataaaagctataaatttctacatatgtgtgacctttgtaacaaggtgaggagaagtaataaggcacttagcactccaaagtggatcattgatatcagctccgtggcgctgtagctccgtcgcaaaccctccatccaccaccgcataaccaccgcacttctccaaaaaatctgtcatcaacgacgacgtttcttctttcacgaaagatcccatattgatttgagtataaacaaagtgtgtacgtctctaatatcgagacaaatactatatagatgatgagatattatctttgatcgtgagattcatatggttggttttccacgacatcactaagctttatatataggaggagatacgggaaatgtgaaaaagacatatatgtcccttatggtaatgttggtaaataactaaatatagctgtggctcgaccaataaattatgtaccgacctataagctttgtaacgaggaaaacgagcgaattatcttgaagagaaattaaaatagtactaaccaaaagtggataattgtgagattgtgttaacaaaaagtaagtggatatttaatgagtaaactttggatcagacagcaacgttacatgtgattcctttgcctgccgtgtgggaaatcagctatccaactatgtgccacgttataagtagtttatatacacctcaatattacgtctctcccaatttgcgtaaatgtaaatagacttatttctctgttaaaatacttggtatcttatttattaggtttattgaatgcgttattttacaatattttatctttctaattagtcatctaattatgtgggtttgttttttgatagggaaatgagtgaacttcttttcaagcatgtgtgatccgggcatatccgactaaattccagagtgatcaaaacggccaaaacatcttgtccaccaaattttcatttggactttcgacctaattccaattgaccacgtgcatcttcggatccagaaataaaatatgaatataagtcatgcttcttatgttataattctagatgtgtggtattgagactaatttgtaacatgtttattgcattcaatctaacatcttccattctattcaatgtaaatggttggatttgtaagtgaaagatgcatcttttcctgagtcctgacacttgacatgtgcaattgtgtctataaatgaggatcatgaaatgtagggaagagttcaggggaataagcaagttatgaaaaacacagaggaaccgcgaagaaaggtcggtcaaacattcaaaccaaccaaaaagatccaaaaaatgcaatggactacatttaagagacgtgaaaaccggggttgagaaagcggaggcggacgaagattcacccaactagtgacatctagtgatatatctcctctcttaatactccctttctctgacttatgattgtctttaaaaacagtattaagtgtaaccttaatcttctttctctcataactactctttcaatttatgtgactaaacaagtcatagccttgtcatttttcatgcattctaatagtaaaccctttacaaatagaaagaaagatgcatcttactaaatagagaaaatttgcacacactatgctatgtatattaaaacagaggccttaacttatcacagtcgtttcaaaaaatatgttatatgattttccaatgtatattggaccaaacgacaatattcatattcacagtgacagaaataataataatgtgtatatatattaataatgaaaatctttttttatcttgacagattaaagaagaagaaaaaaaacagagcattgctccaaaattcaatgtgaaggtaagtaagtaaataaataaaggtaaaaagagagagggggtaaaattagggaccacgaccagagacaaagcagaaacagccaggtctctgatcttccgggatcattccaccgcctttggtggtgtcgacagcttcaagcaaactcacaacttcctccatctctggtcgtttctccggattagcttcccaacatctcttcattatggtcgccaatgctgttggacaacatcttggaatatccggtctcagattctgtttaagacaacaaaccaacaatctcagattctctcattgtacagtagtgaccaaaataaacgaaaccggaaaaaccaaaccgaaattgagccaaaatttggattctgttctgtttaaccgatcagactaaaaactagcctaaaccggattaactaaccctatgaaattccaaaagccaagagagacaaacttaagtttcacaaattttacatatttcataactttgaaagattcagaacttgggattatattataagttccactgacctgacgaacaacagcagaagaaacatcagcaaagctgagatcaggataaggcatatcacaacaataaatctcccacaagcatatcccaaagctgtaaacatcacatcttctgttgtatggcttgccatcaagaacctaatcagattactataaattagattttgaaaccaaacaaagaaaccgcattttgtcttaaatgttatctctgtttttgtgtacctctggagccatgtatccaagagttccagtttctccagtcatgtcttttggattctgagcttcaactctagcaaccccaaaatcagcaatctttagattcctctgataatccaaaagcatattctctgttttcacatcgcgatgaacaatcctctctgaatgcaaataacttaacctacatagatgaaatcaccatcatcatgattgtatcataagtttctttcttggagattaaagaatgagttttgtaaattaccctcgggagagatcgagagcgagttgaaccacgactttaaaagcgagtttctttcgcctgtttcggaacaaatactgcttaagagttcctccagggatatactccacaacgacacaacaagctcgttgaggcaacgagttctccgtctcagctgatgaaggtatcttcaaattcgctgttcccattgatgctcccacaaactggttttatccatagagtctcattcattacatacacacacacaaagatagaccactaaagaggttattattattacccttgtgacattaggatggtcaagcttatgccaaaccgcaacttcttgacgaaatgaagcacgtagagcagatgtctcagccgttgtcgcgtaaccatcttctccccaatcaagtactttcactaccattaacataaaaccaacactaagcattaaaacatgagacattcacaaacaaaaagtttcaatatttgtgtatctcttaccagcaacatcttgaccatcatatatgcctttgtagacaataccataagcaccacgagcaatgacattcctcatctctaatttagccaattcaatttcccattcctccttaggcttagggtgcttctcaatgcttcttgaccaaaccctactcagatgtttctctagctggatatccaaattcttcaaatcaatcttatcagctcggaaaatcatgtctttcttgctattgtttccatcagctcctctgtttctgaggttgttttccggtgaagcttttgtctcgtttcttgtttccatctctctttttttcttttttttcttgtaaaacaataatctcaaagacacacaaaactcaaataaccctaaaattcaatcagacttaattcaagcaatcaccaaacacaacacagaactaatcaaaattttcatcattatcaaatttgtttttagagaatttagcaaaatatgttaaataatgattttaaaaatttggtgcagagaacctgattttttttttattctttgtaagaatttatttaaactattacaccaaccccaagttcttgttcctgcacacgttcttctgacattccagattctaatacaacatgaatattaaaaataaaattttcaaaatagcgttgaaattcaataatgttttatataaataagagaaaatcgaattcacaaaaagccaataattcaacaagaaaattttctttacaaaaagtaaaccctaagacaccgactcgtcgtccactattatcattgacccaagataaattataaacacacaaaaacaccaataatttttttctatattatcgtaaacaagatatacttaaatttcagaaatcaactagaccatgcaaaaaaaacacaaaaccctcaaggaaataaaatctgagaatttggtagaagtttttttcatccaaaaaaatatatttggtagaagaagagatttgaaagggtttaggtgattccttctccgaaaaacaacctcagaataaaaaacagaggatcaaggagagatatgagaaaaaaagaatctaaagagagcgaagaaaaatgagtttaggaaacgaagaaggagaggctgagagtgaatggcggaagaagaaaaaaagaatggcttaatttgagtaaggctggttttaaggagacgtatttgctatttgtttctctactcagagaaaaaatttgacctatttaggcaaaaatatacagaatcaatgtaccaatagatttattcttttgttataatgacaatttgtttaagccgttgaaatttgtattggtttatttttagtccaaataagtctgttagtgggatggtaaaatatattaccaaagatcttgatgttaagaaatttgttctttccttgttcaaaatgatattttatatagggtgcaagaatgacaaatctttgtttttagaaatgtttgaaccaaaaatttgcactacaataaataattttcttttgcatttagtcgttaacgggtgtcctttcgcatgtttgggtggctgtgtccattattccccactgatataatgttgcatttgatatatttgtccttacagtcctaagatatgatgtggtttttaaagaaactcagatttttaagcatttctaaattttgtaagattaattttcttttttaatactatttaatgtttttgaaatagatcatttctgaattttgttagattaaagactattttatcaaaacaaagaataacttaggcaggttcatatttgcatcttgtatgctaatttacataaagaagtataaataagtaaaaagaagaagaagaagtgaaagagtacgatacgtacaaggttaggtaccttctaataatattcgctggttgtgttttgtcgtgaaacgaaagagataaggtttgacatctttgtgtatctatttgcaaatttacaactttgtcgcctcttccatacttatattattattattatgctttagctttacagatcagatttcaaattaaaacaacaaaaatacgcaatgggtgtccttttgaaattttttattcgtaatcacgatgatgtttttactaataataataatatagttatatcggatgtacatgaatttccaacttaataatcagttccccttttgcaaaaaaaataataatcagttcctccaatttaaagttatgtattttagaattttacatatcaataaatgttaaattagttttatgagtttctttagtgatactgttataagcttgattttgtttctttcaacttctcctaatttgtttactctagtttagacttttgccttttggtaagattgtgtaaatgttttggtttatatttcagcaacatattgtttgtccacacgtctgtaactaaaatggttttaacgttggagtttatacgttaacaatctagaggtccatgtaatgttcacttcaaagcccaactatggaatgggctttacttgtagtggaatatcaaaactgcaaaaataaaattctctggattattgagattatcaaaactatacattctttaaatttccacacttaatcaagaggtccatgtaatgattattgagatttgagatgatatgctttttccaaaagagaaagataaaactaagctttgtttgttaagtatacttcgcaagtacagaagtcaaaagatgcaagacttccattcaattgtttagtgtttaccacagaaagaaaagcagagagagagttgcaaaacccaaggtcaacaaaaatcgtcaatgataatttaagcaatgcataacaaagaaatgaaaataactgcctacaaattaaatgtgaagagaaatagacagacaaataatgtatatacaataagatgaaagaaatgcatttgtcgtctcatacttgtcccaagtccgattattatggttcaaaaaaagccaaataacaagagtgcaaatttattttgaaaatccaaacaatcgtcgtttgttctgtcttttgttttttaacgtttgttctgagttgtacactttctccttgaaatattcggtgttgacatccaacaaaatgcttagattcgaatatgaattatatatggagatggagaataattataaactaaaactatcctaccaaataaacattttggatcaattagttatcccaaacattttatcccatgggatcacacattttagatttctacatcattccctaaaaaatgtttaacaaattcaaaaattagaaagcaacaatcatttaaagtgcttgtatataatttagttgattttactaaagtcgtgcaattgattctcattacaaacaagttataagctagtcttgattttgacacaaagagaaagtgattattcagaaaaaatatatattatgtgggtagatgtgactgaaggatcctacattggatgattaatttacataaaatctagatataactctatggacttaaaaataataatggattctatgtataatggatgacaaagaacaaaaacgaaggagattctatagtacaaatacaaaggccaaatgatgactttggtaagatggcttttcttgtggccatttgtagtaagcaagatgatttttaatttacttaattaaaaatgtaacagcaattattttcttaatattccgttaataaacaacctgacatgcacaaacagttcatggaacagcttttgaatatcccaatacattaacacctgatttagtacattatacactgaaaattatatttaaagactgaccaaatatataatacatagatatcaatcaaaatgttatagaagatgcttctttttcttattttttgaagaaaaaaaaatgcattgttgtatgttttttatgtcacgtgatgtgtcatgtggcacgtgacagtgaagtagcagcatgaatgaagaatggtcgacattatgattatcgcatggagccacttttgccagaagaaatgttttcagctctatccatatcaatactcgaagacatatttactctatactttaataagtttttatttgttacaatcacttgactagtagttttagttaagttaagctccaaaaacttcttgaaaagctccggtagaaggatcatgccttcggtttcttaagccgtgatttgatggctaattgtatacatatcgtcacacataattcgtattttctttagccgaaaatcccccgcaacattactagaaaataaaatgtttaagtagatataatttcatttttcatcattcaaaagagaattttcgttccatatttccctttctatatctcacgattcacgtaccgatgaaaaggaccgttgctacgaacatttggagcattcgctttatggcgtcacgggaaatacattttttggctaggagaaataaatagctaaatttattttatttcagaaggtagctaatatattaaaacaacaacatatgtcacaaaaaaatattcatgcaattttttttcacagttcaccatgggtgcgtaataactgtattcacaatccatcatcatgtacagttatctttagaggtgacattaacttttcaacaactatttaacaagtagacgtacatacgtacgtgaaaacaatttcgttgcgagttgttagttacaacatacttggacgttgagaccattcacagtaactatatttcacatttccacttttacatgtgagtgtgtaacattgaggccattcacggtgactgtatttcttcaagttaaataaagttttgtttttgagctaaaccggttaaaaaatacacataccatattcaaatctttataaacttatataatccaactatttgcaaccatgtacacactattgtaacattctttggtaatgtcgatatactttaacgattcttataatatgggagatattttatgataatgccataaaattatcataaaaggcttgaatatctctgaacgttacatttaaaaagaaatattggaattatgattatgactataacttcgaataattgaccaattaatttcaatttaagtgtcatgatgattacacataagtgctttctcgtgattagcaatattcagccagcaatatattttattaattccaaatctccatgttaaacaaaagccttgtaagttgtaatctcataacgtgtgtttctttttcattccgttctagaatcttctttaatccaacacttaatactagtacttaattatcatgtattctcacgagataattacatttatcgagcacaaaaataagtttaatttatcttaacgaatcactgttaatacggtcaaataattataggtatatcaacaatgacaagtagtagtcaacagagtcagtaaaaaccacagagaaaagataggaatttatttctcttttttgttgttcatcatctttatatatacaaaacaaaacagaaggtgcagcgaaaaggaactgttgattattgcagttacttaaattttattttgcataaccaaagcaagaaaaaaaaggagcaaagattaaggtgatgtccgttactttattaaaagcaaaatcgatacgatatttatttttgtacagagagacaacagcgagtgaattgattctcaaagagacgtgtacgtagaggtgtatatatagacaacataaaagagaaagagagagacaaagacaagtgttggggtcaccttttgtggtctctgttggatttggtttggactatcttcacgagattatcctcatcttcccgcttcttctctcctttgaatctttcttcgttgttctttcactttcttaaagaggatgtgagattgtttttggtagttagaaaatggatacaccggaaaagagtgaaacccagatcggtactccagtttctaaactcaaagtcgaggttttttattctatatctatctcaaagtttcatgctttattagttttctcgttgttcctctgtttctgtgatgggttttttggtgtctgttcgacttttcttcattgaatcgtacggttttgtgtaaagcccttgtcttaatttgttgcattttagtcaaagtttcagtttttaatcggttattggaatgaattgtgttgaaagttatggttttgatgattggagaagaatttgagatcaaagtgtttttttgtgcaatgcaggattcaccagtgtttagttacatatgcaatctctcaccaattaagactatcaaaccaattccaatcacttgtcctttaagctctctcaattacgcatctccaccttctgttttcacttctcctcacgcggtttctcataaagagtctcgtttcagaaggtataatcaatctctcttctcctctgagtccttcttagtgtactcttcaaagttgttaataggaatgtgtttggttgcagtcaaaaagatgtgtctgcttctaaagaagttggagaagaagaagctttagtcggtagcgaaccggaacaaagctacaagaatgactgcaatactcctagagttaccaatgatgtgaaagacaatggttgtgggaaggatttgcaggtgatgatggacaatgtcaagaagaaaagtgatactccggattgggaaactttgattgctgctacaacagaactgatttatggctcaccgagagagtcagaggcttttagttgcttgttgaagaaaacttcaaactctgaagcacgtctacgtggtagtataactgcaacatcggtggctgttacgaataccgatgtagtcaacaatgaatctgaatctgttgatgtgagtataaggctttgtgaattactactttagcttttggttcttgactgttcattgtctctgaaatgtttctttttgtgggtgtgtgtgtgtgtggcaggctctttcgatattgcaccgtggtgtgagaagacggtgtttagactttgaggttaaggggaataatcagcaaacattaggagaatcttcatctagttgtgtagtacctagcattggtctgcatcttaacaccattgcaatgtcctctaaggacaagaatgttgctaatgagtattcattttccggtaacataaaagtcggtgtgcaaagttctctgactccggtgcttcattcgcagcacgacatcgtgagagaaaatgaaagcgggaaagattcaggacaaattatagaagtggttccaaagtctttagcttcagtagacttgactccaataagccccaagaagaaaaggcaagtttgtcccgaaacttgcagaaacagatttatggtaaatcttttttctaacaatctgttggcatttgaaacatgcaggcgtaagtccgaacaatcaggagaaggcgactcgtcatgtaaacggtgcaactgcaaaaaatccaagtgtttgaagctgtaagttgaatacaccaatctttggcttgctttgaagtagttttttgttgagtctcttgtactgtgtttccctctgcagttactgtgaatgctttgctgctggattttattgcatagagccatgttcatgtataaattgcttcaacaaacctatccataaagatgttgtcctggctactcgcaaacagattgaatcccgcaatccacttgcatttgctcctaaagtcatcagaaactcagattccatcattgaagttggtgtaagtgttctcaatatttccttttacttatcatcctcaatacatttatctcattgaaaaggctataaaattctgcattggttcacaggaggatgcaagtaaaactccagcttcagcgcgacacaaacgaggctgtaactgcaagaaatcaaactgtctgaagaaatactgtgaatgctatcaggtatttccattaaactccatacacatcagtgtaagattcccttctgtggattggttctgattcattgatcgtgtagggcggagttggttgttctataaactgtagatgtgaaggatgtaaaaatgcatttggcagaaaagatggttagcttttacttctccactttatcataaacacacaagtctcttgatcttttatttgacaagagtacacaatttcttgcagggtctttgttcgaacaagatgaggagaatgaaacatctggcacacccggaacaaagaaaacacaacagaatgtcgagttgttcaaacctgcagctccaccttcaacaccaattccatttaggtaaagaaataatctcaaatacaatcaaatatgtgtccatttacacttctcctgattaactttattaacctttgttttcagacaaccactggcgcaacttccaatctcatccaacaacagactgctacctccacagtctcattttcatcatggagctattggatcatcttcctcagggatatacaacatcagaaaaccagacatgagtttgttgtctcattcaagaatcgagacaatcacagaggatattgatgatatgtctgagaatctaatccattctccaataactactctatctcccaacagcaaaagggtttcgttgtctcatcttgattcaccagagtcgactccatggagaagaaatggtggggggaggaatctgatacgttcgttcccaacgtttccttctctcactccacaccattaaaattctttgaatgtcaacttctagttggtagttttaacttacacagacaacatacgcaaacatttacaagtttagtagcagtattgcgttagtttttacaatggttgtgtaataaaaatgttaagtcatttatcaatatcttgacaacattcctcgtctaatatcacaaatgtaaccttatttattcaacaattttcatgtaaaaacaatcttcacaattaataatttattgactaactaataataatcttgttcaaagaggatgacaaaagagaaagaaaaccaaaaaacaagctggtcgactaattaagttgcactagacttggaacataagaccacacaattgggtaacaccttctgtctgattctccaagatccacttctttcatggatccatccactccaatgatgtaagctatgtagcgctgtattctgtagcctttatcaaaaacaacagcgactttcttctcctcgtcaatgaagaaactccccaaacaaaactgaaactgagggccaatgagttttcttatactcactgataagaacaccttgctgttccaagacaccgcgttgggctcaatcttagacgtgacccagatctccatcattaatgtatcccacggctgatataaaacagcaagctgctcgtctctaacattggatacactcaaagcatcttcagattcaacaaactgaaacggaagaggcaaaagtggtccaaatgtctctcttgtgaaatcaaaagagagtaagaaaaactcttcgtttgtttcacttgtttcgtaatacttctcttcagcaacccagaaggcatttcccttgagagacacgccactattaatagtccctaattgccagtctggagtgacatgaaaaaccctccatgaattagagttaaaatcgtagattatgaactcatgaaaatggggtctcaaacaagtaatacacctcaagattttgtgggatttgctgctcttgtcgtatccgagagcataagaatagctgtcgaatttgttgaactgatgtgtgggctcgattgaccgggtatgcccccaatacgggttccaaaccacgagcctagtcttggcttgggtgatgctgatgcataacaataaaccgtcgcagtgaaagacttgagatatatcatcaacttcgtcgcctaagctaataactttagcttcacgttttatacatgatgatgatgatgatgatgatgattcaacgacgttgttatcaagattgactctcatcaaataaaccctaaaattcatcatcatgaccaccataaagtaaagagtaaagcattaattgggccaaaaatgtaacgaatgggcctgagtgttataggtccaggtaagggaaagatgacgtcacttagtggatggactaaaagagtgatatgatttggacttcatagttcacactgtttcgcaccggcgcggacaaagttttttttttgttcgaaatccgacaacaaccctagattataaacaaaataaaccagtgtctgcatagaggcaatgtagatgtgatttttgctggaaaatggacaaatcccagaagaatcctacttcccagatcggaacttcaactcccaaatccaaattcgaggtttttttccttaatttcctcaaagttcactcctttcgttctttacaagctctgcattttttttttgaagaagatagtgttctgttttctgggttttgcttcatgtttctcgcttcagggttctgcgattttttttgttgttttttttgtcgacgaggtcaatttcatgaattgaccaaaaaaggtcttattttgtttcgaaaaatcaatgattttgtctttttggtaaaaacatttttagctgtggatttgccttgagtctaattgtaattggtctacaatgtaggattctccagtgttcaactacataagcaacctctctccaattgagtcggtcaaatctatctccactgctcaaacgtttagctctcttagtttcacatctcctcctcctgtgtttacttctcctcacgtcatttctcacagagaatccagattcttcagatggtaaacaaccaaattctcttcttgttgttttagtagaggatgatgatgtttactgttgtaattggtgtttgttttttgttgttgtagtcataactctgttgatcgttcaaagcacttagaatctttagatggatctgctgttaaaggagaagttgtagtaccattagttgaagatctaaataaagaagcttctttggaagatgaagaagaaacttctgttgaaacgtcttctgagctgccacagatcatgaagttcgatagccaaacttctgagcatagtgattcaccttgcactgaagatgttgttattgaagcttcatctgatcctcctcgaggagacaatggttcgtcatccgaggatgtcacgatgggacttcagaatatgcttgttgttcgggaagggaatgacactcctggttgtggacgtttgatctcagatgcaactgagctgttagtatttcgatctccgaatgattctgaggcttttagatgcttggtcgataaaatatcaagctcagaaagacggttctgtgctggtgtcaagtctacaaagcggcctgatatcaacaaagatattccagccaatggatctagtaatgaaaatcagcctttggctgtgcttcctacaaacgaggtaaattcaggaatacattttgaaatgacttacttttccctcgaatgtgaatagtaactatatttgggcttttgattaaactgagatgtttattttgcgttgtgtttgtttgtggtagtctgtctttaacttgcatcgtggtggcatgcgaagacgctgccttgactttgagatgccagggaaacggaagaaggatattgttgatgatcagcaatctgtgtgtgacaataatgtggctggtgaatcttcctcgagctgtgttgtacctggtattggtcttcatctaaacgccgttgcaatgtctgcaaaggacagtaacatcagtgtcatacatggctattccatatctggagagattcaaaagagtttctcaggctctaccactccaattcagtcccaagacactgtgcaagaaacttcggaccaggcagaaaacgaacctgtagaagaagttcccaaagcattggtgttcccagagttgaatctaggcagccttaagaaaaagatgcaagttatttcttgagtaaagttacataacagatttgtatatctactttatttgtgtttttcttatctgttggcgtaaatgtgcaggcgtaaatctgaacaagctggggagggtgagtcatgtaaacgatgcaactgcaaaaagtctaagtgtttgaagctgtaagctcataccccctagcatctcgttaattcctacctgttcaaaataaaaaactgaattgccttgaagtagttaaccattgtttgactcccttttctttctgcagttactgtgaatgctttgctgctggggtttattgcatagagccatgttcatgtatagattgcttcaacaaacctatccatgaagaaactgttttggctacccgcaaacagattgaatcccgaaatccacttgcatttgctcctaaagtcatcagaaatgcagattccatcatggaagctagtgtaagagctctctattccatctttttattccccccccccccccccctctctcactctctctgtcctccattaatctaagggatgacatcgttatcttgcacaggatgatgccagtaaaaccccggcttctgcacgacacaaacgtggctgcaactgcaagaaatcaaactgtatgaagaaatactgtgaatgctatcaggttttcctttcatcgtctattcatattgtattcaatatttttctgtgtaagttatattcaatggtctgatttagatactttgttcctaatgatcttgtagggtggagtcggctgttccatgaactgtagatgcgaaggatgcacaaatgtattcggcagaaaagatggttagtattcgtagctccattttccattactgtttataaccccagacccaaagtcttttgatttaacgttactttaatctcagggtctttacttgttatcatggaaagcaaactagaggagaatcaggagacatatgagaaaagaatagcaaaaatccaacacaacgtcgaggtgtcgaaagaagtggagcagaacccaagttctgatcaaccttcgacaccactgccaccgtacaggtaattgtattaatgtttcaaacaatatacaaacaaggcagctactgatttgctgtttacctttgttctgcagacatttggtggttcatcagccattcttgtctaagaacagactgcctccgacacagttttttcttggcacaggttcttcctctttcagaaaaccaaacagtgatttggcgcaatcacagaatgagaagaagcctcttgaaactgtgactgaggacaaaacagagattatgcctgagattctcctcaattcccctatagctaacatcaaggccatctctcccaacagcaagagagtctctccccctcaacccggctcctcggagtcaggctcaatcctaaggagaagaggtaatggccggaagctgatactacggtctattccagcatttccttctctcaacccaaatcagtgaatcaaaaacaatttggttaagctatggaaaaattctttgtatctttgtaatgttccagatcctattagcctatcattgtttccataacataaggcataagcaacgttattgtaagatactttattctagtagtagtaggtaatgtaatagtacattctagttcataatcttccagaaagaacgtcctaaactggactttgagaaaagctaagttcgaaacatagagtcaaaccagatacatacagtttagcagaaactacaaagattactcatttcatttgctctaatatttcagaaaccatgcaacaaaatacttctagagtcagtaccatgattatatagtgaaaaataaatagtaagcttgatgctgttacgttagaatccaccctactcttcattaccggaagatctcatacagccgcagaaacgatttttcttctttctcgctgtccttttgccacctttatggataatgtctctcaagagtataactgtcctactctcagagaactttctccttcctttactcttggttgctccctcttcaagcttcagcactgttcgctcaatgttctgcatttcttgctgcatctgctctatcttctcagacccaatccttgacttctccataaccacttttctatagatatctctgacatctccggtctcctcaatttcgttcgaaagaatctcatttgtgtttgcaagctgaaagatggcttcttccatttctttcatctgtttcctcactctagcaaaatcagggttagtgaacttgcctggcttctcgtttatctccagcttgcttttcagatctcttaggctgattctaaggcttgccaatcttcgagaatcagacaaaagtctctccagaatctttgcattgtcctcagtgcttctagataactctagtttgtcaacaactccaaccattttctcagactgtgattcaacagagggattcctgcttctgcgatgaagacggggaatcaaaggcttctttgagtttttattgttgatcagaaactttatgctggattctggttcagcagcctcttcccataattcaagcatttggtcactcgaaccacgactagttctccggcttcttccataggacgttgtgtctgcaacttgatcaaggggaatgtctttcattaatgaaccatttttcgactcagtcatcgcaggtgatctaggctgtctgatttcacccgagaattggtcctcaagttcaatctcttcaaacagcttgcggtctttgcttctgtgtgaagagcttcgtcttctcagcttcccacgcctctttttttcctcagcaactgcttgcttaatggttttgattcttgttttcatgtcctgcaaaagcacaattccattgtctaggttggtactgcaatgtcctacaggttcttgagagactgctgcttcttgatgttcatcattttggacaccctggggaaattggaagttattagttcatgaggcatatatgcaaaacgcacaggtttcaccaaatggaagcctaggtacaagtgccaggagaatgagaaagatgaggtaagatgccaaatagagaaaacgggaataagtttatgatagatcaggccagagagttctatcagtttacctctctgcgtctaccagctggcacagggagtttcatcaacgacaaggcattttgctcaagggatctgacatcttctgctagagatgctaccacaggatcataggcagacagttgagtcttcagctcagacacttcaaattccaagaatccaaccgtttcttttatttggtttatctctgtggtctttgtaacagcttcatctttgagattttcacaaactccagtgagttcttgaactttgttctcaagcaagacttcacggacagctgagatctgtagatcaaagtagaaagatgttgcttcagcatcccaaagtccaaactcattgcttttctcctgcagctctgaactcaagaactcctctcgaactcggtgttcttggatttccttgtgtaacaactttacctcagactccaaattctccttcaaattgctaaggattttaatctcttcatcctgtctcccagcaaggtcacacagttcagaattccgcttctctaaatttcctttcagtttcctagattctttacagtctttcctaagctcttcaactgcttcacacagttcagcatttgcattatgtgtagccttaagcatctcttcagcttccaggagctctatcgccttctgtctcaaggtttcctccttaactaaaatttgatgttctaagagatcatttagctcattggcttcttcgaggctttcctgtaacttttccagcttgctgttaagctcctgactatccacctctttcccttttaatatctcctccagtgtctcaaccttctgcttcaggccactattaatgttttgtaaactattcaggtttttagcaaaagcttcagcctgctcggccttttcagacccaagagactggtaaaccacagacacgttgttcaaggcgatagcttcttcaagaatagcaccattttcttcctcgagtatacaaatttcacctttaagttctgagaatttcagatgcaaacttttgttcttgccaagagcatctgagtaatcttgatgcaaagccatgtatgactcatgcaaattttcaaacttcaaatgctctgtttgtagttcagctttaagctctagctcccgctgctctctgtcaatcagttctgatttcaactgccggttcatttccaatagctcgagtctgtcctttttcagcattccataatgatgtactatcgtctccagatctttctctacatcacgtttctctgattccaacttcatgccatctgattggaattgtccaagtagagataagagcacagagttctcaattacaagtcgctgcgtctcgtattcagcgctagagagtgaacattttagttcattaatctcacccaagacacgtgaaacaggaattctctcttttgcaatcttctggtcagctgtcttacaatctgcttcaacttgaagtgccttaaacacttgacaaattgcacccctgaagttatcaatctcatgcaccaaaaattctgcttccatctgttgctcaagattctcgctttcgagctcagcaatgagtttctctgaaaatgatgatgcctcagcatatttctggcactcaatcagcagagaaaagttcttctgctccaagtcttctataaacttttgcaagatgaagatctcgacttgagcatttacagctctgtcaagctcttcctcaaactccttttttctggagcgacactcttctcgaagaaagctcacgttattctgaagatctgccaatctggtgtcagtcgatctttcgtaactagcacgctcttgcttctcagtggcaagtgagactcttaactcttccacttgaagatttttgaactgtttttccctctgtaggtcagcatattttccttccaactcagtgaacttcttctccaaaactcctagcttctccttaactgcatttaactgggagataagagattctctttcctttataagctcagccttatcgtttttgagcaactggaagaattcttcaaagcattttgatttctcctttacacattgaagctcaatgtttgcaccagaaagggatgtctccaataacgagttcttttccaagagcttctgcatattctcagtcatgatttgcaattgagaaagcaagttagctcgctcagcaataaactcatatttctctcctcgtaatgactcacatctttcttgcagatcctttgtcttctccctagaaccatctagtttagtgtttgattccagaagcaatttctctagacaaacattcttcctaagaatgttatcaagttcacgcagcttctcagtaagagcatctttatcatcactctggtggttgcacaactcagtcagttttgagttctcgtcctgtagtttcctcacagagcaggcaagggatttgggatccaaacctgcaagattcacttgctccattattgcttgatacctcttattcaagctgtcaatttcatccttcagacgacggatctcttcttgaaaggcactgctttggttaatatgtcttgcaacttcttcctcaagtttttcttttatctccttcaagctagaaatctcacatttctgagtctccaggaagatcatagaagaatcatttagttcacttaagttttggttttcttctttaactgagctgatgtcaccttccaacttaagattacgagtctctaagtcccgcaacatgccaatcctgctttgaagttctgaagtgataaccttttgttcctcttgggactgagaatacaaactttgcaaagtcttaaggctgacttcgatttctaaatatcgagagtgctcatcttcgattaaagattgaaacttttcaagctcgttttgcttctgaaaaatttcttgatccttagctgctaatttatgcgttagaccatctgcttctagcttcaaagtttcattcgagctctccaaaagagtacactggtcctctacagtcttcaattttgcagctccagccagaacttcactactcagtcttttggcattgtcttgagcgtgcgaaacttctctctctagcttagatatagtttccaaacactgctggtaccgaagacgcaaaccgtccttcacttcattaaccttcacaagttcatgtctcaatgctttaatttcatcttctgcttttgcagactgattactaaaattttgagcattttcctcagcgtctctaaccttcttctctagattagatatcatctcaaggcatcgattgtattcagctaagccggcttccttctcagaatgcaatctactatgcgcttgcttgagattctccacttctgtttctgctttcgttgctcggttggtgagccccttcacatcttcctgtgcatgagaaaatgattcctccagctccgttattttctgcatggattcattataccgaagaagcgctgcatccctctcagcttcaagctttgcaagtgcttctgcaagtatcttagtctcaatctcagctttgctagcacgttcatcgagaccactaacatccttttgagcaacctcaaggtctttttccagtctagaaaatttgttcaagcttagctgatactgaagattcaaggcctccttctcagctccaagctcaaccaatgttctcttcaagctttcaacttctgtttcagaatttcctaagtactcagtcagctgactcaaacctcttttactagtggcactgtcagagtcataaaatggctggattccaggtggcattttctcaggcgtacgtggctcagaacatgaagatgaagcagaatcctcaatcatgtcgaaaggcacttggttagggaacgcctcagccatggttttatgcgcgtgacaaagctccacagtggcatgatcatacctctctgctaatgcacgataagctctatagaattcttccacaagtttcatcagctctggacgtttcttgtaatacatctctgcccttcttgcaaaagaatctgcatcttcttcgatgagtttaatcattgccttcactttggaatccatatctacatcaagaaaataaccgtaagcaataatacaaaggaacaaaacacttaacactttagaacatagagagaaagaggcacctgaaaggttctgctgaatccatttagagtttttgggaatgtgactatcccaccaccaggagtataaccgcctggactctgagtgcaagacagtagccatcacaccggctgctagaagcacaaagagtggtctagacttcacccaagggtggtcaagtccaagataaggattccaggccagaatcaatctctactaactcaaactgaagacatctttgttctctatgtgtcaggcttttcacctacaaaactgaaacaatgtcacacaataagcaattaaattgattaggcttaaagcaaaattttatactcaagttaagtggaatcattagagcaatacaaatatccggatttaggtctaactggaaagtaatctacagagaaagcaaaccaaaattactttccaacagaacagagacaaagaatctcttaacagagaagtattagtccaaatacttgtaaatcaagagattacacaacatggaaaaaaatcaagacttttttggtttagtgaggaaactgcaggcagattttctaatcagcaaaccattgcggaacaaatgtacaaacacactacttatagaaagagtgaaactttaactccaacaagatcaagagggacaaaaaaatgcagaacatgtcgagttttttatcagatcaaatttaccagaaatgagcaaatgggttagctacagaaactcaaaagattgagtctttcctaaagcaaaatgagagacagacacaaaaacgactcgttgagtagattggatccaaatgtcttacaagtgaagtgtcagaacaaatactaaaaccaaaatggatagaagaagaacgattaaatcatatcataagaaaaatgtgagagccgagagagatcattagagaaggaaacataccgatgaaactgagaaatggatgcaaaatgataatgaaagtcatctcattgtcttctctagttcacactccaacagctctctctctttctctctctttgtgtctgcaattatattcttttagatttgcaactcttttttgtgcgacaaaactaaaagatgagaatgatttgacgcacaacagtaaatttttattttgcttttttggttttcatataaaaaagtaaaaaactgttattttgccttttattttgggtttattttttaccttaataataatgagatttgttttggaaattgaaacgttgaatagagtagtagtactaaattaacaaaagttaattaggggtagaaacttattttaacgtgtaattttattttatttattttaaattggtgtaatcaatgcaattaagggaaaatgatacggtcgttgtgtgcaaatccctcgtaaaactcgattattttcttaaacagtttttaaaaatattacgtaatcttaatcggaaatttggggattgtgtcaaggttgttaacttgtagttatcattattcaaatttcattaacttgtagtttgaaaataataatcttacattagatatcagaaaactattttctttataagaatcggatttttattttcttttgtggcttttgtaatagcggattagtttgtgtgtgtctagtgatttgtgcaaagattaggtgacattaatgtaggttgaaaaattagatctgaatcatgaacgaaaaatgacaaatctgtcctttgctcaaaatgtgtttttttctttcttgggttttacaaaaggtaggtcctttaacctgtcttcttctgctcaatttgaccgtaggtcagaaaaatgaaaaaaaatctccataaatttaagaaaaatgttgttgctatagttttaggaaggtttcttgtttagcatgtcgtgtaaacttttagtagttagatagatgttgctttaattgctcatacttaaggagaatagaacacattacacacacacaactaaaaaaaagattacatatgttgtgaaagacgattagtttagtggtttttatttgataccataattttcttaaatgtttatttatcctcttatcggagttaaaagtgtaaaataaagtcttctataacctttactagaacatgtcttgattggatccatgaaaaagatttatactaaaaatattatttgttattttataagtttagaaagagtacaatcattctatagcttgtgaccccatgtcatatgttctgaaatagcataattagtatgcatacaataaataaattatttttcgttaaagaaattttgagcgatatttctttataatgtccacatgtctgataattatggaaagcaaccctttataaaaatattaattacatttcttatttattgaaatatctttgttaactatgacgtactatttaaatttaaaattagtacgtatagaaaaaaaattgagaagttaataagaaaataaaagaagtgaagaaatttatcaaaaatatgtgaccgacatctcttcacaaactaacatgccaactataaacttacaatgccatttttctacatgttataattatttctcatctctttcattaatgattacgtatactattttttaataaatagttaacatcacgccactttataaaaagagacatgttgaagaactctatagttcgtgttgttcacgtgtatgagcttttgatctaattcttaataattccattagcgaaggagtagccgatcaaacaagcaaatggttatcttattttcccaattactacaaagtgaagtgaacttttatcgcataatgatatatataccggtccatcatgttttgctgtgtgtgttgttcgcctccatgcaacggtgcaacccggtttcttaagaaactttcttatattatacacatatcgtgcttcttagaaaagaaaataaattacatgtcaattcgttacaaaatagatacaagaattcaaacctataatatttcagaacatcaatgattattattaggtgtttatggttcgttttctgcttcttttgcatgatattgttttatcttacttatcattcttcttactgacaaactcggaattttctttttaacgacatagctgaacattattaatatctaaatataataacttgtcatatatgtgcttaaaacaatgatagctcactgtttgagtgccacaaaatgttaaacatgccatgttagtaaaatcatgccatgtcatttcattcttagactccaatccacaaacttgatgttgatatatatcgtgtgttgattgtattttgtttttaattatacggtgtgtcaagtaaactatctggtcactcgccataagtaaaacaccaagccaaccctaagtgatgcttagacgaaatctttgttaaaccttttgcaaaatagaatttgtatgaagatagccgtaagataaggacattaaatttagattgattgattaaatccacagattcaatacagtagtatggttattgatagattattttctgttgataaaagatgttatattaaatcttaactacactagttttttttttttcttctatcttcacttgtggtccaaacctaccccatatatcaaaagatgtatcccagctctcaaaactcggattttcttatgcacgcacactacaagcccaccaacaaacatcaatagcaatatcttcaaaatcacaaaagagatataactaaggggtcatcaagatctcctaaaacaaaaggaaaaagaaaaaggagtcacctgaaagtgtaaaaaggtgagatgtctttaaagtgtcatatgttagaagcaaatatattgtttttttctttttggttggtaaaagaatgcccccaacatttgcaactctattattctgtaaagtcctcttattacaaaaaaaaaaagagaaagataaaaggaggcagaaagattatggggcctaagcctgatatattaacatcctataatgattataaacatccacatatatgatacacatttgtgcatttatatattaataatatgatgaagatacaaaggaatgcagtgtatatgtgaaagagtatataagcggtgggtgaatggtcaatgttttaacaatcgatggtgaagtgtcatggtttaaaggtcgcattgtcggtttggtaacgacacatcaactttgcaggttgcacttgcaccagttttgtctccttgaagcactcttcttccatctccagtttattctgaaccgggccctgttttgggttcagaaccaataccaaattgcttagctggtttattgggctttcgttacttagccgaaaccaataccatagcccaaggcccaataataaaagtttcgttgtttattcgtgtacaattaatttggttagtctcgagttagagcaaattagttatctttaattaactcatatggttgttactgattccaccagaaacacggtttacaatactttgtcaaccattgacacagttcccaaatgtgattctatttgtcgtaagttgaaaacgaaagcacatggttaattaatgccatctaatttaataatataatgttttgtaaactttcgtcaaccattggcacatcgcccaaatgtgattttatttagatgaaaatgaaagcaatgttaattaattccatgtaattccaaaaagttaataaagtcgagctttcgaagtaggtcaaacattaggtttattcttggttcaagtcgagttaaccgggtggtgctaaataaaactcctacgatcttaaccttttctaaactatggcatgtaatccctaattatagaaagaaaagaaaccatgcatttggaacttgaattatgtgtactgataagtctatacgatgtccgcttatagacttatatcaactaatcaaaatcgccttgtagtcaattcgtcacacacacagaaaaaacaccaaactaaaggtaccgtttggtgttcttggtgaaaattaaatgtacaatgggacgtgcaataactagaaagatgatatcttgtacggttggattgagactcagctacaactacaagtacgagaatgtaacgatgggaaagagaaagaagggactcgtgatcatatcttattaagtacacgtactatgcaataaacttgtcttctcgccagagcaaattacacatatctcccttcaagttttcaattgttttattagacaaacaattaaagctcatttaactttttgataaataaatttaaaagagaataaataacaattaaatgaacactagcgttacataacgtagaacacaataactaaacagatggcagtttcaactattgcatcccactcggtcaaaagaagccttagtaatgcaccggcgttggaagatcgttacaaggaggtgaaggatacatatatggttgcggtgacggtggtggcggaggatacacatatggtggtgatggcggtggaggatacacatatggtggcggtggcggtggatacacgtatggtggaggtgatggaggtggtggcggcggcgaaggatacacatatggtggcggtggtggaggtggaggtggaggtggaggtggaggtggaggtggaggtggaggtggaggaggaggaggaggaggcggtggactaggtggagagcagccaaaggatgcacaatcaataggataagaagaaaaggatttgcattcagcgagagaccgttgcattggccttgaaggtaaacaatttctacgatcatcaaactcttgaagcctcaaacaagccggtggctcaccggagaagaagttatacgagtaagtgaagttctcgagccttggtaatcggcagatactctccggaatgtagccggagaatttgttatgcgcaatgtttaactgctctaaactcttcatatcacctatagtctccggcaacgaacccaccaagttgttgtaactcacgtcgaaaaccgtcaactggttaagcaaaccgatttcccggtttaaacaaccggttagttgtgagttcgtgataatgatttcgtgtaatgttttccccattttgtagaaacttggaggtacacaagatccttggagatcgttgttggccaagacaagaacagaaaccggagagtttccgatgtttctcggtaacctaaactggaatttgttgtcgttaatgaagagagcgtcgaggtttaggtcaaagagttggctaggaacatcaccttggaactcattgaacctaatgtcgagaaacttcaaggaaggcaaagagaagattacggaaggaaactcgccggagagtttattgttgctgacgtcaagctcatggagaagatggagacattttagagttttgggaagttgaccttgaaaacggttggaattgatatggaacaaggcaagatcggttaagagaccaagctctaaagggagataaccggcgatattagcatggttcaagtctataccagcgacggttaagacataagggttatctagagccggtgcacaaaacacgcctgtgtagttacaaacattaggaccgcaccagttagaagtgaagccgtttgggtcagaggttatggtgaacttccaagcttgaagagctgtgaaagcttttaagagcctcgggtttgtgataggaggaagaaaaggatgagcgaagcacgggtttattggaggagtatggtaggtgaaagcttgaggaagaaggaagatgaagctgagaccagagaccaagaaccaccactggaagaagaaggtgtcttctctcatgactaatgagtttttgaggttgttttgtgttgtggaaatgggagtacaaggttacatatgtatacacaatgggggtgtaaccacttcctttgaaaagttatatgttgatgttggaaaataattgtagatgagaatggttattcttgaagagagtcagtctttgtttatagtgtgttcaattttttaattactattttataacgatgattaattcaaatttgatgattgataagtttttgaaaaagaatttacatatattgggtgacagtacagcattgatttgacttttgttggtttggtagagaaggtcagaattagcaaaagaatgttctttgatccataataatgcatctatagttttctaatctctgtgtatccacttcttgtagaaatcaaattggaaaaaatattaacacttctaatggtcaaataatatcacatatccaaagtttaaatttcaacaaaatatgtttaagtcatccaaaaagttgcttttgaaaaattatataaagccaaaaatcattgtaactcctgaataaaccattaatgacaatattgggatatgaactctcgagctacatgtgttagtatcactgttgaaacagtacacgaatgtggattataaaatggattgtttagtaagtaggtctacgacaattgcctcgtttcttcgacacaagtgttactccgttaacacgatccagcacataaccatgtaatatataaattcatagtttcatggggggcatttataaatcatcggatggttgttacttgtttaattaattaccaccagaaacacggttttagtaaacttttagatcattattgtctaattataatatcaatattcctaaaaagcatgaaaacatatttgaaaacaaaccaaatgttgaaaactgtggatttggacagaaacaaaatctttcccttgttctttactttaattaagacaacttgttctcagaaaactagtggtctttactatttgtgactcaatatcattttaggaaaagctctttaaacaatttaattttgagattaatcacaggattaataatcacctgaggatcgtaatgtttttagctttcatgtactgaatttattttgagggttggcgtgtagttaatatcgatgcttttgacttccgtatatacgtatgtttatacgtttgtacacgtatacgcaactattatatatattttagttaccaagccacttgagattcttttttctgttgatctgaagatttcttcaaaatcaagttcgatggctaagctaggtcaaacacttatcacaatctgcgattaactaccaaagattcatactgacatcacattcatccataatacaatgtatattgatattatctccacttggttgtggaaaaaaatgagtttcttaaaactttcgtgcacttaacactttattaacttgttaacggacttaatgtcgctacaatacaaactaatcctaagaaaagttgtaatgtttgcccaaaaaaagttgggttcttttggtccaatgtcttttcaatggtgtcacacattagtttagtgggcttttctacatatattcttgaaaagaaattgaattggtttcgcccaaggtttagctcatcaagcggccccaaagatttttgtgatccaatccagcttcatagtgccatatatcttttcgacaactttataacgtgatcacaattcgctacgtttacacaaactagataatgacatgaatatatagtacaatggtggactacttctagttctactgatcacggcttctacaaaagaattacaattgacgaatatagccactctcggaaaacaatcaacaattaagcttcatttgaaaaaagcatatcgttatcttaataaatcacaataaaattcgtaacaaaaatgttgtatagtttttaaagttgatacttataaaacagtcaagatgataaacacgtgaaagttaatacgaaagggtgagtggtatccacatcaagaattactactctctctttaaccaaatgagacaaattctgctgaggttatcccttttgtccactaccctacacacctccactctctggaggtgtcatctcgtacctttttctgtagcgagctcttcggtctggtccagtccagaccaaccatcaggttcagatacagaactgtgggtccgtcctatgccgttgatgcgagccatgtgagattgtatcatgctattttctgtcaccaaaacaaaaaataatgtgtcaataagtaatgtttgtggccttttgacaatgtttgttgacactcatgtcaaagaaacctgatttgaatcgagtctcaaaataaagttggaagttatgacttcttataagtttccgatataattgagttgttagagaagatggagtttcattaaagcaatataagaaaaacaataaaattgtcaaacagactatatattcccggataggagatactacaatataatatttcagatttaggttgaatctatatcaaagaagggtaagaaagttcaataatgggagtcaaaaatgaactctagtgtcggctacataaagaaagttatacatgaaaacggtaatttgttttttatttttttctttccataattcatatttagatagaattggctttacagattacaacacacaatacttagttgatttcctttctttaaatgtacaataaatcaaaaatgaattatttgtttttttgtgcgaaaaaataaattatttgtaagaaattcagtttagttatgtattggttagagattttttttaaatgctcatatttttttttagttttgttgtttattaaatatcaaaaaaaaaatctctttattataatatttttttgaagacggtaacgcctttatttttttattaatttatttgttttttaaactgtaacgccaatccgttattcgtagataaaagttcgaaacgtaattgattttatagatttttcgttctaaattaattttttgtcaaactgtaacgctaattcgtggctttatttgattttacgttgagtttttttcttaaaaaaaaaacataatctaaattatgaaattagatatattattgaatatttaacaaatgaatgtatatatacacttgaacttacttatcaaattaaaccatacatataatcaaaccatacatataaagcgttgaaccaagtcatggtcataacaaaatataccaaatttttttaatgttaacagggatccatggaatgatggaagtttggcacacctttctctcctgccaatatttcaataatgatggagtcgccacatttttgcaggtcactcatcatggactcatgaggtcccttatcatttatgtcttctttccatttatcactcctttaagatagaagtcagagtctccttaaattctcatttcagtatttctattcatttgttttataaaattatttgtgtaaaactgtaaagtaaagattaaagttaaatcaaaattaccgtgattaattactgtaatcatactcataggactatgttaaataattggtttacactttttttttgggaacatatgttaattttgatgaaataaaaactatttcttaaactaggtttccaaatatatgaggtttttggatttttttttatttgtgtttcttaaagttttttggaaagttaaatttatttcaattttttattattattgattatattattttaaaatgaaattgtttttgtatgtgtatatatatatataggataaaacatatactatataaaagcgtataaaagtgagataagagtgtgtatatatatgtatatttttttttttgacagcaagataagagtgtattaagttacaaaaaaataaataaattacaagcaaattaagagataaaaatatcgtatttattacctttaaatatcaaaattttctttttaagaggaagagtaataaagcaaagcattgaagcagagaagaggaaaaaagctgtgactttcatacattactctccctctccatctctctcgttgtcacatatcagtatatcacaaaacaaattgcagccattcacatctttctcttccatctctcaacattctctttctctctgtaaaatggagaaaccagtgtttgcaccatggcgttccgaccaagttttccggccaccggagacaccattagagccgatggagtttctctctcgctcctggagcgtatcagctcacgaagtctccaaagctctcactccttctcagcaactcctctcaaaagcctcaatcgaaaacaccaccgtcattctcgaagaacccatcgccgccggcgagaccgaaacggaggacaacagcttcgtctccggaaaccctttctccttcgcttgctcagaaacttctcagatggtcatggatcgtatcttatctcagtctgtaagtgtttcataacgctttcctaaaaaacagagcatttgcagacaaaaaaattctgttctgttctgtctcaattctcttaatttcgtcaatttgattctatgtttactcaattctatcgatgggtcattacaatttcatgagttaagcacgattttggtctaaagatcacgtttttttttttttatctttcgcaattctcatgaatcatgaattcttcagtgggttcaacgaagttgaatttttcatgcgcaatgatttgtaatcatatatatcatccttaataaaatcgatatgattttctaaaacactcacctttcatgggaccctataacataatcacaaaaaaagtttggagttttcttcaagtcaaaaagctaacaatttcactgttctttctttgtcttctttcttaattcttttgccataactttaaattatgttattgcagcaggaagtgtcgccacgaacatctggtcggctttctcatagcagcggtcctctcaatggttctttaaccgacagtcctccgatttcgccgcatcaagtcgacgacattaaggtctaaaacattctcataatgtttggttctttaatctcgcttgctaatgtgtgactctgtgtttaattagtatagtaatatttttgatatcttcgatgaagattcatggattgttggctgttgcttattaaattattgaagtgtattttaatataaagcattaatctttactcgatttggtttcttcttttgttttatccgttttgttgtgaattaacacagaatctgattttgttgtgttttatttgctctatgcagcaattttgccgatcaaacaacaatttcaactctcaataccgttcaacgggaacaactccgggacctatcactgcaacaactacacagtccaagacagttggacggtggttgaaagacaggagggagaaaaagaaggaagagatgagagcacacaatgctcagatacatgctgctgtatcagtagctggtgtggcagccgcggtggctgctatcgcggctgcaactgctgcttcgtcgagtgctggaaaagatgagaatatggctaagacggatatggctgtggcttctgctgcaacacttgtggctgctcaatgtgtggaagctgctgaagttatgggagctgagagggatcatttagcttccgttgttagttctgctgttaatgttcgatctgcgggagatatcatgacattaaccgctggagcagccacaggttcttagagtttgttttagaaattgatactatgtttctagtgaaaacatgtttttgcttgagtgccatttttgttttgcttctggtgtagcgttaagaggagtggctacattgaaggctagagctatgaaggaggtgtggcacattgcatcagttattccaatggataaaggaatcaatctcggaggttgcagcaatgttaatggtaacgggagctatgtcagctcaagcagcagtcatagtggcgaatttctagttgaggataatttcttgggacattgcaatagagaatggcttgctcgaggtggccaacttcttaaacgcacccgcaaaggttaaaacgctaatctattaacagtgtttctcttgttatggttttggatccattttcttaactaatgttgtggttttggtggcaggtgatcttcattggaaaatagtttcagtttacataaacaggctaaatcaagtaagattccttcttgagcattgatattagtgatctgatgaactttggagagaggaaagaaagattaaagtgagatacattattagtgaatcagtggaaacttttttaagtcacctacatgagtgtgattttgttaaaagaatagaaaaaaagaacatgaaaaagtgatttcagagaccaataaaagaagagaaagcaattttgtgaatgatgtatatatctagtaatatgctttagtctctgcttaaaaccatttcttggcatcattcttatgattttgatttggttattgaacatgaaggttatattgaagatgaagagcaggcatgtaggagggaccttcacgaagaagaacaaaagtaagagaaattcttacccttattatgcatacacctagtagaatcttgatatattctcatagtatactaatgtgacataactaaaggtgaaagctttaactttgtcactatctactaatactatcaataatatgagaattcaaaactttgatgtgggtctactttgaatatggggatttgagaagaaaagcaaaagggttttgggactaaagtgatcagaggatcaaaacaaaaggagacgccatctttaactttttttgtttttagtctgtcttttggatgtgaatatcaagactcttgcacattctcccttaatatttttatttgcctgatcttttgtcttcttttaaattacttcagatgttgtgattgatgtgatcaaaaacgttcaagcttggccaggccgccatttgctggaaggaggagaggatttgagatactttgggttaaagacggttccgcgagggattgtagaatttcagtgcaagagccagagagagtatgaaatgtggacacaaggtgtctcaaggcttattgctgttgctgccgagaggaataacagatataggatatgaagggagtagtagttttaagagttcagagctactttttgaggggtgatatctaacttatggggccaaattataacttggagaaagttaagggtgttttctttagagtaatgtctttttgtaaggtatataggattaaatgtggcctctataagggtagctagtgaaacaaatcttggtgtttgtatatatattttttttttgtgaaaaaagtttaatatcaaatttttaattttatataaggtcgtaatctggtaggtccatttcccatattgattttgatttgtatcatgtttgaaattgaacaccacattcttgcagtcatgtattaacttaataatacggtaccagcctaaatgttcatacaagcttagtgactagtgagatagcactgtgtcctccaataggtatgctcacaatcatcgcatatggattcacaattgacgctcatgtaacattagtaagtccgaaacccatcaaacccaagcttctagaagaaatccaatgtattggctttgctgaagttatagaattcatcggtccacatttggtgttggcaacgctcatgatgattatagtgttgacttttgactagtataatatatcaatgaaaatattaaaatgcatgtttttggaaacgaataagtatatcttttcataatgaaatttttcatatgcccaatggactatattgggtgtgtatttgggctggcccagttaatttgtaaggttatctattataaatctaccaaaaaatttctccaagttaaacctaaattttaactagctaataaatatttttttttgtggtaaaaaccaatcatgtgtttggttttaaaaacaatcatgtgtttgagttagtgttcgtacgtatgacatgttaggagcaaatcatagaagaatacacattccaaatggctacacctacacattccaaatggctacacacattatacagtatacacagtttttttcacctttatttccttatctcttgaatgaaattaaatgtacatatatactacatttactttcaattttgtttccgttcaatttaatgaattacttaatctggcaagaacaaatagtagaaacaggccccgcttgcatgtgaaaaaactgactttgacttggaagataaattaaaagcttaagttgtgtaagaccaactcgtgtgtttcgtacgcctgcgccttggtttatgtgcacaacttagaaaattgtttcccattgcattacgtaacataccaacaccacacgattgctagaagcatttcccaaaagaatatatgtttcatgcaaaaatctgctccagttgttattatagtgtacaagatattagaaatatgtgtacagccaaaagtatatcttctccgtagttcaaccagaaaaaaaaaacattacaatttaaaagagaatttccaaaattttgagttcgacatgtctgaaagaaaaatagactaaataatggattaataaactactacacacgacaagtaatggcctaatggctaatggcaaatgggtatcgagggaccaattaaaacctatgggtccgaaacacatgagccgactaataaatcaagaggggttggtctgaaaataggggggcaaacgcacttaataaggaatgatatgtgtattgtaatgatcatacatttttttgataaggttatatatctatatataactattactatcatatttttccatgtgttaaaaactgttatgatcatattataacttttaaacaaaatattgcctcaaagctaaccagtaaaaaccaattagtaaggaggacaaaattaatcccgaggaaaagaaaaagctaacaaaaagttcactaattgttgaagaattaattaagttaggtcatgaagatctgtttttggttttagggcatgaagagtttgttgccacacttgcagcgccaagcttcagggtaatactccagtggcataatcagacctggttgaatcggaacgtgaactgctttacaaggctcacatttcccacacttcaatctacacatcggaggcaccgagccaggtccccctaaccgcttctgatctacaatctgacccggtaaacccgacctagctatctccttcttcccctgcccaagccctccacctggtttaacgacagagtaaattcatgactactagtaaataggcaaaagaaacaaaaaatggggttttcactttttctccttcatttcttcttttgtttaagcaacaaaacattttgcttagttgagtatgcaattgttagaagttaagatcttttaggttcctattccacacataactatacagaaaaaacggttccatatagatttttttttcaaaacaaacaaactatgctatgtagataaaacatgatagtagataaaagagtttaaagaagtgggttcttactgggacgttgaagagaggcggcggaggacgacgagaagaagagaaggaaagcataaacgatgagagttgggaggacgacgcccattagccaggaccggtgaggagtgtttttgtctttaggtttaggaattttgggtaaagtggtccaaagtcaaagagacatgtaaaagagagtaatgaataaagagagagaaagagtgtatgaataatcaaacccccatcttcaatcattgtcatttttatgtagcgatgaaattaatctaagtttcataagctaagataaatataaatataaataatatattagagttattgttaatctttctaaacttcattattaatatttatcgatatttttctaaactcatatattttaactatattttaaaactcttaaggtaaaaaatatgggatgtttaatgggaataaagatgtcatagccgtacaaagacgtaatcacattagtttttttttgttttttttgtttttgtaacccgattcaacttaattaaattggttagatctttgatccgaaaaacttctatatggctaagttcttgcaacataattgagttttttttgttcatctaaattttattaagaatcaagagaatgatacaagttgaaactacatatgccggcagatgactaaaaatgtctccaaaaacttagtccaaaagaaaaaagcattgctccaacagggaaaactaatttacactaaccttaaaatataacaaaaaaaaaatgtctataaaggaacaaccacatcagaaaggttgaaacctaagcgctataattgaacaaaggaaagtttaccacataagtagtcgatattttgtatacatttgcaatgaaccaaattaaatcaatggtatacatatatgatatatagatcaatgtatacttttatcttttatttttattaggaataaacggactaaaaagtaacaactattgattgagtgatccacactccaaccaattagattcgacaatccaatatacagaaagacaaactaattaaattcactccagagaagaccaagggcgttcgatcttccacatttacttccacatgggctcttttaattctctttagtacatatatattttatataaactatatctggactaccattataaattatacattaaatgaacgaataatttcaggtgaaaatctcactcattcttattttacattctttggtgatcaggttctgaatagaatgctaaaaactggagagaattcaaacccatggatcagggatttacaaacgaaaattaaatcaatctatttaaatatgaaaaaaagaaagaaaaaaagatagactagtgatcaatttaatgagtgtggcgcaggttgggctttctggataataattattggtggtctagtcttttatgtgttattttcttacaattactttggaagaagaggccaacaatatatgaaatgggtctgagcccaatatatacgcgtttctgaagtctgccaagatattctattgtggacgactaaactacaagacaatagtttgatacatgttaagcgagatctcaatttactagccaaaacaatttccacaaatgttcagtttccctcaagttgttttgttccatctaattttttaacagatactttacatggagactacgtattttcacaatcaaaatatatatatttagctttgtaggaacaaaaaacatatatattgggatttagaaaaatataagaaagtcataagtcagcatcagaaaaatgaatatcatatagtgagtgacactgaactcacttatttctatatcttccctttccatctttcaatatttatttttctttgtcttaaaactgtaaagtgtaaactatcaatagatataagaaaacttattagtttctaatattaatattgatacattattaaaaagtactcccaaagtatataatggaagcttacttggtttaagtggacttgttgtatccaccaatatcacttgataatcaaccttcaaccctaattttgaagggggaaaaaacataaaatttattcttaattagtgaaatccacatattacaaggaaacttggctcattgagtgcttcacagctaaaaggctggatcgaaccagtgatgtctcagtttaaatgaatctgtctatctcactaagtaactatgcatgcaaataaaaaagagttgtctttaaacatctaaaatgaagttggatctgtgcggctaatgttgttcgatgttggaatattgactttgttatgagccactaatttattattttgactcgtggattcggattaaacattgtataaactcaatttcctaagctaatattagtattatacctttttactctgctaaaaaagttaatgaacaaactattttctcaataaatttaaaatttatattataatttcactaatattcgatgaacaaagattaataatatatatataaagaattagttaagtttatttcactgtaattacttcatgagtcgatgtaatttgccaattctatctaggatgatataaatgttttgagctatttgagtcaaatgatcaactcatatgtatttctttctatatgtataactgattatgaagaataatctcaacatattttaccaaaaaaagtcatgtacgtcaagtcgtgaaggaccaagctgttgaattaatatcattttcatatcatatacttgtaacgtacaaggaccattcgtttgaagtttggctatatattacttaatgaaagatacatatttcgagttttgccaacattaaaatatttgaatatcttaacaataaagtgcatacaaatatctaatttcaggagaagggacataaatatcttactttttcaaaccctttttagagtgagtcaacatttcaatcttatgcgaaaatcatcaaaatcaacgaatagtagatcgagaataaaataatataaggggtagagacacgtgtcgacgtgtttaggtttcacgtgttttaggtaatcacataaagataattatatgattagtatatgaatgaacctaatgaacaatcaacacgtacccctactaattttggatgctttagacacactcacaaggcgtcgtgtcaatttctcagcgatttgaaagtcctcaaaagccgataatgcttgcactaagacaactataatgacgtattttctttctccctaattaaaaacaaaccatgtttataaatgtagccttggccacgtggttgatttctaaatttggacccactgtgtttatacgtatcaaactttatccatatttttgtattcaattttctcgttattgtttttaggtaggttatcgttggtactttgccaccaattttagattttagctgtagggtttttataagatttgtataattcgcctgatggagagtataataatattatttaggttggaagatatttacacctgtttaacctcaaaaacagatatttaagaaaagacagtaagtaatcgaatatgtgtacatttgtttgtgcgctgctcaaaacgcgtacgtacgtgtgttacatatggatgcgtactttgttatatattcacgttctaaattattaataaattagtagcaaaagtttttggattattaaacccaaaaagtaaatgtgatgattatacagtctaatctagtattaagtctgtgggttttccaggttggaatgggtaaagttgtcggcctgataacatgacacgatagcaaaattagaaacactgtgagatatttattcttaattgaaaatttgtttttgatttgtttctaaataatactccaaggactattgacctatcatggtaactaaacgattgtgggtagaagtagagcgagtgctcttactttagcggtatcaacttggaagctaccctgcccattggattggatctaagcttcatatttgtggattaaaaaggccttagtgggactcatgtctcctccggtgggactagtgtcttttacaatgtcaagtttaaaaaattggataacaacaccgataaaaattcacatttgcaaattttattcagtcggaatatatatttgaaacaagttttgaaatccattggacgattaaaattcattgttgagaggataaatatggatttgttcatctgaaccatgtcgttgattagtgattgactaccatgaaaaatatgttatgaaaagtataacaacttttgataaatcacatttattaacaataaatcaagacaaaatatgtcaacaataatagtagtagaagatattaattcaaattcatccgtaacaacaaaaaatcataccacaattaagtgtacagaaaaaccttttggatatatttattgtcgcttttcaatgattttcgtgaaaaggatatatttgtgtaaaataagaaggatcttgacgggtgtaaaaacatgcacaattcttaatttagaccaatcagaagacaacacgaacacttctttattataagctattaaacaaaatcttgcctattttgcttagaataatatgaagagtgactcatcagggagtggaaaatatctcaggatttgcttttagctctaacatgtcaaactatctagatgccaacaacacaaagtgcaaattcttttaatatgaaaacaacaataatatttctaatagaaaattaaaaagggaaataaaatatttttttaaaatatacaaaagaagaaggaatccatcatcaaagttttataaaattgtaatataatacaaacttgtttgcttccttgtctctccctctgtctctctcatctctcctatcttctccatatatacttcatcttcacacccaaaactccacacaaaatatctctccctctatctgcaaattttccaaagttgcatcctttcaatttccactcctctctaatataattcacattttcccactattgctgattcatttttttttgtgaattatttcaaacccacataaaaaaatctttgtttaaatttaaaaccatggatccttcatttaggttcattaaagaggagtttcctgctggattcagtgattctccatcaccaccatcttcttcttcatacctttattcatcttccatggctgaagcagccataaatgatccaacaacattgagctatccacaaccattagaaggtctccatgaatcagggccacctccatttttgacaaagacatatgacttggtggaagattcaagaaccaatcatgtcgtgtcttggagcaaatccaataacagcttcattgtctgggatccacaggccttttctgtaactctccttcccagattcttcaagcacaataacttctccagttttgtccgccagctcaacacatatgtaagtcctaatctctatatatactaatatataacaaaactttatatatatatgtatatatatatgttcgtatttctgtgtgattctcactaatttgaggagatctatctactaattcacaataaaatcgtgaccactacaactattgggtaaaatatttgatttctgtggatttttccctatggtgcagtcaaaattttaatgtagttcttgagacttggcttttggttggtgttttcgatacatcatcagagtggttagttagttgtaattataatatatatgattgcttgaagcattcgtgagtttatatatataaatgcaagtggggatcactgttttccgaaattttttgagacttataatattttacaacccacttgtgtgtcttttggtttaaagagatctcttgaaatgttctacattgtacaaatgttttacattgtttgttagagatctccaaaaaactttctctacaacattgattgatatgatatgcaactgaattgtttatctctctaaataaaaattacaccaacgatgtggaaactcacttatctctagttgcataaaatacaaaatattgagaatgagatggttagagtttatgagtattttttttggctttgtgattttagaaaagttgattaagacaagtttggagttgaatctaatcataaaattatttaaatagggtttcagaaaggtgaatccggatcggtgggagtttgcaaacgaagggtttcttagagggcaaaagcatctcctcaagaacataaggagaagaaaaacaagtaataatagtaatcaaatgcaacaacctcaaagttctgaacaacaatctctagacaatttttgcatagaagtgggtaggtacggtctagatggagagatggacagcctaaggcgagacaagcaagtgttgatgatggagctagtgagactaagacagcaacaacaaagcaccaaaatgtatctcacattgattgaagagaagctcaagaagaccgagtcaaaacaaaaacaaatgatgagcttccttgcccgcgcaatgcagaatccagattttattcagcagctagtagagcagaaggaaaagaggaaagagatcgaagaggcgatcagcaagaagagacaaagaccgatcgatcaaggaaaaagaaatgtggaagattatggtgatgaaagtggttatgggaatgatgttgcagcctcatcctcagcattgattggtatgagtcaggaatatacatatggaaacatgtctgaattcgagatgtcggagttggacaaacttgctatgcacattcaaggacttggagataattccagtgctagggaagaagtcttgaatgtggaaaaaggaaatgatgaggaagaagtagaagatcaacaacaagggtaccataaggagaacaatgagatttatggtgaaggtttttgggaagatttgttaaatgaaggtcaaaattttgattttgaaggagatcaagaaaatgttgatgtgttaattcagcaacttggttatttgggttctagttcacacactaattaagaagaaattgaaatgatgactactttaagcatttgaatcaacttgtttcctattagtaatttggctttgtttcaatcaagtgagtcgtggactaacttattgaatttgggggttaaatccgtttcttatttttggaaataaaattgctttttgtttaaaccaacataaattcctataaaatatatatagaaattgttaaaacacatattcattatagacatatttgtatgattattagactgtgtaaatggtgatagaaaagtagcctaaacttgtttttgatctgattttttttattcactcaatatctcagttacattaaagagaattgttttgcaaggtgggaaaatcaacttgcattacataatgttgtcaacttgagactctagaatcgataatcacatgtttttccaagcagtctgcgtgccactagattagaagttctatagttgaattgtatattcgttcgatcgaatagttttcgaatcatttcgacttcgtgaacaagatccttcatagaagcccgttattctggtacatcagcatccaaaataatctccttaatttgcatcattttttctaaacctatattggtgtactccatattcttctcccacgctatattaatctagctactaatatttattgaagcagttttaagtaaacaggttcatggttacactgtctgaactaataaaatcagtttaaaattcactgaataatacaaacatgaaactaaataaacttgtagtcttgtagattgttcggtaccatatgacttttaatgatgcttcaacctttaattagtatatattcacggcttaaatttaaaattacaaattggttaatgaattttataaacccaatgtcaaatttgtaaaacaactttttaatatttctaaatttaataatgtatatgtgtgagctgtatatttccttatatgctatgtgtgtaatcagctaatttcaagatagaaatcagattatccaatttcacctatagtgtggtggactaatggattttgagagtttccataaaataaatctcgtcgctctaataatatagggaaaaaatcaagtgatagttaagatatttgtcgattcataggctgtgaatagtgaccaaaatcgcacccaaaaccgcaccgcaacagtgttataacaatatcaaaatctctatatatatatatgtatctatgtatttttgttaatatttgaaccgcatcgcacttctcccgtaccgcaaaatacagtcaccattcggagccataatttcttatccatttatctatagattcgatggactcgatttgtcagaaaagtattatgaccgacatgaaaacacggctcgagccgtgttttaattttatatgtttagtctacttcgaaagggaaacgaaaagaaaacacggcttgagcttttcattttaacactttacattttcatatattggatttacttttcattttcacacttggtgggatctctcacaagcaccttctaggtcttgttaatttagttgtatttatttgtttatttctcgcgttgcggaaagagcaagctatccactggcttttgatcttgtcattataatcattgtctgaatatttcccgaaataggtaccatcagatccaatttgcttggtctgtttttatggatgtgatcatcaaaaaagaagttagcagttaattaagagacagcatgattaataaatatcatcgcagtgatgattattctaactagtataacaatttgattggtaaatataattattttgaaaaatttgaaagacattaaaaaaaaaactgttaaataaaaaatagttataacaaaataatgattgttgttttatgtttgaagtggcggatagttgtctaaaacatattccaaatgccttatcatatatagtatatgtttgagagtttattttattcctataataatcgttacactttatagcaaaaaggctaatttgtttttgttataacggcaagatgtgtaattaaacctataaaattgagcatatacactagatactcatattatacattgttttctgcaaaatagaggaataattgatttatttcttgggtatagttttttgaaacatagattattagatttcacatatgttttttaattacatgatatcatactagttaattaaatcacacgccaaaaaactcttattacatgtttgtcatcgaatcttattgttgtgtagagtaaaccttccaaaaaaggtaatctacaaaataaaccctaatacgtatagaaagtataatagtgaaccacatacatttagaatagtaataaatatgaataaattaacctagttaagagaataaaatctagttatatacactactagatcatgaatctattaatatacttataaaatcctttgaaaaagaaaaaaaaaaaaaacaatagcagaaagaaggaatggacaaaaagaaaaaaagaaagcaaacgacattggtaagtgggagtcacgtaaattctgtctgttgatttaagatttgcgtatacacgtgctctgctgttttttttcatgactcactgagtcacttcattgctagataacatttttagaggctttttattgaattttgcccatataagattcacacttttcttttgattacttataaattctactgataacaaactcttttatgatctcacgtgaaacgtataaacaaaataatcttaagtcatttagtaagagaattgttatacaaaagagaacaatccataactaaaccaatggaagctattttccctgcatacatgtaaagaatcaatattttctaactggacttaggaaatgagggatctccaatgaagccattggcccaattatttggaatatggcccatttactttacttcacgcatgctcgtttctttttaaatgttaatcactgtccactggtcctctctctatgtactgtttttccgatgaccgaaaaagtattttattatttcaaacgtaaattatgtttgtgtttacatatacctttttttttatgtattcaggataaaatattcttagattttcatacactaattttttttttgcttgatatttaagtgatgtctaaacatatataagatctatcggtatatgatctattcaaatggcaattagagttggtaaatttattatcttccccagcattaagatttgagattcattcagtttgaagattctttgatattttgtgtatttttattttagtagttacgcttaatgatattgattttatttttaactaagacttttctgaatccaccatttgttcgaattatatatcatctatagtggatcactcaccacttgtttcgtcggcaaatgaaagatgtgaattttcttaacattttttttctttttttctttttataagatgagcattaaatgtaaaactcgatagtaggtgaaatcgtgtattgttatttgttaggttcgcaattatgatgacaggccattaatataatttggccttgtaagtcacatattgtatggttataatttctgaaagtttttggaaggcgtagagctttatagaacaccactaattttaaagtgtttttaacccgaagtttcaaaatgtcacttagtacacatgtataaaacacacagtaggcctaacacagattactttacagagaaattacatgggcaaaatcgtattaaaacatcctccccataacgtgctctcttttccttagacgagtgtcccacctttgacgaactcagtgaacgccaacgcgaccaaaccgagcatcgcgaaacgtccgttccaaagctcagcgtctgacgtcatgatacctttggacttggactcaacgcttatgcccttgaaaagcggcacaagcgacgcaagtgtcaagatcgctgttgtaccgaggaaccatgagacgccaccgtcggagatctgagctaaaacgttttcacccttggatagctcgacagccaacgccgcaacgaatccaaccatcgctaaacgtccgttaatcctctctggtgctggaccgctaaacgctagcaagtcgctaaactttgtgctcacctatattcaccaccccaaaagttattaacaaagattcacaaataaagcttgtttaatgaattttcaagattgtatgttcttaatatctaagacccgattaattaaaatacaaattcttgtttatcaaaacttctaaaattataccttaggtttcataggaggaggaggagatggtgacttcggcaacggctgagcggccgaggtagatggtgctggtgaagagtcttcattcgtgggtcctccctgaaaaagtcaaataatcagacggtcaggatttcatagtcacatgatgaatggccgttgtatcagggaagtggagaataacgtacctcagccatgcatctcactcccaccggataattcctcttgaggttagggaagctaccggcggagaaaagcttgttggtgttgatcttgcgagtggttaatccaccggcgaagactgattgcatgttgaacgatgctgttgccatttctaaagcttagaactactagtgtgagagaaattaagaagaaacttggagtagctaagtgattatcgcttaggttacagaactttaagctagatcgtgtgtagaagcttgatatgagtaacgaatgatcttacgtatgtatttataggacgggtgatcagaaatgataggtcattaggtcgagttgtttcctgaactttcttttagttatttacttatttagcctttcgatattgataagttaatatagttcacacaaaaataaccaacggtcaaaaacattacacgtgaatcatatagtatttgaaaggttcactatctaggttgaaggatcagcgttcaaattttcttactacaatttttattctgatttgttattaaactgtttcaactggattaattaacacacaccaaattcattataagtctcacatagtatcatattctttattgttatacgagtagtaatcaacaaagtcattaagtacatcacctcgataaaaagccaattctatggaaaaattaatatggacagtttatctacatttcatattcttatgaactaaaacatgctaattattttatttggatctccaagatttttggacatccaaattatttctaaactgactgactcgtgtatttggccggtccaaaacaaaacacgtaggctccaaaagtgtaaaagaggaagctgcgatatttaaaggaaccacgttgcttagattgtccccacgcataacataaatttaacttttgaaggacaaggaacaaagtccatggcgtggcctactcattcgccacagtttcttctcacttttttggccaagtgccaagtgggttaggttaaaaacgtaaaaaagattctctccatctcccaaaaacatgtggctcaaaaacaaagcataacattgctttcgtttctagaatacgttcatttcattacacatctctctttatgcttttggaacttagctgagtttggattcagacaggcccatacttagtctggccgagtccgtgactgttctctctttgtccctttctacgtggccgatcctaactccgtcagttttttggtaatatttacggtcgtttcaaaatgtcaataactttacaattaaatggagataaagattatttactgttaagaaaaaaaagactatttactcttacagtcatacgtatctcataacgggccgtatagggctcattaggcccatcaactctagcttccctaaccaaatcatgtctttcgctcatatatgttcgtttctaatgtagtgttgaccaaatctgcaaattgacattctgatcattttagtctttgataacatatgaaagaagaattgtcattctcaacctaaggaaatttggaaggattcacttttacatggtaacacaaagaagaaaacatatgattctttagattttgttcccggaaataatgatttcttagaatataagtactttgacattattgaccaaataaataaaaactaccttgacattattatgcatacataacagtcaattctttttaacacatatcaatggcgtagataaaaaaaacttccaaaacgtacattaagtcattaaccaatatatatacaaaaatcaaaaattttttgtaaaaacaaacatcactgaaacactttttgaagtaaaattttatcaatttaatcataatttagatcgtattttacttacattaaaattagtaatatttttctctaactctctttaatgaccaaaagccgttgaccaataaaatctccccgtgtcgtcataaaccggttttaatttccggtttggtaatctaagtcgcaataaaatcctctttgtcttcttcttcttcctctactcggcgaattctctcgagaaaacaaactgaatttttttgatcgaagaagatctaaaaaaaaagatggagagacgacaagcgaagatccatgtctttgtattgataggtctaattctattgaattcaatcaatcaaatctcatctctctctgtaacggtgaacgacgaagaatgtgtccaagagtacgtcctttacgaaggcgacactgtttccggtaacttcgtcgtcgtcgatcatgatatcttctggggatccgatcatcctggtttggatttcacggttagcgatctttcaatttacctttttaccccaaaagttcttaactttgatacgtttccttcgataatcccaatgtttgatttatcgtgaaattggtgtttctcatgcttaattttgacctgatctgatctttgtaaggatgtgacaatttagggtttggttgggattgtggaaatttgctatctttgattggattggattggattttggttagggttaatgtgttgattgattcattggattgtgtttgtgtaggtgacgtcaccagctgggaacattgtacagactttaaagggaacatctggagataagtttgagtttaaggctccaaaaagtggaatgtacaaattttgtttccacaatccttattctactcctgaaactgtctccttttatattcatgttggtcatattcctaatgagcatgacttagccaaagatggttcgtttccattccccttatgtatgatc

SEQ ID NO: 452 - DNA, 79284 bp, Arabidopsis thaliana
gatctttaaaccaaacttaactatcagattcaaaatatcagacagcttgcaaactattattagtatgaacaaaaatgtattttgaaaacgagacaaataaatgaacaagcaacattgaagcttcattaacttctctaatctataaaactgtgtttatctgttctagaagcaaaagcactgacagctaggaagagtgtgatgacactctcaccttaatggtactcagaggtttattcattagaaacctatttacagaaactgaaaatatatcgtataatactatttaatacacacatattgattgtttagaattagtataggataattaaagctacaaaaaaatgtagtcagtattctttactaggaatcaaaaaaaaaatctcgtagttgtaggtgcacttttaatttggttcttattcatttatgaagaaattaaatataaagttcctttttatgctcacctataaaaataggtttatttatttataattttcccaacttgtattgtaccagagaggtatagaaccaaagcccaattcgaagcaatttaaagtccactctactattatcttgtaactttttatacgtaaatgaagatactatcatctagtttgtcatcagaggctatccattagataccaattacaaaaactgaaatttcaaactctacgtaaatattttaatataggacaataaaagcttgaaaaattgtagttgtagccttgtaggtgtacattaattttggttcatatattatagttctcaaaacaatttaaaactatcatctttcttcacttataatttctccaacatgttgtaccaaagtgagcacaagcccaattcgaagcccaatcaaaaaggaagacacgtgaaaatataaactcaaactttacgagccaaggttctttgtttagtggcgtattgaaccactttctcctcaacgtgtaatcctttcctacgtcgtacggcgttgatgagtttcctcgcggtgtttggaagcacgcttgctccgtcaccaaactcctcgatctcttcttcggttttgggaacaaagaaggggtcttcctcgagcatttcccaatggctcagaaccatcagagcactcgcgccaccagacgttccttttctcagctcgtctgcaaacccgaagctttctgaaactggaacatacgcgtggactgtgaataaagacgacccttcttgcatttcttccttgagtattctagctcgtcttctgcttagaacagcgtacattggaccaagatactcaggtgcagtgttcagttcgcagaagtacattgcttcgacgatacgtggatttgtctggagcacggcggctctacatgcgtctttgacagctgtcatgacttgtcctgtgaaaatgccaaagttttcgggtttatctgtttcaacatcttctgcgggagcgagatgagattcaatggtgaaagctaatccccacattggttcatcacaaagaggtcctgatgctgtcgctagctgaaaacccgagacgatgctgctctcgagggtcagtgcttcactgtacaatgctgtttcagatacttctgcaggtgtctcagtagaatcttctgtgaagccaagtctctgagagacatgaggagagcctcttacaagcattgatccatcctcggcgattcttttaccatctggagcgaatagtatgtttggacctttttctcttggaccaagcgcccaaattctcttgagcagtttcgaccattcggttttacatttttcgcgatccttttcggtttcagaacttgatgaaacgccagcttcaactaactgtttcttcaattcttcgatgggatccacattctccccgaggcttggcttttgggattctagaatcttaacgctatgactgcctttacctccaattatgtcaccaagtaattcagtgttctcatcaagcagcttggttagagcgtgtggtagtttcatgacatgtactctgataatgcatctgccatttggagttctcttctcgatgtaatccgaagaattcaagcttagagatctcaaactttccaaaagattagatccatcaccttcaatggtctccctgtaggacacgagaggtggagagacttctaggttcacttttgcaaatctctcttttaaatccttaacgcatctttcaagatgaacctctccagcagcagcaagtacatgttctcctctagcagacactgtaatctccacaaatggatctgctcggtttagaagtcttagacctttcatcagagcactcatatctgcaggatccgatggttcaatcgcaactctaagagtgggagacacctgaaactccatgctggctaagggccaacagtttctagtagatgagagtgttgcgctttttgatatatatggtccaagccctcttatggccactacatttccggctttcacctctgttactggtgttaaaccttgccccatcataagatatagggaatgcagttctgcttcctgaatgtacttgtgagacgattcccccttgaggggatcatatagggcggtaattacaaagactctttgcccagcccgaagtaccccgctaaagatcctagcaaatgcaaggaagcactcatctgactcgcttttactgtcatcatcatttaaaccgttcatcctctctctgtgatttccatcttgaggaatcattttcattggaatagcaaacattttcgacacaaacacaacacaaggactgtcactgctagaatcacaagcctcgattgattttctaacaagctctgcttctgccaggacacttgaatcaacatcatcaccaccaataattttcctttctggaaccaagcgtgggattctatatgcctgtgctgcaatggggtctggcagatgtttcacagccatagacaagactgcatcagacagaggaagccaacggctcatcaccgattgaagcacgttttttggatccttgttctgaagttcgcgtggtggaatagacaaattgaaagatttgataactttctcaagaacggctttatccccaccaggatctagtgcagcttcataaacctgccacaaaggctcaagcacaaactgcacaaacattggtttcgccttgcttccagcacttaaattcttcttccctactatcatcttagtcttaggaatataataacgaggaccccataacgatttctgcaacgcagtcgcactagctccaagcttggaggcataaaaattagcaaactccgcaatcccaaaaccccacccgtctaaagcacacacgaatactacattacctttctgaggctgaaaagtaacttcttcatcatcctccaacaactcaagactctcagcagacaactcccctgaaggactagcaagtatagaatcaacatccgacaaatacttctctgacttatacgcactcacaatcccgttaacctcatgaacaatcctaatcaaacgagtatacgcctccataggactcaacctcaactcaaaaatcaacctatcaatcttattaagcaccaaacaaggagtcaacttctctatccaagcttgacgcaacacagcatgcgtttgaatatgaactccctcaacagcatcaaccaaaaccaacgcaccgtcacttaaccgagcagctgttgagacttcactacagaaatccatatgaccaggagaatcaatcaggttcaaagaatagtctttatatttaagagaaatcgaagagctcttcatcgtgattgcacgtctctgttcttcatctagatagtccatgaacctaagcttcccggcaagtctcgggtgaagaacaccgccaccggaagaagcaattaggtgatcggcgagagtcgtcttaccgtggtctacatgtgctagtatacatatgttcctaactttcctaccttcagattcatccatctcttcaatttacaaaacacacagctacctgcagattcaatatatacaaggattacattatcagaatcgatgcgattcaaattagtagagaaaacttcaacaaaacataatccaaatcctaaaaccttgtgtgagagctcacgaatttttgaatcgaatccacagagttgtgcacgtctcgtaagaatcaaagagagataaaaacgagagagatgctctttgaagattccataatattttaaaaagttcgattcaaaaattgagtgatatgtaaaaaaatcaccttaatcagttgatggagctcagacgtttgaagaagaatggtgcgaaacttgcttcggcggcgaaacaacggcggcgcagggtttggcgatttccctctgcaagtttgtctgtataaacatatacaagaagacgtgaacgtttttgattttaattaaaccggaaccctgtaaaccagagagacggtttagtgctctcttttaacaattttaattatagtctcggactcttcaaccggaataaaccggtctaaaacgtttttaatttcaattgtaccgaaaccctctgactcacaaaaagtgtttagtgctctttaaacaattttaatttttaaatcgtcttgggacttttaaaccggaataaatctttcgggtcaaaatttccgaaccctaactttagccccaaattagagagagatgcagaaacgggagcttgggaaatccggcggtaattccggtggatcttcgggtccaccagcgaagagaggccgtcccttcggtagtacaagtgctaactcagctgctgctgctgcagcggcggcagcagcggacgcgatgtcaccgtcagctttacttggtccttctcttctagttcacaattccttcgtcggtaagctcgcaatgaccactctataattcctctctgttttcttcttgtgaacgagtttttaatcggtaattttcattgggatcattggaatttatagagcagaacaatagaagaatagttcttgcgttgcagagtggtttgaagagtgaggtgacatgggcattgaacacacttacgttgctttccttcaaggaaaaagaagatattcgaagagatgtcatgcctcttgctaagatagctggcttgcttgatgcccttctcttaattgtgagtttatttaattgtttaggtgttgggattgtgttttcctctctgttctttgaaccaacatgatgctaaaactttggcagatagatgattggcgtgacatagctctcccaaaggacctgacaagaggaactagagttagaactttaggtacaaatgcttcagttacgggatttggcaatgagtatgatgctctagcctctattcaaccccctgggtgagctaatttcgatactgctttgattacagttttaaatgattgttgcttatatttagaattagaacctaagtgttgttaatatttggcctagcagatccgggattggttcttctgctgctgaggcattaggaaaaaagagcactggtaaacatcagtcatctcagtggtggatggaagaggatggtttgtttaatctagacgatgaagggagatcagagaaacaaatgtgtgctattgctgcatcgaacgttatccgcaacttctccttcatgcctgataatgaagttgtaatggctcagcatcgccattgcttagaaactgttttccagtgcatacacgatcatatgaccggtaaggaagaatactaatgttttgatacatacaatcccaacctttttgtttcttttactagttataattccttacatttgcttctgatagattcttatttcttattggtttgaattggcttgaatgtattctctctgtttccttatttgcttgatacttgattgggaactatggtcttaagacaatcttttgttaacagaggatgaagagctggtcacaaactcgctagagacaattgtaaacctagcgcatttgatggatcttcgaattttcagctcgcttaagcagtcatacatcaacataaagtgagaagttgtatctccctgcattcttagttacacaatccataacttgtttcaaataccaatgtgaatcattcattactcttgtgcatatagtgaaaagaaagctgttcaagctgtggtcggaatcctcaattcttctgtcaaagcttggaattgtgctgctgctgagttgctagggcgtttgataatcaatccggacaatgaacctttcattagtcctttaattccgcaggtttgttaacttctataatcttcatatggtttctggctacttactcgttttaactagtatttaaacccaacaatggacctatcccttgcagatacacaagcgactaatcgatcttttgagcatacaagccgttgatgcacaagctgcagctgttggagcactctacaatctcgtggaagttaacatggattgcagattaaagctagcaagtgagagatggtaaacaaaaactatactccctctctatcgaatacaatcaaactgtttttagatcgcaacaatgacacaccattatgatctttttcagggcggttgataggttgctgaaagtgataaagactccgcatccggttccagaagtatgtaggaaagctgcaatgatccttgagaaccttgtctcggagcctcaaaacagaggattgctactcgcgtatgagaatgctttcgctgagctgctttttcaagagggtaagtattctgattcatttgctaggattttgtatgaactcactgctagatctaatagcagagttgcttcagctagaggaatctggggcatgtaaaagtcttctctagattagtgggtttgattaattgattgtgttgtaaactttaatcatttgctatgtattaaaaaagcagtgttgttgaacaaaaagtagatggattcttctctcgcatagcttcgacatgtgttttgtttgatctttactaaaaacaaatttgagatattttgtgattcaaattgaaaataaaataacccaaataatcacgttttgacgttagaatagtgtattggttaatcatattcatatactatacaataaactaacaagaattaagtcacacataatacagtgttttgtctttacattttttgttattattactctttcttcaaaatcaatgtgtcttttcttgtagacgaggagacgttttctcttgttatacatttttatttggattcggttcgtatagtagaacataattatattttgaacaaccataaccattaaccacctaattaacccataaattgtgaccaacaactttctacaacgcgaactagagcatttctacaaacgttaattgcgtattccacatatattttgctaaacttgaatttcgtgaagattttagtaaccttcttctttggtatattatggagttgaaagaatatataaccgttgctttaaacacacatacctgtatttcgagacaactcatctcaaaactaaactctaaaatcaagttattgcaatctttctttctttatgttcatacaagatagtggttaactgattcacacactaaacatttggtagaaaaatatcagaacaataagaagaatatatttggaaaatggtttgattggtgatataaaattagttagtggttaaagatgaatgtatagatagaagtgataagagatggctttgaatctttctttttgtttctgctaatttgatggatattcaagcggtatattttgtatcgatcaaattctttatgctattgagatatctttaacttggagcgcattattgaaactttcttgtatataatgatttttttaccttgttgtataatatatgttcattatatagtatgagtaaagttgaaggagggagattttatttaacatgtctattaagaaaacaacatttggtggttggggaagaaaccaaatctaattttctaattgtagtgctacttgaagagggtcccaagtcccaactttactaatcaaattgcacctcttcattggtccaagtgtggagcctctagtgatgtcacgcgtcgagaaaataattgcatagttttcaagttataataacatgtactaatactatagtctaaaaataaataatatgtgggtagaaagagaccattatatgtggtccattgatgctcttcttttggctcgtattagtcgcactcctgtcgaccaccaagtggacctctcgcttctgtttgatttgtgcggttgtgtgtataaccaaacagaaatttgaagcaagtcttattcaataagtcgtataattgatatgagacttatgatacacacgtgtcttgttttaatctatgtttcattattggctaaaacactagtccaacggtaaattagtacttagcgtctagattacattaaggagatcagtatttttgtcgttcctcataatcaaaataacataaattgtttttccaactattacaagttttctatacgatgacttgcgtaccaagagtagtttatcaattgtagtaggtcagaaagttaagcttgaatagttttttattcataattgtatcttattaaagatgccaaatatatttatttgactatgtattttgatgtgtatttttctaattttgattagaaaatatataaaaattatgtatctactttcggaaatacaatcgaggtgactcatacatggttttaatgcaatagtcagcttattaagcgagtttggtcccttcgtataacttattgcacttaattatatattgttgttgttgttgttgttgttgtttttttaccaaaaaataaaataaaaaattatatattgttgcttctcgtagaaactagtagaaagcaaagaccaaagtgccatgataacgaaatgattcatagtctgtaacattctattttgacgatactcgttctaaggaataaatgaatttaattgcatagcgatgtttaacgaatatataattgtaaaggaaaaactaaaaaagacaaaaattattacgaaaactactcttattggtggtggagcatacatcccccacagcatcatgcaagacaacgtagctttcaaaacttcatacatcgatttcaagtatatgttttttcttttgtagataattaaataacaaagttggtgactcctatatagagagaaataattaacaagcttttagtttcagatgttatgctaatatgctaatgcgaattaccagataacttactgaagatattacaaaagtgtatttggttccatttttaatcatatacgtattatgtagcaagttattcaattatttagaatttttatggtttaagcaagtaaaattccagtagtcgggtcccattatgggagacttgagctctcatgctcacaacatcaccaaaaatgggaattctcaaaaagaataaacatcagcaaaaatggcatagccacttggcaaaagattattacaaactaaaaattatctatttagcatgcaatgtttattctatttctttttcttatttcaaaatttgcagcattatgattcacagatctagaatagaattggccacttcacaaagtaattccaattatgaattagaaaatcttattcatttctctaatattaaaaagattttgttaaaaatatataggactctgctttctttaccaaatattttgtgtatataatgtattaatcgaaacacatggcaaacatacaggtagagctaataatataatcatgtaatataatattactatatcgcttagatctataattggtggttccttgttatttccgaatattgttatttatatcatggtgtcgttttcattttgggggtcaaaatcatgtcgtcttccactcgataatggatctcggaaaattatttctatgaatactattttggtacttatttatatctttcgtttcggttttaccacatctctaacatgaaaatagttaattctttgacaaaaaaaaattttggttaatttagggactgcgaaaagagcacgtaccaaaatgttttagattacaaaaatggttgaatttatggccactattgaaaaaaataattaaaattccacaaatcaagattttacgtgaacattttggttaggatgtattaacatacatgtgtacgaaaaccatttttagtcattttcagaaaaattatgcgttacgaaataactttatatatccaatgtaagaaaataaaataaatttgcctaacttgtcctgtgaatgaatcatttcaaatgataataaaatccatttgtttaatgatgataatttatatatccaatgtaccaattcattcatgcgttacgtttcaccttcttccaccttattttgattgcagatagaacacctctaaaccacataaaacatatacacacaaagactcgacacataatcgaaattttatataacgaaaaaaaatgtagagctttaatttattattgaatttcaagttatcgtatgtctcacgtaattcgacatataattccatggggagaaataagtttatcacgtctctttgaaagttcaatggtcgtatcgtttatctttttgtcccaataagctatctaactaatctaagtgaattaagtctacttaagacaactcctacttagttctccccaatttcttcaattaattaattttcctaatcacatttccaacaatttatgcatgcgtataaaatacaattatatattaatatgtactaatacaaaattttatgatctagaacatgtataagttttcttttttttttagaatatctaaaagtttaaacccaaaaactcaaaaactttacgttttttagagacagaatctatactaaattaaatttatttctctaatagacgtcgaactcattatctctatatttgaaagatttaccactgaatcaacatcatattagtatttgtacaattatatagaacgatatacatttttgccaacttttgaaattatactaaatgtctaacctttaaaccagtttactgtacaaatacctatgtaaaaagaattctgtgtgatatataattgtaaatataatacgcaaagagatcgtcaattttgaaaaacactttaaatagtaaatattatatagaaatttatctccttaaattagatgtctatatgttcagaaaaaatattggtatattttaaaaattacaacatggcatctgacctgctcagaattaaaatattaactgtagaagatattttgatacaacataatcatatattattccactacctccaatagtccaaatatatagcaataattttctaaagatacgtatcaagaatggtttaatatgatatcattgttacatgcatatgcgtaatttttttcatagttaatatattctttgtaatatggagccgactgatgaatattggtgagttctagtgtgtgacaaagatgccattgttgactagcaaattctaaatctgaggagaataaaataattctagaaattgaacttttgtttttaacaccaaaatcaaaaccaatgggcccaattctttgctgacttggccaaatgagagccgtccatatgtcagtcgacaactgccaaacaatcttgacggtttgttagtttggctcaaaagccaccagtaatcactgatcagtttgggacttgagtaaatgacttatttacccttagttcaataatacggttttgtgtgatttaatttgctagttaagttaaaccatatttaaggatggtttaattacatttcaggtggaaaaaattgatgagagaatctagctagaaaaagatggacacgtatggaccgttgaaagtaggaatacaaattatttaaggaatacaatatttaatttcaacaccaagtgtcgaatagatacaacaataataatgatgaacaccaagatttattttatattctctattttgaatattgattactccaactttttcatgatttgtttttcagcacttgagattggaatagacacactgtgatatcgaccataaaatattttcttaggaatatatcgttgtgtataaagtataaagttaagtgtaatgctttaaacaagaaaaataaaagagttgagattgtaatcatagcaaaaggctattttatagaccttttagcggatggaaaaaaaaaaaaaaaaacaccttttagctacatgatgtagcctacatcatatataaaaaagataatagaattatttaagaaatgtaatgtgttataaattaataaccaacacatacacaataagattcatataagtttatgaaatcaaggttgtgatattgttgttattgagatccaaaacttaaaatccaaaatatcagaacttttggagcattggattatataaaatatatttttctcaatcaaatctttttttagttaacaactttaaattaatcgcaatagaattattcatgaaaaatgttatttacatataacccaatccaatgatttcaaaagagatattatagaattttgtaaagcattaaagatttaactacattttgttacatagacccataatcataaaacctttgattcatagtttcattcttataatggtctcttaagtatgaaggtgttgtagcggagactagaaatatatatgagggtaatgtttgtctgttgagacacatttttacaagctattaaaaaaaatgattccaacaatatttattgaaagtaaatgtattttattaggagattttaaaattaatgtcatattctaaaatgtacaatatatacattattttttgaagattttacaataaatttcaaagtgaaactgaaatgattttattaaatttatatacataactctttgtgtttttttgacagtcatatatataactcttaaacacaagcttttacagaacatctacagttattttaggtgaataaacactccaatttcaaacaatttaaataaataaatgataattatctgtcaacccataaactttacattgtaagaccattttattttatttattttgactatttatggatatgtgatattattgagaaaaaaaacactattactaattgacagaaaaaatacacttaatattttctcctaaattttctcaacgaattaattacaaaataatgtgtataccaagtaaaaagattctacttctcagtgacagcagaactaatttattcaagggtagtttcggaataataaaaaagcaataaatctctttttcctataaaagcaaagagacactcaccaaacaactcgtccctgaaacctctcttcagaaaactcaggcaccattttctccttccgccgccgccatggaatcacttccccagccgcaaaaccaatcatctccggcaacaactccggcgaagatcctccttgggaaatacgaactcggtcgtcgtctcggtagcggaagcttcgcgaaagtccatttagctcgatcaatcgaatccgacgagctcgtcgccgttaaaatcatcgagaagaagaaaacaatcgaatccggtatggaaccaagaataatcagagagatcgatgcgatgcgtcgtcttcgtcatcatccaaacatactcaagatccatgaagttatggcaaccaaatctaagatctatctcgtaatggaactcgcttccggtggtgaacttttctcaaaagtcctccgtcgtggacgtcttcctgaatcaacggcgcgtcgttactttcaacaactcgcctccgctcttcgtttctctcaccaagacggtgtcgctcaccgtgatgtgaaacctcagaatctactcttagatgagcaaggtaacctcaaggtctctgactttggtttatcagctttaccggagcatctacaaaacggattgcttcacacggcgtgtggtactccggcttatacagctccggaggttatttcacggaggggatacgacggagcaaaagctgatgcgtggtcttgtggtgtgattttgtttgttttattggttggcgatgttccatttgatgattcgaatatcgctgcgatgtatcggaagattcatcggagagattatcggtttccgagctggatttcgaaacaagctaaatcgataatctatcagatgttagatccgaatccagtaacgaggatgagtattgaaacagtgatgaaaacgaattggttcaagaagtctctagagacttctgagtttcatcgtaacgtctttgattcggaagtagagatgaaatcgagtgttaattcgattactgcttttgatttgatctcgttatcgtcgggattagatctttctggattgtttgaggctaagaagaagaaggagaggagattcacggcgaaggtttcgggtgttgaagtggaggagaaggcgaagatgattggggagaagttaggttatgtagtgaagaagaagatgatgaagaaggaaggagaagtgaaggttgttggattagggagaggaagaactgtgattgtggtggaagcagtggagttaacggtggatgttgtggtggttgaagtgaaagttgttgaaggtgaagaagatgattcacggtggtctgatttgattactgagcttgaagatatagttctttcatggcacaatgacatcatgtaaatagattgtgactttgtggattttagtctcttttttgttttgtttctgttcagttttgtataatccatgaagaaatcaaaatctcccgcttcattgtctttttaccagcagatacattaccctctctgctaccgattccataagctttgatcactacatggtactcaataatgattctcttattcgctccttgtcgctaagcccatgggctcaactcaacgcatcttcaacatcctcaatataaaattcaaagcctcaagaataggtggggataatgtatcttagacatttcgtcgaattggtgggtgctaaaaaaaattcttcagtaaaagaaaagggacgtaagataaggtccaacaaaaacaaattattcataggaagacttgccaagtcaaaagtcaagctcctcacacttttataaaaacaagtgagtttatgctcatcacttaccacaaacaaattatcttcctttcccaaaaaaaacgaaattgagagacgatgattcgaagcctatcttattgctttcttaccatctatttcttcttgagcattcttccattaccaaacaccattgcttgtcccacacggttactgtgccgcagcgaccaaagagatgctcttttagaggtacaaaaggagttacatgtaccaacaactacatggaacaagaacgttgactgttgttcttgggatggtgtcacatgtgatgctatattgggagaggtgatatcactacaactctattatagtactgctaacatcttcgtgagctagtgctttcacgttgcaaacttcaaggggaaattccttcttccattggaaatctttctcatctcacatatcttgatctttcgaataatcaattagtaggtgaagttcccgcttcaatcggtaacctaaaccaactagagtccatgcgtctttgggataatgatctaaaaggtaatattcctacttcatttgccaacttaacaaagctttctgaattgtacctctttggaaatcagttcacgggtggggatacagtattagccaatttaaccagcttgtccattatagacctctccttaaattacttcaaatcctccatttccgctgaccttagtggacttcacaacttagagcgattttcggtgtataacaactcattttccggaccttttcctttatcattgctcatgattccttctttagtccatattgatttaagccaaaaccacttcgagggacctattgattttaggaataccttttcattatctaggctaagagtgttatatgttggcttcaacaatttagatgggctaattccagaatctatatctaaattagtcaatctcgaatatttagatgttagccacaacaatttcggaggacaagtccctagatcaatatctaaagtagtcaacctcactagcgttgacctttcctataataagttggaaggtcaagtccctgattttgtatggagatcctcaaagttggattatgtggatctttcttataattctttcaactgcttcgccaaatcagtggaagttatcgatggagcatcattaactatgttaaatcttggttcaaattcagtcgacggaccattccccaaatggatatgcaaggttaaagatttatacgccttggatttgtccaacaaccattttaatggttccattcctcaatgtttgaagtattccacttattttcatacgttaaatctgagaaacaacagtctaagtggggttctaccaaatttattcattaaggactctcagttgcgatcacttgacgttagcagcaataatttggtgggtaaacttccaaaatcgttgatcaactgcgagaggattgaatttttgaatgtgaaaggaaacaaaatcatggacacgtttccattttggttgggatctctaccatatttaaaagttcttatgctcggatcaaatgcattttatggtcccgtctataacccctccgcatatttggggtttccaagtataaggatcattgatatatccaataacaactttgttggatcattgccacaagactattttgccaattggcttgaaatgtctttggtgtggagtggttcggacatcccacagtttaaatatatgggaaacgttaattttagtacgtatgattcgatcgatttggtgtacaaaggagtagagacggattttgatcgtatctttgaaggtttcaatgctattgatttttctggaaaccgattctccggacatatccctgggtctattggtctactgagcgaactgcgtcttctgaacttgtcaggcaatgcattcacaggcaatatcccaccatccttggcgaatatcacaaatctcgagtcattagacctatcacgaaataacttgtctggtgagattcctataagtcttggaaaactctcgtttttgtccaacaccaacttctcctacaatcatcttgaaggattgattccacaaagtacacagtttgcaactcaaaattgttcttcgttcctgggtaatcttggactctatggtttcagggaaatttgtggagaaagccatcatgtgcccgttcctactacatctcagcaacccgaggaacctttgtcggaatcggaagaccaattgctgaactggatagcagctgcgatagcgtttggacctggtatgttttgtggattagtgatcggacatatcttcacttcatagttcatacaaacatgagtggttcatagctcgttaagcccatctctctcccggtcaagtttgtactacggtaactaagctcgctagttgttttttctgtccttgtaatttcccatttagtggttgcattataatttataaacagtgtcgacgttataagctgttatgttctcaccatagtgtgtaacgtggtccatgtttgtatagttgcatatgtatctctattataaatctttaataacatgtcttgaaattcatgtttaatactatgtcccatagccatccatttatctttgtggaaatagtttgtcggccacaatgttattgcccataccagacttactaagaaagaagataaaccttgacgagtggctttgctctttcttcacctcatgatgacctattcttataaattgtgacgtgtggattttagcttctttattttctttttatgttttcgtctgttcaattttgtataatcatgaagaaatcatatctcccgcgtcatagtcattttaaaggtttttatatacatagagacacagctaaaaatctaccaaaacttttcaacactaaagctcgtcgacacaatctccaatcccaacaagagatgagagagttgagatccatagctctaatcctcgcttgatctcttttttcctaatttcttcgatcttacgaacagcttttttcgacatcccaagtttcatcagaatggttcctagtgatttgaacgttgagtcatcaggttgaattccagatgacaccatctctttgaatgtctcaacagcttctttgaatctcccgtctaaagcgaataagccgagaacgctgttgtagctcaacggatcagttagaatcttcatctctctcatctgttttgctatctgagtcgcttcttcaaaccgaccgttcttcttgtacatacataacatcatcgcaaaggtaaactcgtttgcttctcctctctgtttcatgctatcgaatatagcttctgcttttctcaccatcgatctttcgctatacaggttgatcatacagtttgatgtatatacatccggatattgcgtcttgttacacgattgaagaagctttctgtatattgcttcagcttcatctaagtacccgactttggtgtagagcttaatcagagaattgtatataacagagtttcccgggattccagcttctttcatcgcttctacgtaactcatagcttgctgaacatttccagtatctgcaaaagcattgatcaagactccatatacaacaacatcaggttcgatattgtactcaaccatctctttatacacttcctctgccatattgagctgaccgagtttcacaaagctcgatatcacagcacagtatggtatgcaatcgctcacatatcccgtctctctcattttctccaagtagcatctacctttatgaggcatgtcggcactcgcaaggatctggacgagagtattatatgtacacttatccggtgtgaccccataactcatcatgctctcaaataactcacatgccttttcacagcttttactaattccatacgctttgatcattacattgtactcaataactgttctcttattcacttcttggcagcagataaacactctctcagcttctgataaatatccacgctcaccatatgcatcgatgttggctgaatagccttcagaactcatattacccgcaacatgaaaccttttgaaccatgaccatgatttctcaagcatctctgcttctacatacattctagtgagagcagattgtgtatactcatctatctcaacattatcatcatccatctcagctataagcccttcagcttcctcaaccatatgtctaatcgagaatgcatataggagagtgcggtaacttacaggatccggtttaagcccatcgtctttcatttccttgaagtaggctcctgccctttctatatcgttgttcttcgtgtgaagtgaaatcagaatgttatacgttcttgtatcaggtgcacaatgaagcttcattgttttcatcaaagaagtgacttcaccaagctgaccattattgccataaatatgaatcatggtattaaaagtcactgtggttggaacaatcccttcttctagcatcctcttaaacgtctctgaagcttcttttatctgaccggacttaccatacgtatcaatcatcgtgttgtaagtataagagctcaagcaaacatgtgaatccgccttgttttcgtcacacgaccatttcttgaaaaactcctctgctttttgaaactctcttgccttcttatacatttgaagaacaatccctgttgttacttcatcaggctgcatcccaatcttactcatcttccctaaccaacaaagcgcatgtactttaagcccgcctttgctataaacatcgatgagagtcccatacgtcgaattaatcggcttgatacctttcctaatcatttcatcccataaactctgtacatacctccacttacaagctttcccaagtatcctgagcatgatattataatgaatcacattcaattcatagcaacctttactcttaaaccattcgaatatctccaccgctctctcccaatgtatctgctcctttaatataatcgttctctccttgttactaagcctctctgcccacggactcaacgcatcttcaacatcttcaatactatccaaagcttctaaaatagcgggaatacatcctccgtaactcagacgtttcgtcgaacacttggtgtgcacttcactaaccaaaccattcccaccaaatctcgcatctttacttctcttatcaacaaacccatcaatgatccctgattttccgacgcaaccattacttgggtttactaaaagtaagttttttccggcgacaacttcatgagcaacggtaccacaacctctgtcgccatttctggtgcttctctgtggtcctttgtcactctcgtgagttcctggtacgtaattctgcttcaatttcttgaaagatgggaatttatcgagaggcgaagaaatcggtaaggtttttgtagaacagagaacatgtaagctacttccatctagacgaagattcaacaacatttttcaactgcaacgagcattagtttattcactagagaaaaggaaaagaatttgcaccgccaattgcgacgaaggtggtatatacttctccggcgaacgtgattctctgtaaaattctgacgagatttttttctggcgttgttgctaatggataaaattgcgcgcgcaaaggtcctttgtccgattggaaagagaatacatttgaggattaaattgataatttcgtaatagtttaagcccttaaaggaaataaaaagctgtaaactcctgaagttttatttatttatagaaaacaactctttatatatttgatttccaaataatcccaaaaccttgatcatatgcacataagaaccctattagaagagaaatgattttttattacttggttcacataatgaaaaaaacatacttgaaaactagtcattggcgttcggtattttggttcagttccggttcgagaacttcccatgagcccttttgtagtctaaaaatctataatcttaaattgtgttttattaatattattatgtttttatgtaatattaataacctttaccctagaaaaactaatattattttctcagttttattatattaaattgtgtttttcaatttcatatgttatcagacttatattattatgtaatatttttttacaattggttgaattgtttaggttagatattaatttctgtttttaatataacaaaattattacataataattcttgcagtttagctaaaacatctaataagctgaagagacagagtcatttacaattcatcaaaaagaaaaattgtttttgaaatcttttgatcgacaaggcctatctatagaattgtggatgtgttttgggaaggcattatagaaaatttgtctcatgtggtggtaaatgttttgctgaataagtaaataataaccttggttaaactttaaacaaaaaaaaaagttaataaataaccttggctaaacaaatgtgtataagtttctgaaatttaaaatattatgttcgtgatcaagaacagaaaactgatgatcttataggacataactacttaatacattatacatctatagattgtgtatgtgtccgtattatacataaaatctcatgtatctttacatcaaacttcaaatctaaatacaaaaacaaaaagaacatcactagagatggatctctcgtcggacaaaaccccgaagtttcgtctttcacggtcaactttagtcaaactccgatccgaatcaaaccaaaaagggtttttcattcatcgatcatagtcatcatctcctttttagacaaaagattctcagcttctctggatcataaggaagagtctagagcaggagcgtcggatcccttcatgattctgagtctcttacaagaagaagagaacatgtcccatggaacatcaccaaccaacatccagtcaccatctttatcttcgtatgttggtacaaatccagatcctttgtatccttctctctcacaatattcaccaatcatgactttgaacatattctctaacgctttgagaagctcggggtagtttttgtatgtcttgagatcgatcttgcgaaggtaaggagctccgtccatactcactttcacgtagctcacactgttgttgttcttacgggaagatctcactggtggccaaccaacgatttgagttctgtaaatttgaggaaagaaagattagtaaaactattcaagagccaataatttgaaagaagccaatttgaaactcagatctcttctacttacttggtaggaggtgtagattcttcttcatcacgagtttcctcaaatagacgcttgttgttacttttaacgcaagaaacctcttgttcttctttgatcttctctgttcttccgggtaatccaagacatagctctgtgtccttaaggttaagctcgttgactttctcgtacgccattgcttttggatcaatatcaatctttgtgtttccttcttgtgtgttttcttgggtactttgttcttcttgtcttgttcttcttcttcttgttcttgttcttggtgagctggttgatgagttttggagaaaaggggagagagatatatataaaggagcatcgaagttagggttaaaggaagagagagaagtgttgtcggaagcatgaaaggcaagaaagaggcaaggggacaaaagtgggacacgaagcttgaggccgcccatgtggacacgactcttttgtttaattattccacgctcctcttttccctccgccaactttgtttacgttaacatcttagccgtccatctctattgcctcttctttttctttcaaaggatgtataataattataacgaaagaatataaaaatgaatgaaatgatgagaattctatcggccgacccggaataaaagcaaacagagaaaatataaataaagtaaagactaaagaggtgtattataataacatttatttactgtttcttaaaggtttcttcttctctttttgaaagtgtatagtgcaggttataaagaaaatatcaagtgctaatgattgttaatccatttgttgcataatagatattcttaatatatatttaaatataatgtgttgtcttaaaatttgatgtgaaagttgattattatttttagtttacttctattgatttattaatttttaacttaaaagattaatagatgttttgaaagtatgatgtaaaaatttcgattcagaagaaaaaacgtatggtgtaaaaaatggttaaaaggacacttatgtcaaataaagtactattttattgaatcctgattccaaaatgaagattatttagagtttccaagtactcttatgtgttacgaactattgaatgtgcataagttgaattttatcatttttgctcgtagatgtaatttgattaataaagaaatattagttttatggttaaatctcagataatatcgaatattaaacgttacatatttgtcttgcgaagacatatttatgcgtggcattttgtatattgtgagttggaaaatgttataacattttgtgtgtagattttgattttataataggagacgaagacccatgtggataagggtcaaatgtgttggtaattgatagaggaatggtaaagccatgtgctttcttatgtgtatgtctcttttaattattcatttcccttcaaaatgggttgtgggggagagaggttccacgtgctatgtattcattgaatcataaaacttaaaagaatgaaccaaaaagtggtaattaatttctccccatagattacgcttaactatgtgcatttagcttctaatccgcatgcgatttgatgttaacgttaggctttattcaatggatttaccaattttggatattatttgttttctcttcttttaagataaagattccttctatgttcttgccccttccatcaccaaaagattagataagtaaaagcgatgcaagatacgttgcctctcttcttataagtaaataatttagaggttctgattgtcagagttttatgtattatttccagttaataacgaactcatgcaatgtattttctcacaaactgagagatgcacgaatgaataccatttgtctgttaaatattgcacgaatgaatactaaaggttaaccatttacagatttctagaatcacttaacatggtgggaaacaaacttcttgagaatagttttttcctgtttgtgtgttcatgcatgttttagtcttagtgaaaatgtattatagaaacataactactagatctatgtgatgctttatgcttatatagatgattgctaaagttatttgttggttaaactaaacctttttactgaaaaccatttaagaaagtacaagagaattcagttactgtttattatggagttaattccatgaatatatattgaacattaagttttgcctaaaaaacaatattgaacttaagccaaatacataaatcatttttagattattttggtctctgtggtcaatttaatgtattaatttatgtactgaatcaacagttgtttgttcttttatgttaatatttgatattttttactctacaaggactacagattctgatgacaattttaacgtacatatcttgaagaggtacgtgaataactatatgaactagctaatagattcttaattttttttggttagaaatattaaccgtgttttaattatcatggtaaaaatgttaattattttctactttaatttctcgtttattcaaaaaaaaaaagtatgtcatatatgaacaattttgaaatttaaatatagtatgttttacttgattatagtttcataccaaaacattaaaatatttttgagaattttaatttaatatctgtaaaacgtagtttagtatgtttgacatgactatagtttcgttccaaaacattaaactaatttgaatgttctaacgaattcaaaacacatataggcacccaaaacaaaaaaaaaacatgttattataaagatgatggaaataataatataatgctacgtttgaaagaaaacgagtaagttaaagatgaggaagaggaatgatatgtcgaaacacacaacttgtcttgtgatgcatacacaagctacactccaaagagtcgtgtcttttgcaaatcacattcgtgtgtagctcaaaaaagttggctctttaaattattaaagtttgtgtgttcctttttcgactcatccctatcatcttatctccattttctctctttttatttttcatatatatatatatatatatatatatatatatatattgatttttattaactattaatgtaacatctcacttttacttatttagccttgtttcaatcatcatgtcttcaaatcaaccgtccagaagataaaatgttgttttcaaagttatttatcgcaaacaaaacaaaaaccttaaaaggttgagtgaatccaaaatcccctttctcagatccaaaattcgaatataaacgctagggtttgaaataatgacatgactcgtttagattcacgaaatcaccgattattcaggatctccacacaagaatttgagtttatttttttgctttagtacatatttcgtggggcttaaacgatccaaacaagagcaaccctaattagctggatatgtttcactgtcttttcgtcgaagcattaatcataacataagctgttccaaaggcaacgtagggaccgggccaatacattcggacagcaacatcgaaccgactttgaagtattgtcgagacataattaagattttgaaaaaataggaaacttgtggacagcgtataagtgatcgtggcacgaaatataaccgatcatgatcctgtgttagttatcctctcagtcaattaattcgatcttgatatatatctttctgcgttttagtttcttgatgaatgtgcattgattactatttatgtatttatgagagagacactatgtttctgaccggttcggttctgaaatcaaataaagaatggtgccataaattagtaaaagtcgtttattgttaagtatgttttaggattatgggaatcttgttaatatctctttacacagacgatataaatgatgttgtgttgtttgaaaagaagagaatttttaaagaaaataaaaaaaccaacggttccttcttttagatttaacattgttacattaagagtttaagaatactatatataaaaatcaaggaaaacggtcaacttaattggtttatcgaatttatacgcaaacctttgagtcttgtgtataaatacataaagttaactaaaatttgaaatagatacgaataattcaaatttggttaaaaccataaaatcggtaaacagtattactgttctattaatagatgttttttagaatgatgtgtttgcagtttataataccatgtaacgacgttgtttcatttacttaaagaaaaatcagacacaaagtatttctagtccgcgattcgaacaatcgaacccatgaacttacatataattaaatagtgaaacaaataagttcacggggagaatcgaccacttttcctcaaaatcaataaatagatctaaaatttgtggtctagtggtaagagagaattagagaaatgttgaaaggaattaacccaagttcaatccaccctagaaacaaaaattatatatgggtgagaagtctaggtttgggccaaagataggagggtggcttttcggagagaattctattctgaaatattttagtgcttttctatcgaaattgaccggattaaccgatatggtttacccgaatttttttaaatttaatttaaatttaaatttttgtagtatgaaaacgaggagcgtggaaagtgagaagatggagcaaggaaacgaaggagagtggggacttggaagtggttgggcaaacaagaaacatgtaagtggtctgattcatttatgatgttgaaaacgcacacgcttgcatctccttcctgtaatgttttctctcttctttgttttgtggctcatattattgtaaattttgttggaattgttttcatcttgtttcactcaattctttttaaaataacaagaagatttcaggccaaaaccctaactaatctcaagaacatgcagaattaagttgggttttcttggcaattaaagtgtctacaatagtacgtagagtggtaagaaaattgcagccaatattgaagatttaatatatttggtctagatcaaactatgattaatatacatttttgaagattttcgacaacttccgaaaggtgaacaagctccttggcaaaaatgttgagcaaacccacaacgaataaagcattagaaccaaaatccaagtggcctatacgtcgagttggaaaaagtttgcaagtgattataaaacctccaatgacaccttcgctcagagaatcaagatcatacaccaaagggttaggaattggttctcagagtttccaagtaattgcaaagtttgagatagaacatttttgttgaatgaatcatgaaatttacgtgaaatattatccaaataacataaatgcgttgattttaaaataggtgtgtgctgtacatgcgatatgtatcaactacacgctcgtgtgactcccgacaaagcttggaatgtagcaatgtatatggcccgaacatctaatatacgtgacgagtgaggccaaaagccaacgcagaggagagaaatcaaaataagaccaattcatgtaacccataccgtaccttaaacacatgcacgtgtgatacttttgaccttttttcccccaaaaaaaacttgatcaaatttttattttaattttaagaaaatgcatgtatcctcacaataataaagtcttgcgaaaagctcatcaatttttgtttgttaatggattttgtttcatctacatgtacttagattttttatgtaagaaagtatatatatatatgatctatttttatttcgaaagtatcattacagaattacacaaattaaaataaacttggaaaacgcgtttatctaaatagagaaagaagacagatatataaagtctaaagtgtacagcataaatagaccattaaattggtactaatactacacggtccacacacgttataatcattgtctacattgttacctgcttggccatagcaaagggcgaccacaaaaagctccatttgtatggtaaagttaacattgtaacaaattgttatggtgataaaaagagctaatgtataacaattgttgacaataaaaaagagagagttactagctagtagtaatatagttttttttcgataaaagcttttcaaaagtagtaatagtcaaaagaatttgatagtagtaaaacacaatagtaccaatgtgccactcaaaatatataaatcaaaccatattaaactcgaaaatcaaagaggttaacgctgattggcgttagtttcttttttctttcacaaaatgaaatcattacctgcattaaatatttagtgtaagggtcattaatatgttcacggttcaaagaatccaaagcaaacatttttagtttttattttatgaagttatgttcttgcctttctggcattgacccctataagctgacttgcctttcaggtggacctttgtgcatattgagattgggctcaagataaagtttggttttattcttctatatgtattagtcaaactgggcttgctaatgcttttggcggtcctgaggtgtcaatagtagataaatagagttatgtataaactatagggtgtgttttgtgatatatcgagttttatttaacccgaattatgttagtgtaagtctgtagatatatatttgtagcacaatgagaggacaaatccacaaggattgaaagattgcaaaattagaattttgagatccaaagtaatctagagataatagttttgaggtttttgttttgatctccaagacaaaggaaacaataagaatgcagagaattaaagtgtaactagtaaataaagcattagacaaaagaaaagttaattattttttttatatattaatattatgcaataaacaaggccctgaacgattaagcaattaaagaaactactggatcattgaaaatatgcatggaagagttataaattaaatataatagatttttttttttgtcataaaatataatagattattttatgaaaacaacactaatataaattagtatatagtatatacaatatatctagatcacttctatttgaagtttgaattatttatttatttttgtcaaagaatgtgaatgattgtgcttttactatttcttactatgttctgcattacacattgtccctgtttaccgacattaggaattctattacaattattacatttaacatgcttcactctcaacacaatattatcatttggatataattattatacatatataaatatatatataataataatcacatatatatataataattagataaatgaaaattcataattctgaatatatacctgtatgtgagcacaatcactaattagtatacaaatagtcaatgaaatttaaaataaaattttgactttttcatttataaatttacgaaacagttaatgtagtactatgtggatgacataaaaaagggagacatttcctgttcttttaagatatcagaaagataaagatgccaaaatcagatccaaaccatataaccttgactatgtcaatgcgtatattcacattaactatacaaagactaattctaagttaggccaaaaattagatcatctaatacaaaggaaacatgtttcttatcaaaataatttgtatacaaattttacacatttacttaaaactacatatgttgtatttattataaaaataatatttttaaacaaagtcaatccaatgcagcattaaatccaaatagtaaaaacattgaaaaatattatggcatcactttgtactatattattttttatgtaattcaaatataatatataatttaatttatacaaaatattaatactcgtgctgtatagcacgggttatgatctagttgttctaattaggcaatgcttagtctatgtttaaccgttagacagactcatataaatattgttaccatcgtttaaatagttctaacacatatatttctattatttatctaatacgacgttaattataccaaaccctataaacatgatatagatcctaacttaactaggacattacgatgtttaaaatttagaactttgtttatgagattcagaacttttctgcgttcaagttggcctttcacatggtgacatggaccatgtaaatacataaagatcattatctcgaaaattgaaattctatctgcgcactctgtgacaaagaatccatgaagcggacattatgcttttaaagtcaaaactctattgacaaaagatgattcactattaacccttttgaacgaaagatgattcactcatacttaagacctcatataacggcttaaatgctcataaaactaagagaggtcttgtgtatatctaatgctctaatgctacgctcataatagagagataaatccaagtaatcgtactaattatctcgtagatgatgaatataagaggtgttacaagtaatcatagtcattatttcttagatgatgaacattaacattaaataagaaataaaaagaaaatatgtatgtatatgtagaagattgaggattggggtggtggaggtggtagaaagaaatggttaagaagagagagggatgttgacaaggcaaagacaagagcctgatttgatgggctttggtatgtttctttcgacgtgacttgtctctccgtcttcatcactcactctcatttccttagagatcaaaggactctccaactccaagtgttgaagtgtgcctatattatccagtcgtgaatttcatatatttaaactaggtttgtttttaccacaaatttataccttgctgatttctatagtgaaattactactcatgttgtaagcgagatttaccttggaagtattcgtgtatgagttatagacgattaaaaaactaggcttacgcatttggagtataggatcaagtaatgtaagagaaacaaggtaatttaaatatttaattagtattacaaatataggaggaatctattcaaactctcatagaattagtagtgaatattactattttaggtaatttcaaataaattttgagtatttttggataagtttgttaattttcagattttcaattgtatataaaggtaatgtagataattcgtactcatagcaaaccatattccgtacccgctagaacataacaaactgaacaaaaacaaatatttgctatattgtagggtatatatgcttaaagactaggtactttgaatatgtattttagatatttttttcatcaagatattaaagatgttctcattggtcatgtaacagtttaatttcagaataaacacaatgttgtttggaatcttaaaaaccgtatatttttactgtaaaaatagataatgatatttactacccaccctctcggtttttttctgtacgatattttagaagtttttatttttatttttgattttatttttataaaagtacacgtatttaacttttatgactatttattctatagtattcttattactggttgaattattattaattgagaattaaataatggcttcctaatctctatgctttagccaacgaaaaatcttacaaaaaacggagagggtataaaataaattaaatcttgaaaaataatatttaggaaaaagatactgttggatgtttattgctgactagaatttatatattcggtcaattacggaaaaaccatgggcataattcattttaaaagatattgttacctgtataaaaaaaaccattaaccataaccattgatgcctaatttgtatctcgagtgtttctattcttttggtggctaatgattaactgaaaaaatttggccgaattgataacaattttttaaacatgcaaaaatatattttcactaatccacgttttccgtgaaactaaggtatattttcatgtggctttacatgattggaagttttcaggaacaaaatttcttaaattatgtatatttatttagtttggaattgatgatcaaataataatttcataaattatctcaaatctccctagccaaattcacgaaaaattcaagaagatattcacttcatagaaggtggtcaaaaatcgtatttaccctagaagaagcatacccgtaatccgttttatcgtaaacaatcccaagaatgtagacggtcacgttttatactatctatcatcacatagaatatttattaatattatttaacagtatattattaattacgatagctcttagtaaaaaatattattgtaagtttgtaactattctaaggaatgttgatttcttataatcaagtggtattttttcagacatgcatgtactgatttactagttccctaagtcgggtttcatgctgacatatataataaatgacaaaatatgtaatttttttttaatccataaaagactaagactaattcaagtagctaaaaattagacatacggaatattaaaaaatggttttggctcaatttttgtacaatgctcttagatttttcatggatttatggtcaagttttgtatgagtgataacaaaaagtcagatctaatgtagtgtataataatttttgctctataaaattgattataaattgaaattaatggtaagtcttgaaatagaatatttgaaagaaaccgacaagtctacgttaaatatcaaagttttgggggtgcaataattaagagcgttttggtgcagtctgttcgtaatcgtagtgacggttgggaactatgatattaatatggtgtctattttttgtttagttaatttagatttcaaatcaaacacttgattaatagaatgtcaagaactcataacactctaatcactaaaggcaaatatagctaaaaacatgtcaatcttgccggttgaaccggataaaaaatcagtggtgggctttcaattcataggattacggccactcgtgaaagaatatgacactaattcacgaaaagatgtttcgtctaattttatggtggttagaagaattccagatgttttcaataatgaggctttttcccataatcattgttttccccccaaatgacatataactcttttgtataaaaaatacgtaattttatgaaaggtacaattatctccttcgttagcaaaatccaagtttctacaatatgtgtatgtgcacgtgtaactacagtttgagttcataaaaccacgtcccacttactgtaaaacgttagcgactacactgctaattagtaggattagacaaattatatgttccctgtgttttaattttgatattcgtttcggttcgtttagcaaaatagaactaatcataaatatttaagtttcaaaagcctcgattcttaagaaaactacataatttcacatattttcactcgattggttgcgcatcaaatgtatatataaaacggatcacaatttttttttttgatcaaaacggatcacaaaattaagtgtaaaaatacaggaactttcctcagtctcgtcagccatgatgcaatggcccttgatttcatctgtaaaaattacaagtcttttcacattacaaagaagcattaagttcattttttatgttgggaagaagaaaatcgatgtcagtcttcactcagtgtcctcactaagaacatgtacctagaccaattaatagattctctgtttatataccacaaatgtctatgcttattaatgagtagtactattcttttatttttaattttttagtaagacacatttaataaccaagatgatacagagaaaacgggagaccgtaaacaattaaaataatatacgtgacttgtatagttgtattgcttgacacaaactaattagaatgttgaccaaatttggttaacggaatttcaccgcccaattccacttgctttatatgcgatgaacagttgaccagaggagacaaagtgtaacaaataggctattaacaaaacatagaagtaattaatacattcatagtttatatatagacatgttgtgagaacttattcttttcttctttaacaaacaatctgaattcgtttcatactatataagtattatatactacctagttatatgctagctttgtattgactcatagagtcatagtacaaatgctaaaatactaaagctacacagagtggtagaaccagctgaaatatgtttaaaactacatgacctaacccaaccattacaaatttataaacaaactacatcctgaaactccagaatagacgatgtagctcactatgaactataatgtatgtttaatgtcagaaccaaataaatttaaaaaaaatgtcagaaccgtacgagaagaacaaacaaaactttttgtagtttgtttgtatatatttctaagtaaaaatgctgaacacaattatacaaccaatatatgtgatctaatgtgctatttaggaaaatttgtcgatgataagtactacgtcagagtcaaaagacccatattggtttagtccgactattagatacgaaaagtcaagcaaacattacatgtaaattttggtaagatgtgagagatatatatgtctttttttttattttttgataacaaagatgatgctaaaatacttttagatccaaacaccaattatgagattcggaaaaactaatgttagaattcgaaccatgatggccaatattacatgaactcaagtggcaaattttttcactcttttactattggagcaagatgacttggttatgtaagagatatgttgctctcaatattctcatagatcatctctttcttcaaattggtaagatatgagaaatatgtcccatctttttattatcataccaaagtcttttataaaatatatcatatatgtatatatatatattgtcaagaataacttgacttcatacatactatttgaattcggatagtatcacaaaacatcactaccacgtaactgttggaacttcaattttacaaagtatttccggctaacttttcggcgagtttttcagtgaagtttgtcacaaaaataagaatgatcatatttttggaatctttgtaatcgttttcaaagttttctctccggattttcgcggttctacaataattacattacatatcatgatcaatatgtgacctgatcctcgtagttaattaaaacataatttcccggtcaccattcaaaactttctagatggaagattaacaaaacaaaattatcttagcttaattttgtagtaacagagaagaaatgattaactaacatctaatcaagcccacgtgtcataaaccccaccaatgaagaaaaaagagcaaaagacatgcacatgcaattacacgaatacatacaccccaccaccatcctccctccttatattattattgccccttcctctcctttcttcttcccctcttaccttttcagagagagaaacaatatttctaatctattacaagtaacatgatcggccaacttatgaacctcaaggccacggagctctgtctcggcctccccggcggcgctgaagcagttgagagtcctgccaaatcggcggtgggaagcaagagaggcttctccgaaaccgttgatctcatgctcaatcttcaatctaacaaagaaggctccgttgatctcaaaaacgtttctgctgttcccaaggagaagactacccttaaagatccttctaagcctcctgctaagtaagctacacatttacatatatatatattcttagattttttttttttttggttaaaaagttcttagttttttccagtccatatatatacatatatacgtgtttatacacatctatgtctaagttcttagaatattcgaatatatataaatttcatagttatatgtcctcgcagaacataaatattgtgagggatttacataaacatatgaataaactaaaaattcttgaaatttgtaatgttagttatatatatatatatatatatatatatatatatatatatacttcccatatacattacctttttttgttaaaatttatatgcataactttgattctttgaagttatatttgttttctatcaatataatactaagaaataatataataataattaaagcgtggttgaaacttaaacaccaatacatacatgcgtacaagcaaacatgaaataatacatgttataacttacaatcaagcccataaaggcagtaatggtaactaataattacattggttgatatacacctatctaaataatgttgttctatgtagagcacaagtggtgggatggccacctgtgaggaactacaggaagaacatgatgactcagcagaagaccagtagtggtgcggaggaggccagcagtgagaaggccgggaactttggtggaggagcagccggagccggcttggtgaaggtctccatggacggtgctccatatctgaggaaagttgacctcaagatgtacaaaagctaccaggatctttctgatgcattggccaaaatgttcagctcctttactatgggtacgtattagaaatttcaaatcggaaagtgtgaaaaaactatattcgtatattaaagtatatcatttactacatttattcatacaaaactcatgaaccttaccgagttagagtcatagaactatacattcgaaccctatacatattaacaagatgagattttgctaaatgtatacaacttaaatatgtattatatatattacacaataatgacacataaatttatatgatttttgaatgtcttgaatatcttcaaggaaactatggagcacaaggaatgatagatttcatgaacgagagcaagctaatgaatctgctgaatagctctgagtatgtgccaagctacgaggacaaagatggtgactggatgctcgttggcgatgtcccatgggagtgagtcaaatttaatcgtttcatatacttttttttataacttataacttgactcgttaaccacatttcccgaaattggtagagacaaagccaaagatattcaacatccatgtgttataaatacgtacaaccatgcattggttggcaagagacaagaggatctttcaaaaattatacaatagtatcgatatgtttagagctcattcgtagctggcacatcatcatattattgccaaaaaccttagaataaactttaaatgttaacgactcatattctaatgttctaaccgtaaacttgaatacctatttcagaatgtttgtcgagtcttgcaaacgtttgcgcattatgaagggatctgaagcagttggacttggtacatctctaactttttttttttttttttgtttttcaatttttaccaattttctttttattttaatataattctgttttcttggttatagctccgagagcaatggagaagtactgcaagaacagatcttgaattaataataaaaaaaaagaagcatcaatgatcaacaatatgacgggttcttgattttatatgtatttttatgattgtatgtggctatcacctatatatgtgtgttgtaattttaaatacttgatgggtatatagggcagtattttaccagtaagatgtggacaaacttgtaatgtgaccaaaagagaggaaacttcaatatctctgtgtttgtgtcatatttattgcccaacatgtgtctgtcggtttgatgatcaatcacaacttgatatgtgcatacatataaatgtgtgtatgtaggtgtgtgtacatgtacatgtgttttgatccctactctgctacttgtcgtttcttgtgtgtgttatctaatagttttttcccaaaatgaataattcgttgttatgtttactattttaccaataaaatcttagctttttaattctactctctaaccattactagcgttttttagttttaaaaactctgattatgtattgacttttagatgaagtctttaatgaacaattgaacatatcctacaacccacaaaaaaaataagaagtagaatttaaagttggtttgttgtcatttcatcataaattgtgtatcctaattttttgggacatgtggtccgtaatctgtcatattttaaactaactgatgattatatgtgtagcggctttacaagattaatttagtcatcatttcaaaaatatgttgaaatcaatataatttgttttcattattaaaaaaaaagtgagtaagatacagttacaaaagaggatataaaagttttaatattcggatgtttgttactcacttacaatttgttacgacttgcgagttattgatggttcttactggtggatggatgatggatcattagatatatatattgtattcatattatagattaataatctcatataaattatgtaagtcgttgatgcctccaaatagtataatttgacctcttttgcgctctaattttgtgggaggaatttatcaaattcaggacccatgagaggggtagggaacaagagcatgtgcatgttcatgggtcttttaattcatatggccattatgttattgtaatttgtacccaattttcccgatcacgagaggaaaatttcatcctattttataatttgtctcaatgtttgtgtcatattctagttaatctatactcgaataattatagtattcccgatcgttttatagaaatatataaccaaaaaccaaggtcaaacgtgcaatatgataatgactttgaaccaaaaaaaaaacttaaaacaaattgcaacctcatgggtcctaattaagtaattatacaccaacaatatagttaacaatttaattattcttatgtaaagtaagaataacttttgatttgaattataagcttatagagccaaatataattaagtataggccaggtccattgaaaattcagacatattaattattacaaatgaagtcgagtaatgtagagtttaagggtacggttttttggtagtgaccaagctcgacaatgcaaatctatttttaattctatatagctatatttataaatgaaataatgagtgttttgggatcactaaatacaaactttcatgagttttgatgattgtaatacccaaacttttttcttggatccggtgcaacgatagaacttaatttcataaaattagccaagtgatgaaaaaatgattaagcgctactagggacatgcatgcatgcgtttgcaaattctaggtcaaaactaataaatttaattaacaactatactatcttaatgatttgatttccaaaacaatgctaaatgcaaataatatatcaaacagaaaagacccagattacacaaacaataaatattcaaatgatctggactctggagataatacgtgtttagttttgaaaaagcagtttaagaaattatagtagcatgtccaattgtttactaaattaaaaccacaaattcgaaatgtttatgttattatgatatttgaactgctatatatgggagtttggactcttttatttctgtttctgtttttgtactagactttaagtttctgagttcaatatatatataatcagcatattaacaatcattatcatgtacgtgaagtttcattccaaagatttatttttttgacttaaatatctgttttcttaatttcgtacgaccattcaattcttgcaatgtctaagagagtggccataggaattcaaaatttgatacatgatgacactttacaaataaatccaaactagtacaaacccaaaagcctcatgaggccataatatgcaaggcctagtttacatcttttagaggttcgtttattatagtttactttccaggaaggcccttttatttacacttaagaaaataaagcgaagggaatatgttgacacacaaaataagaacaaaagataggtgaaaatgtttttcttttttttgaaaatctacattgcactatttttgttttatgataaattagattttagacatgaaatatctcctcatatatcaaacacttcacaaaaaggattcacaaatattttcacgtagtattctttatataccaatgttttgtctataatacatttaatgtgaatttatacaggactaatgtaaattctataaaatcttatcataaaattcattaaggagattcagaaatattttccaagagacattgttcttgtactacacatttcaaaacactaataaaagtagcttaaacattatttttacgtaaaaacaaaaaccaattcctaaaactgtattcttgtaaagacatgtaggaaatatttataaatattctctctaactcgtcaaataatatatgagatcatttttacacatgtagcatcagtttaggaaaaatataaattaaacagtatatctcgcataatacagaaatttggtatggtccaatatgaaattcaatgtatatacatgaaattgtttagaaagatttggaattttgacaagtatattacatgcggatatttttcttgaaattgaacaaacatagaaagaaatttacagtgtatttagagattttaagtcagaaatacgcatttaatttaattttacttacatagtaagaaatctaaaatttcatttgttaaatacgtaattgctgacgtcaaaaagatgtaaattttatagaagaatttaaaaattttgaacacgtaaactacatgtagatatttttctcgaaattgaacaaaacgtacatagaaatttacaaaatatttaaagattttaagtcaaaggataagcatttaattaaattttaaatagtaaaaaatctaaattttcatttgttaaatacgtaattggtgacgtaagaaaatgttgtaaatgttttagtaagattgaaagtttttgacacgtagatatttttcccgatattgaacaaaacctacatagaaatttacaaaaatctttagagatgttaagtaagaaatactcatttaattctatactacttaaatagttaaaaaatctaaatttttatttgttaaatacgtaattgcttacgtaagaaaaaatgtaatttccttataaattagtaacggccaaaacataatgattataagttaacaaaaagaaaactaaagagcctgaaaaataaatataaaaatatatatacaatgtagaccttttatgaacaaatttgtaactctatatttgaaaaactttgcaataaattgttaaatataaattaaacctaatgcatcactcatgtaatcattggcataaaaactataatatattttctttgtgagccaccgaagtttagctttctgtcactttgaccctctctaattattcatagttttaaaaccaaccctctctaaaaatacttaaaagcaaactcttccaaaatcaaaacctcttcttacacagattttttttttctctgagagagacagagagagcgaaacttgagagaccaaaatccaatcttttcaacaatcgattctctctgagaaaaccaacaataaagctagacacttttttttgtgggtttgtcttcttcttcgttcatgcaccatgttgtgttacgtgaacgaagaagctatataatcaataaatcttatcgatttgttgagtttgggaatcggagagaaagatgttaacaaaggtgcttagtaaggaggttaagccatgccttgcttgtccaatctgcactaatccgtttaaggatgccaccacaatctccgagtgtctccacacctgtaagtgtaacccttcgattgttttttcctttatctttgtgatttagattctgattttttgtttgtgactatctctctgtttattggttatattaattagtgtagactagagattatatcagattgattctgaaacttggaagttgaaaccgatgttttgtttagctttttggtgttgttgtgtgtgtttcaacatgtatctgtgtaaatattaaggtaagcagataaggactgtttttttttgtaagtggatgattcagtgtctgtttatgtctttgtgatttcaaagttgctgtttctttagcttgttatgtttctagtcctggctttaagtattggtatatcttgtgtctttatatgaattgggacttgtggaatttgtggtaacagtttgcaggagctgcattcgtaacaagttcataaatgagagagtgaacgcttgtccagtctgcaacgttaacctcggtgtttttcctctagagaaacttcggtatgaacttgtttgattcttagcatttgcatctatctttatgcttttatgtgatttgaggtatctatataagtgcaggtcggattgcacttggcaggatttgaagctgaaaatctaccgagcaatgatggaaagcttaaagaaggcaggacctaaaactgttgcagcgtctgtgaaatcttcgaaaaagaagagaaaatctcgaacttcactgcgggtctcttcatctagagtatcatcctcacctgatactccattggaaccagccaatgtggttgtggaaccacctaatgtggttgtggaggagaaacatagggagaccgttctagctcttcaaagcactagaaaaccgataatcacgttccagaaacgtgggagaaaagcttcactcccgaagaagattgattcgaaaccagaacccgaactgcctcctaaggagcctaaaattaagaatctatttgacctgaacaacgaacctgaagacaatggattggtaagtatgtatatgagtctttgtataactattgttctcctttgttaactatctgtttgcaactaatgtgtttatgcatcttaggacgaagctgaaggatcaacttttcaggaagtcgtaccaaaggagaaagatctttgtaaacctattttctctctctctgtcactctaaacatcaacgatactcctcctgatatcgttgagcctgagataagttcggatgacgacacagaggaatctgttgaacctattcagaacaagtgtgttgtgaatagagaaacaaaggaagttcctgttcaagtgaatcaaaacagtctccttattagctctgatagggatagagaggacaactctggtcagaaactgaagaccaatggtgctgctacctccagatcaaggaagaagaaaggtaagaaaccggtggaaaagagctattctttgagaccccgaataggcaggaggacggttaatccagcagctggtactactacaccagaagctccggtttccgtggaagaggagatgaaagttgaagaaggacgtaacaacaatccagtttggttttcactaaagccttccaagactcagtaaaactttttttctatcttcttttttcatgtctttaacttatgattctgtttatatttgaaggactcggtttcttcggttttcaggaacattgaaatgctacttccaccgatcaccgcttgctgcataagagtaaagtaagtactaattaaatttcaactataatctctgttgttgttgtagaatgtgtgatattgattctttgatttgtttttatgttcacagagatagcaacatgactgtctcatatctcaagaagtatctaatggtgaagctcggtctcgaaagcgaagaccaagtaaactaactcttctctctatctatgtctcactctctcttgtcttttaactctaatattttttgatgttcttttgcaggtggagatatggttaagggatgagccagtgtgttcgtcactgacactacataacttggtggattggtgggtccaaacaactccattgcctgagcgacaaagcgcgatggtcggaagctccgctgctgaattcatcatggatctctattacagcttcaaatctgacgcctctgactctggctctgcctctgaataattcttctcagaacttcaaactttactcttcttctaaactcatttcttgcagaataagtttcttttgaaagacttctagttttagcatctttctttatttaataattgctgagacctaaatatggaaaactctttatttatttgatttgcttgctttttgaggactcaaacggtatcgttttgtactaattaaatagaagctcattttagctagcttgagttatatttgataagatgcgccggttttgtgctctgtttggtttaaggtagggttaacgaaagatctgtatccaaacagtcttcttttttgcccgccatggataaacacagagccaggagcttagtgacgaactaaaggtgaaatttttattgaaagtttcaatttttatatggattggattacagaaacatttctatgtgaataaaccaacaatggcgatgaagcccagtctccatttttgcccaactactgtcacgaagaagtttgtctactcgtttcaaagctccttctgcttccgtttcttaaggtatagttcatcaatttcacttgggtcttgtaaaggtgttacctttagttcgagaaatgatcaaattgcatcgaggaggtttagctttagtagggattgtaataatggtgtgtggctagagaattggaatagaattcagaaacgtaatcaacctaaacctccaaaggtagttgtgaattatcgaaaagaagggagattttctgggtcggagattgtgagtggtgatgataatagaagtagagatggtgatggtagtactatggagaagatagtggagaaattgaagaaatatggatatatggaggaggttcagaataaggagattgaacaagagagaaggattgagaaaggatctgtggaggatatattctatgttgaagaagggaagttaccgaatactagaggtggattcactgaggaatcgttacttggtggagagaatgtcattggaagtaatggagatgttggttttccttgggagaagatgagtgctaaggagaagaaggagttggaagctgagtggaccgcaaagaaggagaatagatactcgttggcggaaatgactcttccggaatcagagctaaggaggttgaggaatttgacgtttagaacagcgagcaagatgaggattcgaggtggaggtgtgactcaggtggcagtggatgctattaaggagaagtggaaaagcgcagagattgtgagattgaagattgaaggagcaagcgcgcttaacatgagaaagatgcatgagatattagaggtttgcttcttatgaccccccaataactctatttggtttcataaggcttgtctttcggctgcaaagatcagaaacacacaatttaagtccaatgttcaatatgaaagcgtaggcataaacttttgttagatcttgttaaaatgttcttttcttttcctctatatggcagaaaaaaactggtggtttagtgatttggaggtccgggacttccatctctttgtacagaggtgtcagttatgagcttccatcaggaaaatggaacaagcaaagaagagaggagacgccacctgaagctgtaatagagaaccatgacgaaactacaactatggtggataaaagtgatgaaaaagttcatcttcctcaattagagcaggagacaactagtgtggaaaagaaagaccagacatctccagtagtagaatatgaagatgaacttgatgaactgttagatgatcttggtcctaggttcatggactggccgggagataatccattacctgtagatgctgatttgcttccaggcgccattcctgattatgaaccgcctttcagggtacttccttatggagtaagatcatctctgggaccaaaggaggcaacagctttgagaagacttgccagatctattcctccacactttgctttaggtatgagatttctaacttttttttgtaactctttgggagtctgaaagagtctttgaagagcagaagtttcttttgatttccaggtcgaagtaggcagctccaaggcttggcgacagcaatggtcaggttatgggaaaagagtatgcttgcaaagattgctattaaacgtggcgtgcaatcaactaccagtgagagaatggctgaagatctcaaggtaataaggactcttgattggttaatgttgaaataccttttgtgtatccttgtaatccttataggcaattttatgttgtcttcctgattggagagaaaattctattatcctcgatttctgttaatttgatcatgtcatggaacggttatagaatgtctatctatactattttctcaacttttagtctttaagcatctcttgttctgtcctgtgtatacatttatgctccttttgtcttttatctggggttgtagctgtatatttgatatcatgtttttggtaagtaattgcagaaattgacaggaggtataatgctctctaggaataaagacttcttggttttctacagaggaaagaattttttatcaagagaagtagctgacgcattggtggagcaggagaggtttgtaaggactttgcaagacgaagaagagcaggcacgtttaagaggttcatcggctctgattgtcccaagtactgaacctgctaataaacttgtttctgctggtactcttggtgaaactcttgatgcgactggtaagtggggaaagaatctggacgatgatgatcattcagacgaagtgaaacaagaggttgagatattgagacatgagaatcttgtcaggaaactggaaaggaaacttgcttttgtgagttctggactttcctcttgtttcttttcttctacctgtgagttagattcacatatcatgtgttaatgagttgttctttaaattaatgggattagttcttctgctttaggctgagagaaagctgttgaaagccgaacgtggtttggctaaggtggaagtgtgtcttaagcccgcagagcagagagaagatccagaaagcataactgatgaagagagatttatgttccgcaagcttggcttgaaaatgaaagctttcttacttctaggtaaaattatcaataacagatgagtgtagtggagtgtgttctataaatgctcagactcttaaaacaaacctgaaaatgttgcttcaggtaggcgaggagtgtttgatggtacagtggagaacatgcacttgcattggaaatacagagagttggtcaaaattattgtgaaggctaaaacttttgacggtgtaaagaaagtggcattagcccttgaagccgagagtggtggtatcctggtttctattgacaaggttaccaaaggatatgccattatcgtgtacagaggacaagactataagcgtcctaccatgttgagaccgaaaaatcttttgacaaagaggaaggctttagcgcgttccattgagctccaaagacgcgaggttcattgatataaaatcatcatttgctatcttatttgaaactcattagctgatctgtattccgtttgcatcaaacagggtcttctgaagcacatttctacgatgcaggcgaaagcaaaacagctgagagctgaaattgtaatggacctaactcatttttacattggcttttgtctaattatactgtatcatgcattcactgattaagcaaagaatgtagtttgttcagcaatggtagactaactcgagaacctgcattcattgtatcaggaacaaatggagaaggtaacagacaagggtgatgaagagttatacaacaagcttgatatggcttatgcttctagcgatgaggagacagacgtaagcacttcaaatcactgtttttttttttaaatggttttcagtcatcatagaatctgtgtttaaggtctcacatggcttggtgctattctgtaggaagaagatgatgatgatgcatttccagagacgtatgcagaaggagaagatggtgaagaaggtgagattctagcaggggaactatctgaaacagaggataaagatttggattcaaatgaatcggaaaccggatttggtgatgattctgtacttttcgcagaggatcttcatacgaaatcagaagatttaccaaacaagaaagttcgtctgcagcatcagagctaattgacgataagcgtaagaacaatagatgagcattgcaactttagctttaagcttttagtaaaattgtaaagtagatctttaaatgatttctccagatgaatacacctccatggaaagaaaattaaacgctagattgtatctttactaaaaccgtctccagaatcttaaaccgtattacaagaaatattcgaccaaatgtttgcccttgcttcaaaactactctgcatggtttgctttcgaaaccactatgctcatttcagtgcagttacaagaaaacacaatccatatcagtaatatagtgtttctgtgttggtctaagaattctccagggaaacagataagataatgaaactctcaggcaaaagatctcacctacgagcaagtctctgtccagctccaaccattaacgccttacctatagcactagaatgaagcccacaagccaaagctactcctcctacaacgatccatttccagtctacaccgaactgatcattttgtttcctcgcattctctactgctcgtcctctctcttcgtcctctgccccagatgtttccaccaaatccatgttcagctttgtggtgatacttgccatctgcgcactccgtgagagcgacgtcccaggttttctagcgctttggtacgcccttaagccagagtttagcttctttacagctccccacatgccatgacggactcctaactttgctacatcttttgggattcccatgtcttcgtagtgaacaagagagacttcacaagctgtcatttgcccatcaccttttcttgattcaactgcattgataatccaacttgagaaataaagttcgactcgcctcggcttatcacgctttgataaagctttatacggtactccctacaaacattaatataggccaaaacagtatatcaaaccagcattctgctattcctaactactaaaagatttgatccataaggaagtaaaagcaagatcataccttagtcacagcataatattttcttccagattcccatattctcctaccaatgatgtattcccggtcactacagaagaatgggaactgcagacaaaagaaattagtaacatgttcatgaatcacgaaggaaagcagaaaaatacctttttaatccaatgaacaatggtagttcctgtcttaggatcttcctctaaagttttgaagtaagcaagcatagtatcccatttaggtcgaaactcatcgtcccagaagaaatccctaacaatgtctggtgttacatcctcaaaaacagttcgactacgataaacaacaggacctatctgacaaccaacataaccacctttcaggaactaagtcatataaagttagagtctttaaaacttagatttacctcaggctcatgacgccaagcttgatagctcatattcggagtagacttatccatcatagattgccactcaaaactagcatttccagcttcaagcagatgcaacaaatgctctaaatccttctctgtcacaacatctttctctttctctgtaactttatcactagctctgcattaatcagaagctaacatcactaactcaacaagaacagagtcaaacataattcatttctttttttgactaaccgtgaaaatgcttcttcttcgaccggtttagaggaaccgttattaaccgaggatttattggaggttgaacaaacggaaaaagcagagagagcggtgaaagcaagccaaatacgacgagcaccaaatccaggaggaacagtacatagaaaccgaagcttagaacggaaacctaaataaaccaagctagtccatctaggacgccaagaccaaccgatcagaagcccgatcataacagtgacccaaatcggaactgcacatagcaaaacgtcgacgaatgtctctgtaacagaaggtttattgaagaaatccatgaaaatatccataactatagccctaagataatttcagattgctctgtttcgccggttacattgaacggaagcgatccaaaagagagaataaaaaaatgattaatgtggtatattgctgctgtaccgaaaagacgttggcgggtagtgatagggacagtagtgatgacgtggctttagtcgttaaacttatataaccaaatctcacgcttcatttttttaggcgtttattgtggataagataagataagataagattaagtgtactgacatagtgattttttttaatctctactcttcattattttaacagcgcttaaagatgttgtggtggataaaaaatcccagcctgacctgaattcaaaataaacccgtccaccaaaaacccaactttagaaaacctaaatgggtttttgattagtggataaagcacgaaaaaaacccgattgttctgatactattcgtgggtatccaacttgatttctgtcttttttgtttagtgtttatgtttaactactaatatactatactattatatatattttatatctatattttgcttataaactaagctggtatgtaaatatatcatgtaaactacccgtgggtacccaatttgatttctgtcttatccactctaagatcaccacaaactgcatagtctttcaaaagacgctcaattttccacacttgcagaaaatacacgttagcagtaggatacttgacacctgaaaagtaagtagtgatagtactaaacggctttagaaggtcacaaatcctctctccacgatcccactcattctcagaagtcaatgacttgtagtttctgtcacactctttcaagctagcaaatgctttacgaaactttaaggctctagcaagcatgtcataagtcgaattccaacgtgtagggacgtctaaagacaatccagcaccactcctaatccctacactctcaacacatgctgcaaatgcatctttcctagactcagatgctttgacaaatctgacactctctctaatattttccaaaagctcagtagctattgataatccttcttgcacaataagattcaacacatgagcacagcatctaacatgaaaaaacttcccatcacacaacaatccattaccgctaatcatctgaaggcgatgcttaaggatactttgcatactatcattattcctagcattatccaaagtcaaagagaatatctttttttctaaaccccattccttcaaacaactaagaatcttattagctaattcttcaccagtatgtggaggtttcatatcacaaaacgctagaatcttattattcaacctccactcatcatcaacataatgggcggtcaaacagatataccctgtgacaatgccacgagctgtccacaaatccgcagtacaacaaactcttcctctgaattgttcaaaaaactttttcagctttcctttttccaattcatacctcttaaacacatcatttccagcagtttgtctacagatgggctgacaattcggattcaagtatttatctctagctctaactttttcatactcaacataccgaaatggcaaatcgtggtacacaataatctcactaaccatctcacgatctactttgtgatcatacacaattttttcactaagcacttgaggtctcttttgacaaatctgtaaatgacgtttcaaagcggatgttccctgactattttcaatgattaacttcttatcataatgaatgcaacgacctctctgtttcccatcttcttctaattctaagatgggtctaaactctttccaaacatcagactttaagcgtttgttagagttatataccgttgtagccgcttgagtagattgtgttgcactttgagttgcttctccttgagtttcagcctcctcattcattgccaaatactcattctcagcctccaaatgtgccaatgtttctctagtttgtgaatccattctacaaaaaaacctcatgaactttaattagagaataaacttgaccatcaatgaacaataattaaatcatataagtaacaaattctgattaagagcaagtaacgtatttaaatacttaaaaaaagcaatgttggaaattcccaaatgggtttcagattttcaaagaaaacacaagatcatgacctctatagaaaaactctcatgacgttacttgataatgtttatttaaattctctccttttctagaagtgtatagcactactatgtgtctctcgtgaatgttttttcaccgaattgtttcgtttaaaaaaagaatgaaagatacacttatcaccaagtctaaaaattagattattcatgagattcgtcatattctaaagctaggagaaaaacacaaaatcaaaggagagaaaggacatctaatatcaagtgaaactagagtttgatttttcaaggagatgacgagagacttacggcggtgactccggcggtgactccggcggtgtagacggcggtgactccggcggtgactctcacggtgactccgacggagagaagaggagagaagagagagagactgttgtggtggtggcagaattttggggaagaaaaggaatttagggtttctcaatagaattggcaattgggctattgtgcctttaatatactaaaataataagttaaaacttacgggtatccataacccagtagggtaaaacccgtgtaagactttaacgaaataggacctgcccgtttaaaacccacgttttattttatacaaaaagtagatcaattggtttgaaattttagatgggtttcgggtactcagtgggttttaacccatcattaacatcactaacagcgcttaattaattaaaataacgtgtcgagtattaaaaaatatcaaaaattaatattgtatatattaataaatattgtgttagtttttatattagtttaatttaatattatttttctttagaataaatggagtaatctgttgtgttattttgtataaattaggacacattcactaacttctcatttatcgggaaatcatccataaaatgatatagagactgtgtccaaaaaaacaaaaaaaaaaacaaaaaatgatataaagactacacaaaaataaatttagttccaaaaaaatgacacaaaatcctctaactaatcctagaattagcaatcactctaatactaaaattaacatctactaagttcattcgagaaaatctaaattatcatgccgtgtcagctatgtacttgatgaaatccttaatattatagtaccaaatttcaatttcaatcaacatgctttagctattatcaattatgtgacgacataaggacttaaagttgtaaatatgcacattttttgaactttttgtttacaaaagatttgtctatgttaattaataatttttttattgaattgatttggttcaagagaaaaatggttataagaacttaattccatcaacaacacaaatctcaacatcaatcttcgatatctcggattcatgaataaagatttgtctatgtttattaataatttcttattgaattgatttggttcaagagaaaaatggttatagaacttaatctcatcaacgacacaaatctcaacatcaatcttcgatatctcggattcaggaataaagattttgtcaactttgcttaactcttcgactggtttgaaaacagctatcgtgctgtaaaatgtaaagcaacttcattttaagaaaagaacaaatgagaaagtgaggttcaaatcaaagtcatacttattcttcatctatggcattcaattcttcataaattttacaagagcatatcaaatgttacatgatggtaagatgcttgttatgtttttttggtgttgaccttaaaagcctaccattagctcacaatttatctatttttcttcttaaaatttagatcagtttatatttattttttctcttgagcttgattttttttccactaccataaattcttctcttttgtgtctttatcaactttttttttaatcaatttttatcaaagctaattatgtgtatatatgtttaaaagctgaaagatacatatttctgtactgaatatcttattttatatatcaagtttaatatatttttaccaatcacaaaatgatattttgtttgatttgtacggttaacaattcattattcatgtagttacttataattttgtttatatctattcaaaaatatctaagcactaaacgatatttttctatgataattattataaaataatttaaaatataaatttttattttttaaaatattcttgacccggctctggttcacgtgcagctgtgtaggagaagggttgatatgaactcgagaaacacgtggatttggacagtgactttaatctgcgatagtagtacaagatttttatgtctggtgttggaattggattagattcttcgagatctgtttagaacctcaagccactgacgttgcgccacatattattctacgggcctttttggcccattaatattaggcccattaatattaggcccactccattacgaaatctcgattgtccgagaaactgactattggccccataagaattcgtctattttaatcgaccttgttaagagacaaaatcgactatgactttggacaaaccgacaacaacgaaatctttttttttcttgtcaactaaatctttttctgtttcgtatttttaaagtttgtaaagttggagcaagttgtaacatattgataatataatcaaacaactaaatgattaaggaataaccagttcatttgatccaccaacttctcaccaataatgacagctttcatcaaacaacctcctttttgaaaataaactattgtgattagagccgtgacaaaatctttgtataaaataaggcaatggtcttgacttttggaccccatccattacgaacaaaatcagggacccaacatttattctaattagtgatatgaataaaggttttgacattgtattgattattttgaaaagaatatgagttaagttgtttttttgttcatttggttcattttataataatctatcgtgtggtgatatttttatataatgaaaagagccacaaattttttaaaccgcttatggtcaaaagtttaagcaagactcgagaatttaaaaattattatgaacaaagattcgttatcacttataaacaagcaagcacaacagtaagattcttgtttctatgtgtacacactacacattcataaacacgacataaacaacatttaaattacacacatttacacttcaaatcataagttaaaaacacaagcatcccacacattcttacaacaaaaacataactctcagtttgttctgaccaaaaagactctttagcaggcaaaagcagtctctggttccaaatttcggttcatttctttatggtttatctggtcagcattccgtgtggtttcatcatcatggtcttctttagagatcactagagtctttcgagtttcatgccgcctcgaagctccttttgctctgtttccttctttcgggttcctccgccctagttttggcgactttgctcgagttggaagaggctgtgtatgtacaccattatagataagcataatataacattaacaactcgaagcgggttttaaagtttacgggtaatttttctttttgtgaatgttgtagacaaccttgtgtgttaccttcttaagttcaacctttgggggaggcccttcatgataaaattttggcattgggtttgctttaaacctcaaactttttcttaattgtcttaaagctgcttcggttgcttcctttagatgttgagtaccgggcatacaaagagaaggagaacaatatgtcaaaaaaacataggaaaaaaattgctagctacacaaagtataggaaaatgcatgatcatacatgccaagtatactattgtatcatttaacatatgtgatctgctaatgagcatttttatagaactcaagcatattgcaaaaaaagaatagcaccttgttccttgcttcactttgcgttttctcggcctccatggcttggtgtttctcctccagttttgtatagaactaaataacataaaccacttaaaattcaatacacaatgtatcaaaaacttcttaagagtggaaagggtagacaagtaactgattaataaagaaaaagaaatgtcacctccttcctcttctcggcacgctcagtggatcggaacgaaggagctgcggtgacaacagttcttgatttagcagactttgcacccgacgtggcactgtcaacaaaagtcaaaacttgataaatgggcagacaattgtaagttactaagaaattaatattgcttataaggtaacatactatgaagcaacagagcaagaatcttcctcatctgaaagcttcttgttttttggctgcaatggtttcctaggtacctacagtcacaaatagatacttaggcgttacggttagactaagaaaatacatttgagaggagtacaatatgttactatagcataaattctgacctttgttgcctgactttgtactttactatgtccatccggaaactttttcaagccagctgattcgagagattcactagtaaacgaacgtgtagatgaagcacgtttctcagttgctaaagaaaacggttgtggaacggtgttccttgttttgttattccctctacctgattttgaagcatgctttgcatgtaaacttgacttagtgacatctttagactcaaaatcatctcctatcggcttaccaacggggatctcactagtacactctttaacatcatattcgtttacttcgatgttctcttccccatatcgaagctctgtatgtacattagcatcatcgcgtgatactgaatctaagagaggctcagaaacattttcttggtttggattacacgaatcaccgttcgcatagaccaccacaccatctggctccttgtccatacagatatctgtcacaacaccaatcaccaaagtcaaaaaagaaagtctaatattgatcatattacacaaaatccgtgaaaccaagacaacttactttgcatgcacgtttacgacacgattcaatattatgatatattgggtatactcaacagagaaactatactatgcctccttataaccacaactcaagttccttattagtataataactaaagtatacttagttacaaatgatgaccaagaattcaactaaccatctaaattattatcttaaaaccattaggctaaccaaatgtagggacatcaaagacaaaaacagcttgtttaaaggaaaaaataatatagtatattctaaacataatcaaacatacaaatataataataatcaactatcaatttctctaaaaagataaatgaaactgtacacacgaccaaatctttttgcattagacaaaaccaaaagaaaaatctttttttgcatagtcaagaatcaacgaagaaaagacactttgttaaacgcataaatcatcatgaatttggaccaacataaatactttaagactttcatttgttaatattttcctcaatatacacaattaagcaaaacaagaacatgataaacaaatttaagatataagaaaactcaaattttagttgttcaaccacagatgcttcttgcatttaacaaaaatgaacatgcagctcaaaaatatctcacctactatgaactatgatcatcaatcgcaataaacaaaacgttgaaatctcaaataaaatttcgaagaagcaaaaagatgatcaaacatagaggatatcgaagtagaagattacaatttgcttacccatttttcttgtgacagaccagagaatatgtaaccgctccttcttttttttgttctctctctctcttctgcgtgtgttgtgttgttgtgagaatgatgatactattgtcatttatgttggggtgtgccttttataccatcgccttcctcgtcggtgctaacgccgttacttgacaccgtctataattatagtgctccacaaatgaattatgtttactggatattaatttttatagacttactactatttttatttatcaattataggttggtttaatggtttggttaataaaacaagaaatagcatacttgttgttgttgtctttcaatgattgttgaactattttgattagcaaactccaattataacataccagtaaatgttaccctttttaactacatttttttttcttttatagtcgaaagtaagattatgcttattttcaaagtgtgtgaaattcggataagttttctaaggaaaaaattaagtgttcttattagttttatagcatggtcaataatgattgaaatcgtagaagataacttcgtgttttgatcctccaaccttggcgtaaatctttttatcattagatcacaccataatttggttttcaatcgattacatcaaaccctaaaacatttgtattcaatgcataatattagttaatacatacatatactccggttaatcttatcctttactcgtaaaccaaagtttctaagatgaaactagcgtcactataccacataaatcatttgaattttgagaggtaaaatgtaatttataatctattaagtcttcaccaacatcaggatatataacaaactcactaaactacaacaatttggtttctaatcgtaatattataatagctttcaggctagtgtggggcaagctttttttcctgcaattatgcaaaacttctttatatatatgattaagtgtgaattgtgaactatattgaatataatcagacaatcattatgcaagcacaaagggacaagatatcaaactattatttccaaactccaatttaaatttggctttaactatagtatttctgtccaattagtcaaaatacatctgttatattttgtttatatatacactccatacaaaaaaaatatatacatatatcaaaatttacaatctactgactacaatcattacaaaacacacatgaattacaacatagttcaacaatcatcatttaaccaaccaataaactaaaaacatttcaacataaatgatttttattggtttagaaacgtgattttgtggactttttagcaaggaatcaataaataaactaaaaaaataagagaaaataaaataaaaataaagtgattatagaaaagacatgacatccttattggcatagcatccaatcttattaattgctcattgattttgattatcccacacctaaactcttattgaaaaacacattgcaccaccctggtttgatatttaatttttaagataagcatctctcattatgttaaattatacctgatatgcccttgttgtaagtaagagtcgaaatcgaatcggtgataggttcaagggtaaaataggggatttagaaaagaagacgtgggatgattgagctgtgtgtgatagaggttatgcgctgagtggagtaaaagaaagactatccaacgaataagtgggtcggtcccatttgtctataagagtatagccaaacaataataattctccaaaaatggttacagaaaaacaataattaatttcacaaatatataataatattttatattttgggagatgtatatagacgtcgtagttagctaaagtgaattaacaaatagggtttgacgttttctaatatttgtttttgtttaattgatatttctttcatccgtgtattaaaaatgatcacaacaacgaatctttttacaaaatttccgagcacaaatgaaacctgattttgtatcaaattatttttggaaacatgattttctttcaaaatattttacaaaccaaaaagacaactagaagtctgaagtctttagcgacaaatacatttgttaattaagattctgtgacatcattaatagtttaacatgtaccttataatagtaaccagttattttcttatgctcgaacaatcaaaataaatttgtcaatttgccaaaaaaaaaatcaacattacaataagataaatttaaatatgaaaatcaacttaaaacatgttaatgtttatatgcatatttcactaaagttaaatctaaaatagtatatttacagtgatgatgaacacgatttaataattatacgatatccagataatgtagactaagtaaagaaatgaagtgagcacaattgtaattttaaatttaacatgtgaataaattgtacaaaaaacatctattgattaatattcgataaattagtaatcactataaattaataaaaaaatttggtttctagtcaagtgaatataatatttaacattatttgataaaataaataaagtaataatttattcaaaaatcctatagaaatatatggtttcattagtatcataaactaagaattgtataaacttattaatatcaatatatgtaagaaaatttagtaaaatatgattttagtattgtttggttttttacgcagagttcaattatattattttactacatcaattttttttgtattgttttgcagagtttagttatatgaattgtatcctcatcctgtgtgaaaactctagaaattgtgtaaccacatccttcagctttctcctcaattgatccgttcaaattatgtattaatgatgtagctgctttaattgaagtcctaacaatctacaccccaaattctcaatgatatgtttgggattgtagttggggatggacgaaggccaacccgctgctccaatcatagcactacgaatggtggaaatgtcaagaataaaccactcgggctcaatatcgtccacattctcattaagataacttaataggtcgtcatcgtctttaagaaacaagactctagttattgatgagcgactgttaatttatagaagttttacttattttaattttacattatacataaaaaaaatcacgtcattgtataaaatccactaaggcgcgacctgaataaactttagaaaaaatttcaaatccgtataactgcatttcgtctcattcacagttgcatgaactcttatcatacgattgtgccatgccatattaacatcgtttatcatccaacaatagtggtggagttactttcttattgagttcaatatactaaaaaggaaaacacataatataattttttcttttaaaaggcatttttattattatatgtatattattagaaaaaagtatgattaaaaaaattaaaaagaaatgtaagtaacaacatttaacggattttttatttattaaagataagcttcggttaggatacaaaatacaaagatttgccaaactaatttagatattcttcaatcttttgatgagcttcaaagtaataattactaattaatttactgaatgaaaacagtaatttgttaatttttaattacttgtgataaaaaaataaaaaaaaattaataattacttaaattgtctatatgtaatgggagttttttttttttaacaacttcttttaagtaaaatcactaaatatattttaaaaaaaacaataccgaagctgactcagcatccacgtaagcaaaaccaaaacaaattatagacattattatgatcggagttgactcaaaatcttcgtcgacgacttttatcgaaacaatggttgaatcggagaaaacgaaacacacttgtctccgtctcgaaatctccggcgccgatccaattttcgtcaaaggcacttggcataattctcgtttcgatatctccgtcaccgatggttcctcctcttggatttgcaatggtaaacaaaaaaaccctaaattcacactatcacttagcctctagcgtttttcgaatctgatttttattttggttttgctcgaaattgaagcgacggaggaggaagtggcggagagagcagcacaatgggaccagcctgtgtcagagtatttaaagctcgccgagcaatacttagggtttcaacaacctaattcggtctatagtttctccgatgctctagagggatctaaacgggtcagtgatcttcttattggatcattcgttagtgttttgaagtaagcctgagatttttggatgttgttgttgtctttgattgtgttttggttaaagctctcttggacgtttgagaaggaagggactaaacttgagtggaggtggaaatgtaaaccatcagatgatagcaagaagatcactgttgggatcttggattttcttatggaggctaacataaggctaagtgtatgactcttatactgtacgttctgaattgtgaggatttgttgtgatgtttgagaatgatgatgaattagagcttaagttctttgatctatgctttgttagaaatggcaatttgatttgtgtttggaagatatgtgtcaatctctcaatactttagtgtttacacaggaagaagtggtgaacaagacgagatcttttgagaagatgagaagtgaagctgagagatgtctagcgcaaggtgaaaaactctgtgacgaaaaaacagagtttgagagtgcaacttatgcaaaggtatgaattattcgatcaccttggttactctgcttaatatccacatcgtggtttgttcttgcttaaactagagtcattggtttttatgatctgttagttacttcttttttttgtcaatgcagtttctttctgttttaaatgcaaagaaggcaaaactgagagcactaagggacaaagaagattcagtgagagtagttgaggaggaagagtcgacagacaaagctgaaagctttgagagtggaagaagtgatgatgagaagagcgaggaagaagcctcaaaaaaggcaacaagcagcaaagcccgtggcgggaagagagctgcacgaagctaagagattgccctgccgtgagattttcaggtcagagtttccattccaagttttgtcaaactcatagctaggaaaattgtttgtcaaaccttctttggtttaaaaaaataatttacaatttgtattacttctgaaagtaaatgcaataacttagagatggcatgattgattgttagaaagcttcaagccccaaattgtgataactaagaaacatagaccatcacacgaaccatattttattaccaaatggtgagaaaatattacaaacataaaattacaaagcaaaagaaaaaaaatcacaaagacaaacacatgacgaggtagtttctcgacaacaacttagatgaatttttagaggaactgtgagagatagtgttaagaagtacctatggtggttttgcgcttgtttcgacaaaatttcgccataagccacttgtgcttgtatgaagtgaaaatatgtccaatcactaatccacaaaacacaccaggtccaaatgctattgcagctgctatccagttcagaactgtctcttccggttccaacaaaggttcctcggggtgcagcgatgtaggtatggggacatgggtttctccacaaatttgatcgagtccatagagtctgggattacccatgaatgaagaacaattttgacttccaaactgtgtgctttgtggcaccaatccctctagatggttgtgggagaagttgatgttggagagaaacgagagtttcccgagacctcgaggaatttcacctgacaagttgtttcgcgataggtctagcgtctcgagctttgtaatactagccaaagatggtgggatgtttcctgtgaatgcattgcctgacaagttgagatgaagcaattcgctcaatagaccaatggatctagggatatgtccagagaatcggtttccagaaaaatctatgactttaaagcctccaaagatttgttcgaaatctgtgtctactcctttatacaccaaatcaattgaatcttgatgattatcatctcccatgtagtttgaccctggtatagctatatttcttttgtaatcaagtgtgagcataggtcgttgccataccgatgacatttcagtccagttggcaaaatagtcttgtggcaatgatccaacgaagttgttattcgatatgtccatgatccgcatgcttggaaagcctaagtaggcagaggccttatagactggaccatagaatgtatttgatcggagcacaagaaccgttaggtattgtagagatcccaaccagactggaaacgtgtctttgatcttgtttcctctcacattaagatattccatccactcacagttgatgaaagattctggaagtttccccaccaaattgttgaggctgacatcaagtgatcccaacattgagccatccatgcagaagtctggcataaatccacttagactgttgtttcgcagatttaacatgtagaaatcagtggaattcttcaaacattgtggaattgagccattaagatggttgttggaaaaatctaagaaggaaaaaaatctgaagttgcagatccattggggaattggtccttggagggaatttgagctaagatcccaatctctttctaatgattcatccccaagttctagaattctgccgaaactgttgaaagaattataagaaagatccactgaatctaacttagaagatctccatatacattgaggtacatgaccttcaaacttgttgtaggaaagatcaagggaactgaggttgactaattttgatatagagctagggactcgtcctccgaaatcgttgtggctaagatctaaatgttcgagattgactaatttaaatatagagctagggacttgtcctccgaagttattatggctaagatataaaccatcgagattgactaatttcgatatagaactagggacttgtcctctaaaattgttgtggctaagctctaaatgttcgagactaactaatgtagatatagattttgggattagcccatcaagattgttgtagctaacatctaactctgtcaacttagatgacgaagtggtattcccaaaattaataggtccttcgaattggttttcacttaaacaaatatcgactaacgaaggaatcatgagcaagaatgagggaaaaggtccaaaaaatgagttctcagacacccaaaatcgctctaagttgtggagttgactaaggtcagcagaaatcgtggagttgaagtaattggaggagaggtctacaatggacaagctagttaagttggataatactatatccccacccgtgaattgattttgacggaggtgcaattcagaaagctttgttaagttggcaaatgaagtaggaatattacctccgagagcattaacccaaagatctatgtattctagttggtttaggttacctatcgaaaccggaaattcacctactaattgattgaaagaaagatcaagatatgtgagatgagaaagatttccaattgaagaaggaatctctccttggagattgcaatgtgaaagctctaggtgacgaagatgtcggagtttaaaaagactactgctagatttcaaagaggtgttggcaatataggaaacgagattaagtgatatcacctctcctaatgtagcatcacatgtgacaccctcccaagaacaacaatcaacggtcttgttccaagaaagtgttgttacatgatggctcccgttggaatggatcgggaactctttttttagctccaaaagagcatctctttggtcgctgcggcacaaagaccgtgtgggagaagcgaaagtgtttggtaaggaaagaagaaagaaaaagaaagagatggtaataataataccaagaaagcaacgagattggtttcgaaccatcgcctctcaattttgttgtttggagacaaagataaattgtttgttgaatggtaagtgatgaacatgtttgcttacacactattctttatataaaaaaaattctctgtaaggagcttgacttggcaagtcttccattacattatttgtaagttaaatcaaggagggagcttagttttagtgcataccaaccaaagctttagaaatgtaaaagccaaaaaacgcacaaaaaaaataccaaaaggagataaaaacaaagatgtatgtccaagtaatgtcgtgaggaatgggtttggaattactcaggtcatgtggttgacatatttctatatgccgcaacatctttttctttttatcaatatttttgcaagatttttaagtaatattttgtataatctatgaatcagtttcttatataatataatttatcatatcattgttttggtccattactcttaatttagaaagaggtaataataatattaagaaagcaaccagattggtttcgaaccatcgcctctcaattttgttgtttggagacaaagataatttgtttgttgaatggtaagtgatgaacctgtctgcttacacactattatttatataggaacattctctgtaacgagcttgacttggccagacttccattacatgagcttgacttggcaagtcttccattactttattttaagttaaatcaaagaaaaagccaccaatcaaagttttaggtgtgtgtaaaagccaaaaacacgcaaaaaaaaatataccaaaaggagatactaacaaacaagtatgttgaagtgatgtcgtgataaatgggtttggaattattcagctcatgtggttgacatctttcttaatgccggaacatctttctgttttcttttttcattttttgtcagcattttttgcaaaacttttaagcaatattttgtagaattaatggatcagtttcttatataattgatcgtatgtatcattttttttgtccattactcttaaatcatttttcatgtaatgattttgacccttaagttactctcaagtctctacaatccaaaattttcactcgtccttttttttttttgaagaaactttttaatgcccactaagttgtataagacgaagcgtctaagtaacgtagatagaatatcactgttcgatcattcgtaaaccctctaggttgatgttagtttaaccatgttcggtggtggagagataaagaaccttgatcgtccattaacattttaggctaaatctctttttcaaaaatgcaggaatacatttgtaatcctggtaggtgaatcggtggagcttctttccctagacgggcagatatattagttcagcagctggagaatctcggcactcaccttaatccgcggcttcagattcttcctcatcgaaccaccaagaaaatgatgccatcttcatcctcaaaatgttgagacttgctttgtcaatgtttttttgatagagcataagaattgttagagtactgatcaaacttgcttatttggtatcaatactctaaagaattgtgtgcttattaattattaatatattggagaaaaagtaaaaaaactgttatagaaaagaagaaaaaacactgaagttaggttcaggtttccaaatacataaggctctcaaaatcatcccaaagatttgtctgtaaatagccgcttttagacaatatagggcaaaatgaccctataacaaccccttgtttaatatgactcttctccaaatcgtaaatagcattcactagactaaaaggagaggcaaacaaatatgtatgtctaaataatgtcgtgagaagtgggtttggaattaagcggttattccgatcatgtggttgagatagtgtcacctactcgtctcttttcccattttttttctttgtgaggaaatttttgtcaatgcagtttctttctgttttaaatgcaaagaaggcaaaactgagagcactgagggacaaagaagtttcagtgagagtagttgaggaggaagagtcgacagacaaagctgaaagcttcgagagtggaagaagtgatgatgagaagagcgaggaagaagcctcaaaaaaggcaacaagcagcaaagcccgtggcgggaagagagctacacgaagctaagagattcccttgccgtgagatttcaggtcagagtttccattcagtgtacgttttgtgaatctcatatctgtgaaagtataaaatagctagaatcttttacttccttttttatttggtcaaacaacgatatttattaaaaaccacaaaatagaaaattaaaaatatcaaacacttgaccaactagttacgggagtacaaacttgacgaaaccgttgagcttaacgagctataaaccacaagtgtttgtatgaagtgaagatgtgtccgatcacaaatccacagaacacaccaggtccaaaggctatcgcggctgctatccagttcagcactggctcttctagttctgaagaagacccatcatgttgctgagatgtaggaacaggaacatgatggctttctctacaaatttcatcgaggccataaagtccaggattacccacgaatgaagaacaattttgagttccaaactgtgtgctccgtggcacgaatccttgtagatgattgtgggagaagttgatgttggacagaaacgagaggttcccgagacttcgaggaatttcacctgacaagttatttcgcgataggtctaacgtctcgaggtttgtgatatttgccaaggatggagggatgttgcctgtgaatgcattgcctgacaagttgagatgaagcaattcgctcaatagaccaatggatctagggatatgtccagagaatcggtttccagaaaaatctatgactttaaagcctcgaaagatccgattaaaatctgtgtctactcctttgtacgccaaatccatcgaatctgcatgcatattgaaattatcccccacgtagttcgacctttggatagtttgaagtcccccatattgtattgttcttgaagaagtgtttcttgcgtagttcagtcgattgatgtcccacaccgttgccatttcagtccaattggcaaaatagtcttgtggtaatgacccaacgaaatcgttattagatatatcaatgatactcaagcgtggaaaccccaaataggtagtggagttatagactggaccatagaatgcatttgatcggagcacaagaaccattaatgatttccgagagcccaaccaaaatggaaacgtgtctttgatcttgtttcctctcacattcaaaaattccatatcttggcagttcatcaaagattttggaagcttccccacaaaattgttgtagctgacatcaagtgatcgtaacatagtgctatccatgcataattctggcagaaacccacttagactgttgtttcgcagatttaacgtattaaaatcagtagaattcttcaaacattgaggaattgagccagtgaaacggttgtctgacaaatctaagaagaaaacaaatctgaagttgcagatccattggggaatcggtccttggagtgaatttgaaccaagattcaacccaactaactttgctccattgacaacttccacagatttgcccaagtcgaagaacgaattatgagaaagatccacagattgcaagttagaaggtttccatatgaaataaggtacttgaccttccaacttgttgtaggaaatatcaagggaggtgaggttgactaacttagatatagatctaggggatagtcctctgaaattgttgtggctaaggtctaaaagttcgagattgactaatttagatagagaactcgggactcgtcctataaaattgttgtggctgatatctaacattgtaagcctagatgatgaagacgtatttccaaaatcaatcggtccctcaaattggttttggcttaactgaatcttgtctaacgaagaaatcttgagcaaggaggcgggaaaaagtccgacaaatgagttttcattcccaaaaatttgctccaggttgtggagtccacttaggtcagcggaaaagaaggatttgaagtgattggaggagaggtctagaatcgctaagctggttaagttggataatactatatcaccacccgtgaaattattttcatggaggtccaatagagaaagcttggttaagttggcaaatgaagtaggaatattacctctgagatgattacccctaagatctatgtattctagttggtttaggttaccgattgaagcaggaacttcacctactaagtgattagtagaaagatcaagatgtgtgaggtgggaaagattttcaatagaagaaggaatctccccttggagattgcaattcgaaaggtctaagtgagtaagatgttgcagtttaaaaagagcactactagatttcaaagaggtgctagcagtactaaggaaatagagttttagtgatatcacctctcccaagatagcatcacacgtgactccgccccaagaacaacagtcaatgcccttgttccacggattttgtaaaataacggaagggatcgggaactctttttgtagctccaaaagagcatctctttggtcgtggcggcacaaagactgtgtgggaggagaagcaaaggtgtttggtaagggaagaagacaaaagaagaaatagatggtaatagtaataccaagaaagcaataagattggcttcgaatcatgataacttgtggaaatgaagacgatttgtttgttcaattggtatgtgatagacatgtcttgcttatgcacttctatttaaataagaaaattctatgtaaggagcttgacttggaaagtcttccatggtaaacgatgaatatattttttatgtggacaacttttaaaacgtacaaaagaaaagacaaactgagtagaagactaaaggagacttaaacaaacatgtatgtccaattaaatgtcgtgagaaatggatttgaagtgacaatgaccagagcgaggaagaggcctcaaagaaggcattactaaattgtcgttatataacgtgagttatatcagtaaaaaaatcactgaaatgtaaaaaaaaaaccttcaaagtatttaccaccgataggcgaggctgactcagtatcagcatcaacgtaagcaaaacaaaacaaaacaaaatttacattattatcagagttgactcataatcgtcaccgtcggcgactttgatctgaagcaatggttgactcaaaatcatcactctggttttgatatatcagtcaccgaatagctcctccttttggatttgcaatggtaaacaaaaccccttattctaatctcttaaatggcttctttttgggggcagagtagtttttgtgaaaggatattgtcatgtttagcattgatcttagattcagtaacttcgatatcgatctagggggtcccatctacatagttgttaatatccaaaaaagtattcccaaaatcaatgggtcactttaccatgattctatccaattcaaagcggccaatgaaggaatcatggttgcatgcatgtacttagataaaaggaatacaaaaaataactgaaacaagctgacaaaataaatggtagaaaagtaacacacacttttgtgtctaaagtaatgccgtgagaaatgggtttataataattaaaggtcatgagggaagaaagaaaaaaagccactcgtcaaggtttagcttctttcttagtaagtctaatgtgaacaataacattgtggccaacaagattttcaacaaagatttggctttgctacgatttttctacaagtcttatgtaatttcattaattattataaagtgcctaagctttacacttttttagaccaccaaaaaactaaagtcactatatataagaaagtattaaacctttttattttgaatcaagtaaaattttacatcactattaatattgatgcttaattttttaattaacgtcaattttttttgatgtaaagtttgaatcattttaaaaagtgatgtttccaaaaattaatagatacatcaattatctaaatgatgtaaaacttatatttatatcatttttaaaaaagtgatataaactaatagaaatagtaacaattttatttaattgctgtctagttagttaaatataaaatcaattttttataattgatgttaagccatatatagtttttttgtattattttctagggatgataattattgttttacttgtatttggttttaaaaaatctcaaatccactaagccacgaccatgaataaaactttagaaaatttggagtccgtaactgcattttgttttgttaacagcatgaagtcttagggcaagatcgtgccacgtcatatgaacatcgttttctcatccaacggtcacaattaaaaattaggtaaacaacaaagcttacgtactaactaggggtgtcaaaatgggtaacccaacacaactcaactcataatcaaatgagtttagagttaaataagttatgggttgactcaactcattttatttgataggttgagttgttaaatgggttaacccatctaagtaataatttaattaataattattataaaacaataataaataattatcattattaatttattatcatcaaacttacgatatttacatattccactttttacgggtttacatttttggagggaaaattacgggtttatatttttggcggaaaaattaagggtttacacttttgtcggaaaaatgacaaattacgttttttttacgggaaaattacaagtttacgtttttggcgtaaaaatcacgggtttacgttttttggcagaaaaattacgggtttacgtttttttggcgggaaatttacggatttacctttttttgacgggaaaattacggatttacgtttttttggcagaaaaattacggatttacgtttttttttaggaaaaattacgggtttacatttttggcaagaaaattacggatttacgttttttagagggaaaattacggatttacgtttttggcggaaaaatcacgggtttaaattttcttggcgggaaaattacgggtttacgtttttggtgggaaaattacgggtttacgtttttagcagaaaaatcacgtgtttttgtgtttggcggaaaaattacggatttacgtttttgggcggaaaatcactggtttacttttttggcgggaaaattacgggttatgttttttttggtagaaaaattacgagtttgcttattcttaatttcatcgcttgtatatttaagaaatttggaaaaatattggttttattaaattggtttagatttgttggttaaacttaaattggcattggtttagagattttagttgttttaattcaattttacaaaatttgatgggtcaattagctaaaccattgaaaccattactcattacaacccaactcattttattcatcaaactaattgactcaataactcatttgacccatcaactcatttgagtcaaaattttcaactcattagagttcatgggttgagttgaccaatgaattttgacccattttgacacacctaccttcaaccatatacgttgcgttttggcattcaattaaacgaacccatttgaatcccactcatttaaataaaatatctatggaccttgtaaaagaccttcaagctcttttatttacctaagtaattctattatttcccctggttttattcatgtaattatatatatataaattgttatagttaaagagattattttatgggcatttctcttttttttgtcaacaatatatattgattccactcaaaagagccaaacttggaaatgctggtattttggaaaatgatattaataatgaagtttttggaaaagaaaagaaaaacacattttagtggtaattctcttcttttcaatttatttttgttttatgttttgatcttctcatatttgtgttgaatcagcggattgtaaagacgaagaacatgtccaaatgtagctccatgatcatcgagaagaaattaatgaacaagactactcatgtgaagcaaatgaaaattgtaaggaagagatgcaacacgagagagaggtacttgatccataacctctctagaatcatgacttcacagaatattcccggaatttatctaacttttgtttgttccccataaaattccgcaaaatgggttgtggtggaaccaaatgggtgggttcttgttgactcagacaagttggtacataatgacccgggccgtgagtccctaccggttcactcccacacggttcactcccaccttactaatgtgttgtctctaaaaaccattcttctccgcatgaagaaccgaatgaagaccatcaacactattgggaggaaggacattccgaaaactatgattaaaaagatcaattgcatccaagtaattgaagttgccattgcaatcaactctagagacagcgcgaactgctccgtcggccaaattatacactcggaaaggaagctttctaagttcgaggtaacaatccattagatactttttcgattattttagtaatttttttatttattctcggctttcttctaagtccgaggtagcactccgttacttttgctttaatactgattatcaaaactttcatattctagcaaaattttagtagcaagatcagattttgtacaattattttttcaaatcaaagacacaaactactaacataatcgagaacagatggaagacttcttggagtgatggaatgcctctcatcccacgggctcagtacttattcacaagctcataagacctgctaagtcattagattaaggagctaatagcttgcaaggaaagtcacgtccatggttcaacacaatccgatgaaaaccaaagtaaaaattagtgttgagccatatgaaaaattaaaagatacatcagtttctagtattcaaagaagtggcttactttttcagagcttccatctttttttgtctctaataaatcacaattcgatcgtcattacagagttaattaagtattctctattagatatgtgttaatataattttccttgcaattttataataataatatttgataattgaaatgaatatttgattatatatgaaaacattacaagataaataaaacaaaacaattttacatgaatatatatatatatatatatatatatatatatatatatatatatacacatatattaacttagccaagagatacatacatgacattccacttatcatttagacagtagattttaaatttgtatttacaatttcaaaactgaaattcatttgtaatcaaagaaaaacaaaacaagaaaagggaggaggagtgggatttgggttgcttaacagtattatatatacacgtcgttagttaatcaataaattatgagcaggtgtagtagctatgaacatggttttaccaaattggtaaattcatgtcattgttgtagcactttagcgaggccagcaaaatggcgttcttggaaagggcatggcggcccgtggccgccagggatatgtgtgcagctagaaggattagaaggagtaacttcacctttttgtagaaactgtaaattgccaagacgctcgtttggtaaataccttaacgcttcgtttgctggaatgtgtaccaccattagtagaagaaagtataataagactattaatgcaagagattttttcatattccttttctaagagtagaatggaatgaataaatgaatgaatgaaatagggtttttcttgtttagatcctgtcgcacccgagaataatagaagctgaattaattggtgaagagttttatggtggcgatgttgtatttatagagggaaatgatttcaagtttacaatgggatttttaatttgttttgttgactattatcttgcggagagatcttgactgttgacatgtatgtagtgtttgttattaaaataaatgcatttttgtagacccgattcttaaatatgttaggcatggtcaaattgttagactgtaaaagcttgagtagagacatcggtcaactttgtttacaagaattctctataaaatattatacaaattgatcggtagaaattagatggaacattttgaattaatgtttgacaatgtataaattggtttggtcaatatctaggaatgaaaacaagagctgcttcaaagttgttccattcttaagtatacatagaggtggcttgatgggaagtttcatggaagtgtagttttatatctacttccaaattcgttgatctgtttcttatctcaagctaaacatgtttagaaaagatgtgttaaaaacatgtgacaaaaaaagagtcaaatgtttggcaaacaaggtacttagatttttggcatctattcaaatataatagaatcccaaaattatgatatttgtcaatcaaatttgaaaaaaaaaaaaaaaaaaaaaaagattctacaaaagatcaaacgtattgccgtagatttatcataattttaattctttcacactaccactagtccactaccatatagtgatgagataatccataatcataaataagatataactttcgaattcttgtttttgttgcctcaaagttgttggatcattattttttacgtaaatgtggcttaatgagaatttatgtttgtgggaattgtagtttgcttccaactttttttttttttttttgaacacgtagtttgcttccaacttagtttatctttttcttatttcaagttaaacatgtaaaaaaacatgtgacgacgaaattcaatcagttcctccaatgtttggcagaagccaaatctttggtaaacaaagtaatttttttgccatttgattggttagtataggagaatttaaaaacgacgataaggtttaggtaaattatttcatttgaaaataattgagcaccgttaataattttcatccataaaataatatttcaaagatgatatttgatccccattaaattcattcgtaaccaaaaaaaagttatgaaaaaagagtggtcgtgtgagttgcccaagcaccattataataaaaaataaaataattagcaagtaataaggaataaaatcctgtaattatagctgaaaaaggaaaaatatttggagaccgtcagattcgaatctgaacaaagcataaaaaagtcaacaaaacttaaagcggcggtctcatcgtaatctcagcccaataccctattttcctctcccctatataaatactttcttcttctactgatcttcttctcacaaataaacccaaatatatcaatctactgtgttggtgattaagtactttcgcttgcagagagaaatcacagtggtcaaaaaagttgtagttttcttaaagtctctttcctctgtgattctctgtgtaagcgaaagagcttgctccctaaacttatctctctgatgatttaatgttagagatcttcgtaaatctatgtgtttgatagatctgatgcgttttttgagttgatgatttgattatttttcactggaaagtatctcattagggtaacgataatgttttatggatttggttgtataacagatccatgaaatcttgactggttataaaatctgaataatgtatttcaatttggagattcggtgataaaaattactgatttacgaatgacatttatatcgatagatgagtttgctgatttggttgttaaattgataaatcaaggacatgagaaactgtttttgtatgctaatttgtccatggaataaaattgggaggtgaggaccgtgagggtagtcaggaaaccttaatattgaagttgatgttgaaccaacaaatctgcccaaaaatgataaaagttgatgccgagcccacaaattttgatgacaatcgataagcccaagcccaaaaggcatctgtacctgagcccattattctttcattactagcaaaaaggatgcattagagaccccggtgtagtaaattgacctcacaattcactattgtattgtatacgtacatttcaagcgtaattaaaccctcatatttttatacgctttaaatataattggcctttaattagctcaaataaactagatgtcgtacgtgatcacggtggatgaaatcaatggtattatgaaaagactgtacatgatttcaaatattttaatgtggtcgtaaaaattgttgtttatagtggaaattgaagacaacaacgttactgaaacacatacagattgaaatttcgatcatttacttgcaaagtgttaccgtggaggcgtggcgtggacgtaaggtaccataatggtttgtgttacagtcacgccactacactcgaattcaagctaccatattataatacgttgttgattagaaaaaatagtcgccaattttctttaaaacaaatttcagtttttatttgtcagcaaaaaaaacttactaacacaacggaagaacacaaaaattagggagttgctcacagagcaaaagtaatagaaatgggaaaagctaatatacgtccgagtaggaaactaatcttgcaaaaactgatgaaagcaatcagaagccttgacgtttgtctggagagaggaattgtgttttggatcactttgttcagtttgttgtggatcgtcttccgttacgttctcaccaaaaatatttcataatgaaacaaaaaaattaattaataatggtagcttagaatgccaagttgagaacagatttgcagtttgtcccggaatgatcaagtagagcattcatagtgtcttgccaatatggtgtgatcaacgaagtttgacaaaaccgtgaagatataggaacatgtaatcatgcggctctccatacaatacatcttgttgacaaagttcccaagacctcattctacaaaccaatgtttcttttttctttttctttttggtgatagtttttgcaatcaaatgttgtaaaactatgattggaaatactactgtattttaccgaaaactttattatatatagtcattaacactcattaccaatcacataatcaatagtctattttgattatacaacttttaaacaataaagacatgtttatacagatttggtttaaattagtactccctatattttagaaaattttattttgtttcatattatagaatgtcttggaaagttctatgtaaatttaaatgtatttagtaacttgtgacgattttatattatgtagtcttttttaggatttgttgattttttaaaataaattttttaaagaaaaaaaacaaattattttaataaacatgcctttaccttatacagtttatattttgaaagagagatagtatgttttaggatatatttaaagaaaaaaaaataactctttaatttagctcaaattattacctgtccggttcttttttctgtattggttatcgaaccatattgatacttctattcggttccacttcgatcagtatttgttggtacgaccattctaatttgtatagttccatttgacttctttaggttgcaaccaaacctttaaaaaaaagaatagaaaaaaaaatataaacaaaaaaaacaagacttgacatgaaatgtgacagccaatcacaaagttttaccacgaagccaaatatatgttgaaaatgataaaaacaaaaccttctcaattcaaattcatgaaagagactttcacaattttgtaagaaaataaacaataatgagtcttataataaagtaaaaatagtagttatttgagaaaaaaaattagtgatgatgtaaaacacgtagggaaggggctcatgcaataaacaataaagtgttgaactactgcgagtaaactctgcaacttcgatc

SEQ ID NO: 453 - DNA, 83689 bp, Arabidopsis thaliana
aagctttattaatacatatagatgataaattctatattaaatgtatttaagaaaaatgggagaaaggaacatccacttttccatttttggtataaaacttttgatataatatgtccttttgctcgccgaggttttccttatttatacactcccatcttttacatattcacccatcactctttcctctctaccttttataataataacatatatctactactttaagagaaaattatgattaaaaatagtgttttctcatggtatctactgcttgtgaaatgttttatttgttggtcgctaaatttgttggtgttacaaaagtttgatattctgtgatttcatcatgtttcgattgcgatacaaaaacgataacttggttatttataaaattttcacaatgcttgttttacataacatgattacaagacaattgactttcttttttgtaaagtgaaatcctacactcatttctacttctttttccccatcccattctattatttctttttcctttcaataaaatcatattttatgttgagatatttttgatagtgcgattttctttttcatttgtgacaaattgtttgaggattttatctataaattgtttgacaaattgttcagactctcaatattaacttcatttccttcttaattacacatatgctatctttactccatatatcttttaggtctcgttaaaattgtgaatatgtttaatagataacactataaacactatttcatgatagcataaaatcactgaatggtatcttaagacaaaattggttgttgattttcacgaaacttaaaggtgtaacatcattaaatgaaagtaatagatgtacttaattaacttgtgtcatctccatagatcaaatcatggaaaagctcgcttaatacatgtttaccccaacataaataaagctttttctttaaagtttcattttattaaatctaagatggggatttgataatgcgtccaagaatcagtctctttcacagtcttaacaccaaagagccccaaccctatcatcacacacacctctctctcatctctatatctctctctctctctctaagagacagacagacatagatatatcttagatttttcccaggggaaaaaagtgagttcatcttttcagatcttacaaacactttgcttttataaactgatgtaccacaaatcattactagtactatcttaattatctttacaatttttttatctagcatagccaaaaagaaagagcttgcacatatggagagatcaaacagcatagagttgaggaacagcttctatggccgtgcaagaacttcaccatggagctatggagattatgataattgccaacaggatcatgattatcttctagggttttcatggccaccaagatcctacacttgcagcttctgcaaaagggaattcagatcggctcaagcacttggtggccacatgaatgttcacagaagagacagagcaagactcagattacaacagtctccatcatcatcttcaacaccttctcctccttaccctaaccctaattactcttactcaaccatggcaaactctcctcctcctcatcattctcctctaaccctatttccaaccctttctcctccatcctcaccaagatatagggcaggtttgatccgttccttgagccccaagtcaaaacatacaccagaaaacgcttgtaagactaagaaatcatctcttttagtggaggctggagaggctacaaggttcaccagtaaagatgcttgcaagatcctgaggaatgatgaaatcatcagcttggagcttgagattggtttgattaacgaatcagagcaagatctggatctagaactccgtttgggtttcgcttaattagatggtaataactttatccataaaggattcgaagttcacaattctagaagatatgatgcttctctaaggttaattagtttcatccatatgaaattctctaagcttgctatttagtagaacgttatagttgattatatgattatagtataagctataagcttgcgttagatgttatataatatgtatgcgcttgttaccgttttatgtatgacaatggatacaattttgtctccttaattattgtttatctcttcgatcgtatataaatttctacatattttagttcttacgtttcatgtaaattgatatgttagacttagtttactttttgttttgttttttgttttctgaagattgataatttatttttatcttttgcgtgcaaataaataagtaaatatatatatatatatatatatatatattggggcagcctatatacaattgcacagttttcaataataacaacatagttagatagatatattagatcttttttttaatataatatgtatgaagaactacaaaatagcatgctttataaaagtaatgattattcttttaaccgaaaacatagttgatcttttggagagggatcgtttgttatactttttttaatctacttgttcaatccatatctttcatctctactacggtagtggaacttgtaggtcgcatctagatgaaactaaatttgctagctacttcaaattgaattcctatacaagggcatatataagaaaaaagtaaaacatatcaatgagttctgccttggaacgattcactagtttcaaaacttaaaattcgcacttcatatagtgcctatatatgctgatcatatatcgtcaagcaaattggacactgtcttaatctccttcgaactaacacatctaacctacctttttaggtaacaattaacaaacgggctagtaagattcgaaatagatagtttcgtggaacatactaaatagaaattttcattttattagtaattcttcgtgtacttagggtttctatcttcttattttttctgctatagagatactaatttaatttaatagaatatcatttatgaaaaagaacatgttatttgatggagtatgaatcttcacatgtatatatcatttgcaactatgtctttttctgataaggagcttttgcaactttgttagtatcagatatcacgtttatatgtatatgaattttcggttggcacactagaaattaaatttaatatttaagcatttgaatatgcttaccacaaatcaaggcttctgttgtttgtgaatacgaaaagagggctttcagtttcttcaaactcttgacactcatagcatttttggttagtttttgtcattttgacttttgtatgataatttatcaatttatttcaaatctgaatgggttgaatagaaactgtgtttgcgtgtgatcttgactaattgtacaaaaatataaatatttttgactgaatcattgcactgagggtaacaaatcattattagaaaacaattcccaaagcatatttcagtttcatgagtgcaaaatctgtaaacatgtcataatttactcgatcgccatatatttccttaatctttttctttttcttttggtttgaaaaggtcaacacgtacggaacaaatcatacaaaactataggaagatattaaaatctcttaaatcagtaacacagatacgcaacacttgtgtatgtgacgaccatagttggatttggacaagagggtatatatgctggaagtttggtattccccaaaacctgagggtttgcatgttcccgacaatgtctgggttttgaatggcatgatgagctttccttttatagtaagttatgttttcgtcagttctaagcgttacacataactaaacagtacaaactcctccaccaaattattactttccttgaaaagcattaaagtttttcctcaacactttttcacatactcaaacaccagccacttcaaatgtctacgcaccgttattattaattcttaatttcttcatctattctttttcttcatctatttgatcatctctctttttcattgaattttccgaaatatttcttcattatttacatataataagttaataattcatcttagtacaaaaaattaacgcagattcaaatttgagtggtctggcaactgtaaagatagcaaaccaaaaaaaaaaaaaaaaaaaagatagcaaaccattagcacgacttaaatccataatttctttattttctaaaccatttaatgaaaacgcttcaacaatttcaacagctacaaaagtttacattataatttcagttgtaagaacaccgttataaaagtatcttatatagagacatatattttgagtcattgaaaaatatgtgagacaaggataataacaacagatcatcaacaaaattaataacattcaaatccaaatatatggaaaaaattgtatctctaaagctatcccggcaggacttggtatctttagcctctttacaagcacattagccactacatattaatataatatatccatcatccatctctacggactcgactatatctaataaagctctatagtccgtacataatgtcaagtgatgtcaagatcttttcacataatgtatgcatgtgtgcatgcatgtcagtaattaaagtcatgaataataatcggaagttatatcatagtgtgacattgtacattcaagtaatgaagtaaatatataaatgagcagatataaaagaagagcccaaaggggcactagggctgcaacgtgaggctcaggccatcacattgaatgactttgatatgatgacgtcataagacaatgaaaacacatagaaaattgtaaagacaaataggcaaaggagaagctcatctttgttgttatttttgtgaaagtggagatagacatgggcacatattggtattaataataccagaacgtacgtagtattaaaaataaaagtgatactttcatatgaagtattagataacaagttgatgaacaaattaagtaacaagttaggcaaatatcacattttatttggtcatcaagcactatttcttaattatgtgaacaatcatagatatactaattgatgccagggtattattacaattactcaaatatttaatgtgcttatatgctaaattcgttatacaaatcgtataatataatttatattttttcagcatcagaatgttgaaaaatgactaaatgaagagctacaacttgtcacacacaatttggttctctttctctcatttttagtcgatgaatgggcagttaggtcttccacttccaatcaaaacttttttgatttttggtttcagatatattcacattcttctatatataaaaaatccatttcttcccttttcatttttttttcattctcattagcactttttccgctcacagcaggaacaaaaatttgattaataaatttcgcaaaacaaaattgtccactttggaactattaaatatttcagtgttgatttgggttaaattttcattattgatgttcgttaaatttttagaattattttctgaaatcagattacgtggaccagtgtttgtagtttaatggttttacttaacaatatatcaccacattatcattagacttatgtattcactctagttttctctggccatcactatatttagtttgggctttaaattgggcttcgaagcccagctatactcttttcgcatagccactttaggaacaattcatttatttcatttttttgactttaggaaacaattcatttaattataacttctacatttttttattttatttttgtcaacacgaacttctacatttatttacagaaagaagagaaaccaagtcccatgcccaattattcctaccgagacttttagttaaattacaagcaaacagaatacatatcattgaatgtgtaagtgtgaaaatggacgaaaataggtatagccagagacatttatatgcattcatgaatttgttagtatttcttactgtttcgattgcatgtgacttctttaattttgaagattatcattatctccaacactacatagagcatttctatatatgcatacactattctttcagtttattactattaatgttgtatatcacccgcaagtccaaacacacatataaatattgaaactgttggtggatattttttccgtatgattcttttatcaagcttaattacatcaattaaatagtatcacaagtataaatggtacaagtttaaattacttataagcaaatgacacaaaataaataattaaacatcaattataataagtgatgtataaattaacatgtttagcgtcacttcaatcaaattgatagaaatttgtattagtttgcatcattttaacaaattgatacaaaaatctgtatttacaccaattaaataaccgatgtattcacttaattttattaacatcagtttataaaaatgatataaaattatacatcaataagaagtgatgctaataagtttttctgtattttaatttaaacaaaaaactaacttgaatttattgtagatgacgagaaattgttattaccataaataaataatcatattgggttaataatttattattaatttctatattttccctcaaaatcagctaactaaatatatttgtttccttcactataaatcctgctttcacgctcacgatcttttcttacagttttgtatccaaaaacgtttttagaatatcttcaaattagtttttgaaatctcataactctcattcaattcttcatcttcaacgacaagtactttcttatttttctatcattctatctttctctttttcttaaccattgctcagtttttttcttttcttttattttcagaaatctgccattgatcattaggactgtttgttttcctacacagtttggagaaacacaaagtaaaggtactctatcactttcttttaaaaatacttacaaatggttattcttattccgaccaaaacaattctataaattttcaaacaattaatctcttttttattttgtacagcagaaactcaagtgtgatgaggattcaagggatataagttataaccaaagtatgattttgattctgtaaatggaagagagatggcatagaagaagaactggtatttttcaagaagaaccaacagttaatggaaggaagaagcatggaacagaagaaagatgtgtttaaacatgaagaaaccaaaaccaaattatgattatttttttgcttatcttatataaagatttattgttcatgtaaaatattttataaaatcttgataaaattttagtagatattccaacgagtaattatccacaatgatctgttattttttaaaaaaagaaataaataaaataattattcaaaatattaataacattatattaataattatatatatattatttaaatcaattatttaaaccgaaacaaatactaacatcacttaaataaattgatgtaaacattacatcatttttagtaactgatacaatattgatatcaattacaataatcgatgtaattattttgattatttacatcggttactaattaaccgatgcaaattatttgcatcaacaatatttaagtcacttatttaaatgatacaaaattcttttacatcacttttaactaatgcaaatatttataataaatgatgtaaaacaaccttttttttgtagtgtctccaacactacatagagcatttctatatatgcatacactattctttcagtttattactattaatgttgtatatcacccgcaagtccaaacacacatataaatattgaaactgttggtggatattttttccgtatgattcttttatcaagcttaattatatagaccttaccttgaccgagtttgtttcttatccacatgccaatttagaatatttgttcgtgcgggttttatgaaacaaatgttattgatgaaagaaataaatgtagctttaggaggctaaagtctacgatgagctgtagtcccaaagttctttttcgtctgttataaattcactagtgaatattcttaagtcagtaggattctcacatgttctcgaaatcctataaaacattaatgctcctgatcagcttatagaaaacgaatgacaatagttctttatctaaatccataaaacataatggtatacttgttttactatatattatctgcatgatctcactaaaaagagactacgccaaaaggaagtcagcctacataataacaaatctattcaacttccataatatcatttttcttgaggctataattattttccattgcatatatagagagttttgatccatcgtgattcgttaaacgttctattatatcctaaaaaacgatatggcaatagctaaaaccgaacttataaaacgcggtttcaatcggtccatagaagttaaagggtaccggtgtgaacgaagtaagtttatggaggtgaatattattttgtcggttctgaaattgaatacagtaaaatattaattttagcaatcctaagagtagcaggcgatcgctcatcgatcgtatttttttctaagttttattttgtttttgttaaagcatatttttctaagtatagaaaccatcgaaatcaatttcagttttggggagaactcataataaatttcataaatgctatttaattaatgagagcaatttgtatattcttaattgttttacctactttaagcacaaccacaagtccacaactccttagtgaatgcttcttttaaaaaatttggttttattattttgtaggtattacatgttcacattcaaaatatatttcacactatattagattaaatttaactaagctttaatatttcactagctcctactagccttccaatttttacaattttactttgcaatttttactctcgatccaaacaaataagtacttttttgtactatattcaaagatgaacaactttatatttttcttgaacaaaaatgaaattgaatagagagaaactagctaccctaactagtcactcgaaaccttataaataacaccttctgtagtttgttttcctatgaagaatatttttcaactttatctattatattatcctttgttaaactttccctgaaaattgttagaaaataaactaattaaaataattctaagcatgacgtttttgtagttattaattcatgttacattagacgcacgaatttaattataatacacacccccgtaattaagtacattaaagaccctaaagtatatatattaaccattgataaaacaatttagccctaattagtgtccgttcacacacataatctttcctttagcttatatatacgctggtgtgtgtttttaagaagcttcatacactcattttcaaaacattgaatactgagacttgagagagatcccaacagaagaagaagagagagatgaaccaccgggacaaacaaattgattccggctctggctctggagaaaaccgccggacttatgactgcgacatctgcaagagaggtttcacgaatcctcaagccctcggtggtcacaataacatccaccgcagggaacgcgaaagatacccctcctcctcttcttcttctcactcatttccattttctcttccgttaccatctcagtctccctcctcctccacaaacttcacaaaccctcctccttattttccgaccattgagtcatacctacaccaagggtctcagccacctattaaccctagccacaacacacaatactttggatcatcatcatcatcaagaggaggagggagatttgctcaaggggcgtctcatgatcttaatttgagcttagggctcggatccatgaatgaagatgatgacactcaccggagcccaccagagaccggaggttctcaacctcaagatggtgatcttgatcttgatcttcgactcggcggtcatcgtcatcattaagcttgcagcggtttccctcacgttcgatccacgtaaccatatacaatatatatatatagttgaaagttaatcaccgtatagtgcatgatgtttattgtggtgtttatatatgttttcaatatatatgtagtatgatcaaaatatgttggacttggagtcatgtttttatcatgatcgtatgaagtttgggtttgtataattcaagactatatttttcacttaaaaattatagatcaaataggttaatttgagtaatgtttttgttatacctttttcaaaaagaaaaaaaaatgttcttgttgtctgaagttgggtttgtatagtacaggattattgttcttttccataactatatattagtgtagatctatagatcaagtagttttgcgtaatatgttctaataattagttacgttgtatgaaatttgggtttgtataatcaaagactatctatcattctcttgtataatattttacatgaatttacatttcaagtgggtttgtatgaatttacattataaagtaagtttaaacttatattatgaatgaattcgaactgcaatgggataaacattatatgcgttttaataataggttggtgaagtttataatttacaccatttgaaaagccttccaaatttagaaactacatttttgcagacccatgtgagctcatatgaatcaatcatagccttgatgttgtaaaacaaattatgattataaaaatgtgatagtatattacatgcataaaaaataaaggagagtaaatgaaagtcaaatctgggttttatgaactgaaagttgaagtttagaagtagaagtagcgatcaaagtatgaccagttaaaaggcccaatatcatttggaggtttgatttttgggttcgtaaatttcaagagccagattatgatttgctgggcttaaaaatcatggaaaaattgaaatgacggtgttaaaatatataactcaaattaaagattttaattgggtgtagtaggctgatttttttataagaatcttgtctatagatgcttcaaggttatgccttatagtactggttgtaaaacaccactatctaattttgaagctggtcagaactataaggtatgttgttgttggccttgttgctaatgaagattataacattctgttgttgcatttttttttttttttttgtgttaaatatatatattttttttgcatatttattgttgcatattgtgttgcatatttagtaatggttacattccctgttatcggagatccaagataatacggctcttgtggcatggactactactccatggattcttccaagtaatcttgctttgtgtgtcaatgcaaagtttgtctatcttaaggttcgtcaacaacactggaaaagtctacattgttgctgaatctcggttgtcatcgcttcctagtgataagcctaaggccggcttaactaatggaacttactagtgataccataatgcgaaaggtgctaattaagcttgacagtgaagaggattcttatcaagttttggaaaattttaatggagattccttggttgggaagaagtatgaacctttgtttgattacttttagcgatttctcaagtgtgacttttcgactagtagcagatgattatgtcatgaatgatagtggtactggtattgtccattgtgctcctgtctttggtgcagatgactatcgtgtttgtcttgagaacgagataattaagaaggttagatttgacaacatcttccttatatcaccacctttaacattaagtttattttctttcttgtttaagtttacagtatcttcaagaacccatgttcatgacacattttgttcatgtgttgtttagattgtcagagatttcaaacgtccagatggtttgaaagatacagagattgatgcagctgtagatagtacatatcttaattaaaaataccacttctctatgctctattgttgaggaaacatataatatttgcattcgttcatggttcagatatgatgttatggtaattcttgatctacgagaagatgaatctttgaaaaacgaaggtgttgcccgtgaggtaaataaatgtaaccgaagcgattaatggtcatatataagttgtatatttgatatatgggtttccttctcattgtgctcatgcattgaaaagcaccctgttatgactgtggttctaggagaacatttgcatttgacagtcggtgactaattgttaagcaagaagaacgcatgagagccttttaaagtgttttcttctagatcgttgcaaaaagttaaatgtctcttgagactttgtactcattctatagataaagatgggatttattacaaaaacaacaagaaactttgttacttgtggaaattcaaaattatccgaactagcttcacaaaatatgctcaagagtttcaatgtatttttttttgttctgtaattgtatgactccgtttgaagcatcaagattatggttataggtagtgatgctaaaactctctgttgttacagtgaccactaaaaacaccaacaaaaaaaacttaggtaacgtgtcgtctaaaaacttctaggttcaatttctttagatagtactatcaataaataaaataaatatgtacaaaggctttaaacaatgatgtttttcaaagatgattggtagatactaattagagcttcaatataaaagaacacatgcgattctgacattctgtggtctaacatggtttcttctagagtcaaaaccatacaattaaaagttaggaaagtaatagcaatgtggtttcaaatatatactcattactctttagattcatgtatggtgaaggaaacattataataaaatcaaagatcacagttttgtaggtccctcatattaatcaacatcttaaggcgttatacatatcttctttttgtaaatatttgactaattaaaatatctaattagagtattagactaatctcatcaaatatccgactacttgtgtcagttcaaaacacagtgattacgttagattttgtgctcttttgtttataaacaaagctaatttaagaaatatatgatctatttgcctccttggtcttaattttatactttcttggaataaaacacatttattaaaataatttttaggttcctagattcatgtcatgtggcttgatagtttccaacaattataccaatattttactcattcatatacaaataaacaagctttattctattcttcagtctcatgatatacgggattttgataaaattcagagtacccattaattattctatgttacagcttgtaataagttaaatttataaaacgtacaagttgaggaaataacaaatgttttcaatattaaatgatttattaatacattagtgaccaaaaaattattaagtgtaagaaaaaaaacacaactcagaaaaaattcaaaagaccgtctaagttcggttcatgtaagaacaagtgggacctctttaagtttctaaatcagagaataaagaagaagaaaaaatctcaaaaccttcctctaaaaccaacggctcctacctttacttacaccctatacatacacttctctttttatcctccatcggcggcttatggcggttttccggcactaatcatctccggcatatataaataaacgtacttcacgtttttttatataacttcaaagtagtttcagatttgtctctatctcttcacttttaagtcttctggttttgtcatcaccagctttttttgttctgtctctgtctttctctttgtgtatttttattctcgtcatcgttgttcttctatgagaggaagatcggaatgtcgaagagaattagaagattctcgtacatcacttcgttggaatttcacaggtcgatgagagatctgagaactgtttcattttgatccaaactcatctctttcaggtattccaaatttttctttctctgttctttctactattacccaaattaaagttttgatttttatttctcactctgtttcttgtttttctaattgcagagtataatggactaagcattttttttctccgaagatggttaaagaaatagcttcttggttattgatactatcaatggtggtgtttgtttctccggttttagctataaacggcggtggttatccacgatgtaactgcgaagacgaaggaaacagtttctggagtacagagaacattctagaaactcaaagagtaagcgatttcttaatcgcagtagcttatttctcaatccctattgagttactttacttcgtgagttgttccaatgttccattcaaatgggttctctttgagtttatcgccttcattgttctttgtggtatgactcatcttcttcatggttggacttactctgctcatccatttagattaatgatggcgtttactgttttcaagatgttgactgctttagtctcttgtgctactgcgattacgcttattactttgattcctctgcttttgaaagttaaagttagagagtttatgcttaagaagaaagctcatgagcttggtcgtgaagttggtttgattttgattaagaaagagactggctttcatgttcgtatgcttactcaagagattcgtaagtctttggatcgtcatacgattctttatactactttggttgagctttcgaagactttagggttgcagaattgtgcggtttggatgccgaatgacggtggaacggagatggatttgactcatgagttgagagggagaggtggttatggtggttgttctgtttctatggaggatttggatgttgttaggattagggagagtgatgaagtgaatgtgttgagtgttgactcgtccattgctcgagctagtggtggtggtggggatgttagtgagattggtgccgtggctgctattagaatgccgatgcttcgtgtttcggattttaatggagagctaagttatgcgatacttgtttgtgttttaccgggcgggacgcctcgggattggacttatcaggagattgagattgttaaagttgtggcggatcaagtaaccgttgcgttagatcatgcagcggttcttgaagagtctcagcttatgagggagaagctggcggaacagaacagggcgttgcagatggcgaagagagacgcgttgagagcgagccaagcgaggaatgcgtttcagaaaacgatgagcgaagggatgaggcgtcctatgcattcgatactcggtcttttgtcgatgattcaggacgagaagttgagtgacgagcagaaaatgattgttgatacgatggttaaaacagggaatgttatgtcgaatttggtgggggactctatggatgtgcctgacggtagatttggtacggagatgaaaccatttagtctgcatcgtacgatccatgaagcagcttgtatggcgagatgtttgtgtctatgcaatggaattaggttcttggttgacgcggagaagtctctacctgataatgtagtaggtgatgaaagaagggtctttcaagtgatacttcatatagttggtagtttagtaaagcctagaaaacgtcaagaaggatcttcattgatgtttaaggttttgaaagaaagaggaagcttggataggagtgatcatagatgggctgcttggagatcaccggcttcttcagcagatggagatgtgtatataagatttgaaatgaatgtagagaatgatgattcaagttctcaatcatttgcttctgtttcctccagagatcaagaagttggtgatgttagattctccggcggctatgggttaggacaagatctaagctttggtgtttgtaagaaagtggtgcaggtgagtttccttacatatctctttctaaagttcctgtcattagtctgagtttctgtttaggagttctttgataatgtgtgcagttgattcatgggaatatctcggtggtccctggctcggatggttcaccggagaccatgtcgttgctccttcggtttcgacgtagaccctccatatctgtccatggatccagcgagtcgccagctcctgaccaccacgctcacccacattcgaattctctgttacgtggcttacaagttttattggtagacaccaacgattcgaaccgggcagttacacgtaaactcttagagaaactcgggtgcgatgtaaccgcggtttcctctggattcgattgccttaccgccattgctcccggctcgtcctcgccttctacttcgtttcaagtggtggtgcttgatcttcaaatggcagagatggacggttatgaagtggccatgaggatcaggagtcgatcttggccgttgattgtggcgacgacagtgagcttggatgaagaaatgtgggacaagtgtgcacagattggaatcaatggagttgtgagaaagccagtggtgttaagagctatggagagtgagctccgaagagtattgttgcaagctgaccaacttctctaagttgttatctcaacttctcttctacattcaaaatttttacaccatagatttatgtcaaatatatcaaaatgaaatttcgaaattgttattatatataccacccatatctctatgatttgtacatcctgtttttttttgttctttttctcattttgaaccccacgaaattgcattgaatcttagtatttcgtagggtcaagaaggagtcagtttcgtagttttttgttttctttatgttacgaacttacgaaactgaatatggcattatagagttttgaagataaattttcttcgttactactctacatcaagttaattctctagtaggtattagagctctcttaaattatcctggaacatgaaaagttgtagataatgtcgtctgccacttttgtaataaacttttcaaacaaaagaatcattgaaaaaaatgtgtgactttattagttgttaccagtaaaaatcaaaatatagtaattatttgttagattcatgccccctggactagagaagattacattaaacaaaactgcacattcctcgagcctattaaactaaaagaactgcataaaataaagtagaaatggattggatttgcagaaagtgaatctagggaagagatgggtttacgtaacttgcaattatatattcaaacccacttgtgcttatacatttgtttcttcgaacccgacaatctttgacagattagtcttaattattagttaaagtactaattatttgataactacagtgaaaacaatcatgtccaaatagataaccactcttcactttacactttcaagaatccaaatatttcccccggctgcctacagttattgcgagtaaaacagtttagagaaataaagaagaagaaaaaagattgatttgttacattacatcataagtaaaattatgtaaataactgatgtgctagtctaaatcgcgtctaaaattttcttttgtgtataaattaagaatcttaggaaatttgtggtactaggaagttattattgttagttatttttcataagtaactaatttcgaaaaacaattattcagaaaatatataggcttatttaagttgatcaaaaataattgctattatgaagccgaaatgataatggcttgagccacaagatcaagaccaaaggggtcgttcctagtcaatatagctgacaaaatgatttgcaaagtcttgaaataccttatcaccatcaactcataaatagaagatgttcgatgtattattcattccaaagtcgaacaatatacaaaagggaccgatgcatgtgttaatcttaatcatacctcctttttgtttatacccaagaaaaaaaaaagtataatatgtgaacacataacatagaagttttgctttccctctatttttggctaaaacagaaagaaattcatatctcttttttaggtctagaagaaagaaaaaaaaaaacaagaacacaaacgtagatagagaattctactcatattatccaaaatatagtcaattcgatccaaacttcttgtttgcttgtgatcacgtcattcacaaaagataaattagctttgtcttaacattatatgttagtcaaaggaattgaagtatatcaactactgttgtcttctagtttactaggaggcccttgttcaattttcctaattttctaagttaatttccactagagaaataggaatatgaatacgagttataaagttaataaaaccaaaactttcttgaattaatagttcagcaatttgatgtatttatatattcagcaaaacacataggaagatctagctagaaattctggagcttagtctagatacaaagactatgcagagacctttaccaacgactgatttgatataaagagaactttgggccaaaggttgatctagttcttagtcaatataaggttaggcccaaaccccaaaagccttgacccaatatattaactttctttttcattcttacacacaacaatcaatagcaacaataaatgaaattctcatcgttgacacacaaaaaaagaaaatctcaaccacaaaaatgtcaagcttggttcaaaaaacatcaatgcactttttgccctactcaatctctctctgattaaatgcattcatcacctaacatctctctctcttgttgggttggctttaatatatgtctttcaaaaaagctcatattcttcaatacacacacttaactttgcctaactatgagttaccatctctaacattgtctaactaagattggagttatcattgttaaagctcatattcttcaatacacacttaaaaaaactcatattcttcaatacacacttaacattgtctaactaagatttggagttatctacaacagaacttcaattttcacaatcattttttatgtatgcaaacaaaactagatatttagtattcacaatgtgttgaatcataaacaaatgtatctatagaacaacactaagaagaagaaagaaagaaaaaaaaaccaattgttagtccaagtaagctgcacggcattggctctgccactcaaaacaatcttcataatcaaagctactcgcgcaatccaacaacgcgttttgttgttgttcgtaatggcaaatgtagtttaacccgacaagaagcttacaaatcgcagcttctgtcttctctctatcagcaaagtaaagagtctgaagtagaagaacgttagttcgcttcacaatctgattctgctgctcgaagttgcgttcgctctgccaccggatcatgttgtgagctaaaggagcaagccaagaaagtataccgtctatggtttctttccagtcgtgagctagaggagcgtcgtagatcgaaatgttcttcaagtatgatcttagactagccttaagcgttgtcttcaaactcgttggtaacatttggtaaagatcatctcttgcttcttcgcctattagatgagggtacttaagaagcttttctaccacaatcacaacatttgcatagtgcaaagataaagcagatcctccaatagttgaagctgaagcatgttgagttaacctgctcttaaaaccaaacttattactccgaatcatcctagctgtactcaaaggaaatgtaatccgacccccatcttcatcatcatcatcatcatcatcaccaatagtcctattcatagcaagacattccatgaacatcctaccaggattagtcccacaagggaaattgaaatcccctgcacgcgtaaactcatccgcttcgcttctcctcgaatccttaaaacccgcaacagaccttgagttaacagccttactcgcttcattcttgctacgatctctcttcaaagtcacatcctttttccctctcaaacccaacccaccaaaaacagtttcaatcctaccataaatagtacaaacagtcctagccaacatctcaacaaccttatcataagtttggttccacaacgaaccatctctaagactcttcacgtcctgtctctgccacataagcttctgttcaaaagctttaacactctcttgatgctgctgacttctctgaagcttcactatagcttgttcaagctcattcatcacttccatttcacaatacaaactacaagtagcattcacaaatctctccatcttcttaaccatagattccatatctttaaccaagaaccctaacttcctaaaatcaatcgcaccattcactatatcttcataaacatgctcaaatccttgtaaagcaggttcgttacatttcttacctaacctagacacaacactagctacacggctcaaatcatcaagcttctcagagacagagagatctaaaagatgattctcatcggaagatacaagctttctaactccttccgagtgaaaaacctcggctttaagcttagagatctctgtatcggacagagaacggtgaaggtgaatggttttagacataacgttagctacttcgaaagataagattccaattgtttgtttaggaagagagactggtttaggggttttcttagtggaagaagattcaagaagaagagcgtgcttgagattagaacttacttggtttctcattttcacaatccaagcttctgaaaccattgtaaaaatcgaaactttgaaaacaatttcaaagaaagtttgagtctttatggagattaagaacagatccgtggaaaaaaagaaaagggtttttagattatgacatttaactttctcgaggaatgaagaaatgaaaagggtttaatcattggggattatgggcggtacttgaaaaagaagatgtaccattgatgtgagctttttgagggattggagaaggagaaagtaaaagtggtgaagaagaagaagaagaagaagatgggttttgatgagggaagctttaaagtttggacccaactccgcaaggttcttgtaagagacagagagatgttgaagaaagagagaggattttgaaagttgtgaaatttgggtttgattttgagaaaagagagagaagaaagagttgttattaatttttttgaaagggagtgatgttgcagctagtacttgctccactaatgttcttcatttttttttgtattttaaattttactcaaattttcaacttattctattttaaatcttgggaatttcaacctattcaatacagtaccaaatcattctcttttttatccacaattttgttaaaaatattttataaagaaaaaattaggtatttttggtgatgtggagtgatgtctcacaaaatatacatcaatcatgaaattattttacacattaatattttagatacactaattttggatattgtggtgttaagtttttaaagatatattttggtaaatttcttaaacgtaattaatatttattttaaaatatttttaaaagttttgtttttgacgtctattgacttgtaatatttgttttgtttcgtgtatatatggaggctatcaacttttgtaatggggatttatgataaataattgttggaaacaaattatatataataaataactaatcctaaattagtagatttagcattgataaaccttagcaatcatttggtattattgattcttatttctaatatttagagatatattagactaagatgtaagagttttaaaattttaaatgtcaaaaaacctttaaacatacagtaatataaagcaacaataggtggagcgtttttatgaaatttctttgataatctttggaaactgttttaaaaaccttaaatagatacaggttctcggtttcatcatttgtcccaaatagaatggaatctgtagaagatgtaatgaaactcgaatatgagagtaactattgtgtgagcgtgacatcattgataacttgagagaccaatacattgggaacaaagaagcacttaaaaagttgactacaagaaagaatttgtttgaccgatgatgttcttcttgttgtctccactctctttggattttttgtcggctaaagattacctaatttacactcacaaaacttaagaaattcgcaactttctccatcttttcaaaaccaatttttttcgttgacctaatttcaaagaaaaatctaggatcaaaatcaagtgacatttttcaacacggaattagaattttaaatattcgaattcgttgtgtcgtgtttgaaatgtttgtgattaaacaagaaagaaatattttatcatagacgatagattagttgaggtgagagagggagttggtgactaaaaattcttcatgtaaagaggagacaaagcatacagagacaataatacaatgaatgaaattacatgttgatttccatctcagtgggatttcctaatcattatatattttattattttgctataaaattcacgaatttctcttaaatacatatttaaaatactaaacaaataatctcaaacatacactcattaacaaaaataaataaaagaaggacataaaattttattttgttactttggtatgaaatatagtacttaatgaatctaatacggaatatctgatccaaacccgaagatccaaaaactcaaaatatctgatccgaacttgaaggggtatctgaacgttcacccctagctgctacacaaaaacatcaaagtaaactgaggataggaaaatgcagaaaaatccacataattggtttatgaataagattattcctacttacattttcagaactacttacgtttgaaacaaatccattgaaaagagaagaaaaacttttaatatttgttaaagagaaagaaaaaaaaattagttcgagacatttagtctacatttttgatgaatttataagtaatctttttctttgcattgtcgtagtctcgtagaatatgaataacgtagtataaaatagaaattgtgatattacatataaaaatttcatacgagtacaattcaagcacatattattattgtataacaattgtctcaatagaaagacaataaaatcatacttcattgaattgttatagaatataaatagataagaggattatcaaggcgtggtgagccaacaactttcggcccacatttcttaaaatcattctctttttgtgtcaaatttaggttaagattttggtggtttccatttggacccttgtcacatgcatcactactgatactattattattcttgtactaatccgtaataatcaattccgctttaaccttattgagtttgacatttcatggccgtagtctgtttcgcaattaggcccgtttctttattaaggcccaatatagttcatacatcgaaatggaaataggctggatagctacgtttgagaagttaacatgtcgttctttcaactacagttcaagaatgctaggattagaacttattccatgtggttctaaccaaccgttgttaatatgctatataatatctatacaatggtttaggtatatagtcagagactcaaagtgaaatttatgatcctttcgcaaaataattttgcatcaaatcatgagaagttgacaacagttgcagattaaggcaaaataatgaagaaagagagaggattcatttattattttatcataagatttaaacggattaaacagaattagttttgtatagaagattagcaatcatacaagcattcgcaatatataataatagtttccggagggaatggaaaataagtaacagttccaacacctttgtatttagccatgcatttttctttgcatgcatcttctccaaaacaagcccatccagttttacattgttttgcttctcctaccattttttggttctctatatatcaaaacaagatttaaatcattgtattaacatattttattttttctcttaattttatattttagtttactttttatcagttccaaccaagaacacaacaacatatgtcaatccgatttttgcaggttaaatgatgaaaattaatatattaaataattaatgatatagtacctgatgaagaaataagaaaaacgacaattagtacgaacatgatagaagagttcttcatattgatttttttctgggtttgtgaagattgaaattagttttaaatatctatttttttttattattttttttagtggtttgcaatttccctatcatatcatatttataggaaaatctttagtttttaactttgtcgctttaatttgttttcatttattgatattcatactttattgcttttagttttttacgttatgatcattttcattatatttttagatttgttatttattgcttatatagattttttttttattttagaactttttaaaaactcttgtaaatccttttaaaaaatctttaaaagttcttgtaaatatcttttaaaattttttaaaagctcttaaaaaattcttaaagccttttgaacccttaaaaatcttttacaatggtattatagttttacaaggattttaaataattacaaaggttttaaaagtgggtacttaaatactttacaaggattttagtaggttttcaaatgatttacaaatctttttaacaactttacaacgcttttaaaatgatttaaaaatctttacaaagatttatttaagagtttttaaaagatttacaagggtttttaaatacaatttgttttggcgagaaaaacaagtttgacccaaacaattttattttccaattacatattctcattaaataatggataatttaattatttcgttgaaagaaagacgtattttaaaaaatgaccaacaaaaaagatattgttgcaaagaagcactagaaaatagtacttttgcaaattccctaatcttttattgaataacatgtgattttaataataataaaaagaagaaactcttataaaatcactaatcctgtacaccccgcttaattttctttgaatttcaaagtacacccctctttaattttctttgaatttcaaaaacccttagtatggaggatgaccggtgctccatcaaggatcatgtaacttaagtaaatcatgtatcccaattttgttaattataattttgatttatgtctaattcttttgagaaatatcaatttataataagaccttgaatatataaaagataaatgatacaaatatggcgattaaaaaacagatttttaatttatttctttattctaagatttaatagtttacaaagatagtttggatataaaagtttagcaatcaaacatgcaatcacacatataataagttatcggagctgggaattctggaatagtatacaaattacaggttccaactcctttgtgtttagccatgcagttttctttgcatttgtcttcttctttaggacctaagcaagtccatccatcagaacacgtttttgcttctcctactatcaaaaccaaaatatacaaattatttacaccaagaacacaacaaaaaagtttgcatgccatttttgcaagttaaagtaccaaaattaatatatcaaacaatgagaatgttttttttaatctaaaatacctgaagaagaaatgacgaaaaagacaactagtagcaatagaatagaagagttcttcatcattttttcctagtttgtgaatactgaaaagtaggcttttaaaactagttacaatgggtgttgaacaaaggattaaatagttgaatccatttgataaaggtgttgaatctaagtgtattaaatgaagttagaaaaaagtcaactttgttgaataagtaacgtcaagttttaactttattttgtactttagttcaggtttttaaagaaaaatatataaatcataaaatttgtataattactttatcactttcagattttaaacattgaaaactaaatccaaaaattcaacacaccacttctttttgatactttattatttatgactgaattcagaaagtcgataattaatagatttttattgaaaacgtttaaaactgaattgagaaagttaataatagagatttagagaataatctaacgactagttagagacttttatttgggcataattcttggatgtattctctcttaattaataaatttaaaaatttaggaataaatttttcttattcatcatctcttctcttcaattcagtataagaaaagagattaccttttagagcttttgataggcttccataattgataaatttaaagataatcatcagctttccttgagcttgagagataaaactccctcagctttactatatctactacaaacaaataaatattcttacacaaaaattgtgagcattttttttgtcagaagattatgatcatttatatacaaaattgtgacatatttattttgattataaaaatattataattttgtaataatattgtgactgaattgatggtaaccaattttggtactaattatctccaattcgttacaaaatatatagtcacatttatatgtacagatttgagaccaaatatggtaactaaagtttacaatttttgtgactaaatttacgtcacgtctagtaacaagagtttgaaactactctgtcataattagtcttacattttttctttttttgccattggtcatagattgtggcataattattaccacttttgtaacaagaataaagaaattgtgaaccaaatattaaaccgagctgccggttcgtctgaagcttctcattggaataaacattctcaagggtggattaaatgaacttgcagaaatccattcgaatcaacaaattttctcaagattcacattattattttcgtttttggttcctttttgtaatctctaatgctctccactcttactttgtctctgttaattaataaagagagtgttgatggctaaaaaaagaaaaaacagactctataaattagtaacatttcactataaattaacaaaaaaaattggtctcaacattattaatttgtagagattttaatgaataatgtatttcatttttggctacattaatcttgtgttcacacatttcacaacgttacactatatacataaacatccacaataactaaattggactttagcttttacatttcggaccatataaaaacagtaacagaaacatgcttattaatttaataatcttttgatttattaaattctttacgaaaatcgagtttgttccaaccacaaaatagtagaaacgcacaaaacgcgttttctgggccgttagatctacatagaatcaaaaaacaaacaaactgtacttttgaaccgttggatctctaaaccaatactaaaccggaacaaacggtggaacaaacgtcgatgactcgtaataaaacggcgccgcgggatgttgccatttcttgaaaaccggcgttttctcaaccgccaccgccgtcgactgatttttctcaaccggtggttggtctaccggtgatgattcgggagaaagagctaacggcgagaggagaggtatagccgtattccagttattcgccgccggagtcgccggaacgatttttaacgccgggggtcgttttagtagacgactgggctgccgccgtagatcaccggaatctgagctgcagccctgtctcttcatcgtcgtcgacataaacgcgaaagaaatcgagttcttgaagaagactaaataagcaaaaagatttggaatcggaaaaagctaaaaatgagatttgtggtgttccgagaaaaaaggttaaagtttagatttttagagatgtttttagaatctgtgaagcttaaagattcgtgttcgtgtgtgttgtgtatttatattaagtcacaaagacgtgtgtgttgagcatgtaaagagattttttgtggtcaaaagtcttaagtctgaagatacattgaaagataggaattagctgtttttttaattttctgtggctttgctggatttccctatctttcggtttctttattttaatttttattttgttttccaaagagaggaatattctctgtttctttcacttgtttttctgtatttttaatttacttcgatttaataagacttatctagattttatatcatcatgaacttattagtgatactttcatttacgataggtattcaaatcaatactggtaaaggagttttttgggtatgttttaactgataaaaaaagaagaaacataaattttaaatatattttgagtatgtttttgttaatttttatcagtttcttatattaactctatttttttgtaagttttataccgtgtaattagataattgtatacataccatttaaagggcagaaagattttattttatttattattacttaaaactttatattaaaaaaaagagtctaaatcatgaacatgctcctaaatcatattagtgatattttatatattatcatgaacatatatagtaacatattttatttatgataagaatatctatttatcttacacatgttattgataaaactgaaatttcgataggaaccgatttgtaaaagtctaggttttagggtttccaccaacaaaaaaaaaaaggcgtttcggtattacttaaatgaccaagaagagtaaattataattttgtagtttttattttatttttaataatggtatacactataccaattaaaaagcgcacttagatttatttcaatttgatttattattactcaaagtctaaaaccagttatcagcagaaacaaattctggtagctaccaataaacaaagaagaaaagaagcgatgattacgatgaaataataatgagaaagcaacggaagaaccgacgttgagagatgggaccattgtaagtaggatccaatggacttggtgttaactgatacttcatgccaccgcctgttttttttaataatcttttgacccttctcatttgttgtcactattgattatttgattttttgaatatctagagaattctcatgccaaacattacataatctaagtgatttgtgtttatgctatatagatcattattatttgaatccaaattcacataatactgtagtataaattaacaaaaataaagtagtataaaacagtatttcataaaatatattacatgatctctttatttcactaaattgttttcttttactgttctatcattctgttaatctaatattttctcgattagaccaatcaaaaaattattgaataatgacaacatttatctctgaaattttaaaacaggtgttgaccaagttttttaaacacttgacaatcaagaagttaaatgtctattctttgacgcaaacgtgttaaagtcggtagacttgtaaaactcttgtaatagattgttatacgaattttggcatcaatgacaacttcagcaatagttaggaagtaattccggaaaacaatttaaaataaaaacacaaaaatttgtaaactagaataactaaatatgcaattaaaagggatatatatacgtgttcaattttggtttgacgacatttatgtgttcgtttatcaaaccctttatgtcaacttcttctttgattttagtgggttaccgattatcttgtttacggaacatgtttagtcaaatcattaatctgattacgatttatagccaatcaaatataccaagatccaattatccacacgttctacgcatgaaagcgttttagcgttttggtgctttgaagttcttaactctacaaaattgtgtaaatggctgttttgttcagttgctccaaaacttttgcaatccctgaaacaaaatatgtctactcttcacaagaagagatcatctgagaagatagaggtaatagtttgggctcttcagcctctaccatcatctcttgtaaacaaaatctgtgtgttagaacttaggagaagtagaaaaagaaaagagtaaatggcactcctggcgagctcaaaagagtaaataaagagtaaacaatcacgatttcaccaactgatcggtttgaaacaacgactcaaaatcatgattacttaccctagtaatttcaccgttgaatttgactctaaggttcacttcctctcacaaccatcgaatgaatccaagtaaataatggttttgacaatagtgactcaacttgtgtgttatcacaacgggtagttgcgatccgtaagctccaaggtaacaaacctccaaacattgtacaagaaaaactcagtttttcaacagcgaaaagtgtcgaaaattcgtaggaaacagacgttttttaccgttttcctatcaaaaatgtttataggaaatgtcccataaaaaatatatttttgtaggaatttggtaagaaatttcctacgaaaactattcgtaggaaaatgcgatggaaatttcctaggtggaattttttttttttttaaataaaaaatacatcgctcttttcactgagctagctctgactttatatgagtagtatcatatagagatgaacgaaaatctgcaaaaaaaaaaaaaaaacagcctattcagaaagtttcaaattacttttttttcctttctgaagctcttacaatggtggccatacaacttttatagaattattaacaacctcctaagatgttaaccatctatcctcgatctagccacatgcaaatgggcagttagggtgtaagacacgacaacatcaaaggttgttttgatattgtctagttttcctttcttactgttcatttaaatgcaaaatacctagttgatcaacaaacaatgcatgcacatttgcattagaatgctaaacgattaggccctagtgtccaaaaaaatatggtcgggtccgataaatcatatgacagaatgtcgcattgatgtgtatttttgtaaatcactacgatatacaaactcatttttttttacccctaaaatattcacacattctacaaatctactattgattacaacttacaaccacacatggaaaaaaaatgtacatttgaaagacattttaggcatgtcctaaatcaaaacttttcaatgtttgttttattttcttttagctttctatgtttctgaaaaggccaaggtttaatacgcctacaccacaaggagagatttttctgagaagataaaaagtgaaaccaacagatcatacatgtctcgcatatagtgaaaacgaaaaaaaacaaagagtttgatgaggatgcaaatgcatgcataactattgaattttcttcctcccttagaaattgttgttgcgctccatgttgaccgctcttatctcgcaagagaggtgctctagctcccagtgatcaatttgtacttgagatgcactacaacgaccagcaatgtttaactcgatggatgtagttaaggtagcaatcctctggaaaagaaaaaacgaagagaataaaaaaccgaaaactgaagaagttggaagttatcactataagtcaaggtaacatttaagaatattattagatatatcacctttttaaaacgaagatagcgttgcaagagtgcttttctttcgatgatgtcctagtcttccaatagttctccgctctcttctcctgcacacaaacaaaacaaagaaatatataagcaaagcaatagttctctgctctcttctctattctctcttctcctggacgttcaatgcaaagcaatatataaacaagatatattgtgagaatcttagctattagactaattaccagtataacttgagatgcctcagtgatttggtcaagtcgggccataggtaagccaatcacacagctgggtttcttcaagatttgttccaccaggccattgtagctacgaatcccagcagcttgtagtctttccacatctcaagcgtcaatcataccttaactctacgaaattgtgtaaatggctgttttgtttagttgctccaaaactattgcaatctctgaaacttctttctctgctttgcatttaaggactatattggttattaatctatctatgtttcttacaattgacatctctctaaattttcatcaaacataatatgtctactcttcacaagaagagatttctgagaagatagaggtaatagtttgggctcttcagcctctaccatctcttgtaaccaaaagggtgtgtgtttgaagttaggagttgtgattacatcaaaacgagtagttgcgatccgtaagctccaaggtaacaaacctccaaacattgatattggtgggaagagatgtccatttttcaaaacggaattgttttttttttttttaagtacatttctccctcacggagctatctctaactttatcttagtagtatcagaagagatgaacgaagatctgcaaaaaaaaaaaaacagaagagaagaactctttgtaaggtttcaaattacttttttttctaaagctcttacaatggtgttcatacaacttttatataattattaatcaaactcctaataagttaaccatatgtcctcgatctagccacaagcaaatgggcaattaggtgtaagacacaacatcaaaggttgttttgatggtctagttttcctttcttaccattcatttaaatgcaaaatacctcaacaaacaatgcaggcgcatttgcattagaatccctttcttctgcaatagagttaattggactgatagatcagtttaatgttgtccagtaaacaagaaacggaacaataaaaagcaaaaactacgggaaaataaaaagttgtctctttgttcgtgcttaacagaaacaagaaacagaaagataaaaagaaagtaggattatgaagagaaaatatggatcttggttaataatctattatttggtaaattataatctcattcattggcattcttaaattttgctcttctttgatttcataaaacaaaattttatagtatgcttttgcatctaatgatctggaggttcttgttctatttttgtaattgacaacaaatcagaaaaagactataaaaaaaaaaagtaagcgaagattttcggcacaaagtcttttgtaacaaatttggttttttagaatttggtagttattattgttctttatgtcactttctttgtgtacttgaactgtagtccattggtgaacaatacactgcaagcataacagcaaacaaacacattggatggaatgtgatatcacttactaaaccataaggtcaaatagtcgtctgataaaagaaaaataaaaggaaaagacataatgggaaccatcgaaataaagcaatagagtttgtgaagttgtcactttcagtttgcttttactttggctttggaagttgaggccttatcatccttcggtctgcttgttcttctcttcatcatcgaggttgtcgacagtatgcttcaatccaatgtaatatagcaacgccccgattaacgtcaagttctgcaaatcaatcacaatctttgttaatcacctaataccatgtgataaatcaatgtgttgatttacgcggtgacaaagcttataacctgagtgaagtcattcaagttggtagggaaaggaatgacagttgagaatatttgcgttgcgagctgaaatcaacaaaacatatttgcgttgagattagaatcttgatcaacaaggaaaaaaacatttttcaagattagaatttatgtttttaccaagaagtaagctgggatggattgtccaaagatgaaccataaagctgcggttgcctttgcacttatgagtgcgaactcaataagtcgaacatcgaatgcgaccacttgcattccaaagtaaaatgtgagagccttagaaccatatttgctcaacatgttcacggctggtcccatcgtcttctcgagtggcccgccagctccaccgccataatgatcagcataactaaacagagttcaaaaccataaccttgtggattcgaatacataaagtgattaaccgaatcaaagatttattttgatgtttcttactcttggattgcagtaatgaaaaagacaaaggaaaatgccattctcccaaagaaggcaatggctggcattgactttgttaaggttgtgcagaacatgctcttgaccttgctaattgacatcttcatattgtgatcttaatgtcaatgttttctataatattaaaaaagattcagatttagatcagagtctgaatacgtcttgtagaagaaaatcaaatcataacagagaaatctagggtttacatgatatcaagacatacaaaaaacaagaactcaaaaaatgattttattttcgcagaaattataacagtaacttctttaaaacctatggtgtaatcaaatcatcctatgtaagaactaataatcggaaacaagaatcaagaatcacatgatgatcaatggtgcagaagatacttacttgttccggaagcaaactatgaacgaacgatcaagaaagtgatatgattaaagctttgatgaatctggttgcataagaagtaaataaatagaaagaatatgtcttgagatggataaaaaagaaacatccattgaagaagaagaagtttgatttagtcatttcggtcgtaataaacaaagaccatcatcattcacgcagacccggcttgttcgcaccaattgatttaaacaaaagacttaaacttgggtcattatgaaatgatttaaatgtattttttatcttagagaaggtgagattcatgaattgggtatttaaagtcaacgtttacaaaaaaaaaagaagacaatttggattaagtaataaattaaaataatggtatcaatacagtatacaaaaaaagacaatttgcataacaggtgtgcacagtgcataaacaaaatttttttaagaataataatactgtttaataaataatgacattattgattttagtggcgttgacatgatagccattaaccaacgcccatctataatcactacgtgagatggtatcgtctggaataaccaaaaaaaaaaaaaaaaagtcatcataattaacaaacttaaaatcctgttgagctgccaagtaactatcatatggtaaattgtttaagaaatttcagtggaaaacttttattgagaccgtcttttgttattgaataaattatcaataatagaaagtgtgtttatataagcaaagctaatatgtatgaaaatatattattaaataataaatactcttttggttcctttttgtttgatttttctttttttaaattgttttaaaaaaattaattttttaggttttcaatgcaatacttattagttataattgataaattgtaaaattcaataaaaattattaaatattactagtttaaagttattgaaaattgtaaatcacaaaaaaataatgcatttaaaagcaacatttaatatattttcttaatatttagaataggtggttaattttatttgactgtcattagtttagattaattaagaaaaaaatgcataatagtgataatattgtaatcatatgtgatcagcgttgtctccaacttcttaccaaattacattgaccagaaattaaccattatcataaatcaacaaaaagaaaaatcaataaaaccacaggttacaatattggatcaattatttgcctacaactacatattatacgtaaaagttatataagcaatggatgattttgtagtataaattaccgtcaagatttctccttttgattatgactcttcttcgtcaccaatgtaaatgcacatctctcttacttctttcttttatttccttatcctcaacaaaacccttcattgacctctgctctctctgtctctatcttattatctccttaaacaaattttttaaaccttaagagctacgagtgaattggttttattgtaaactgttttgacaagcgtccatacttttgccaagttatatagccaagtgtataatccctaagataaatgtcaagagatccatcttttctgtatgtgatgaattggaattataccgcaccaatacaccaagtacaaacaagatatacttaataacatggtatagtagactaataaattggtaaaatagaacaaggaacctatacagatgtcaatgaaatatgctatgcacatgcacttcatctttaactacaattttatatttttttaatatttttgatgaaattaatctaaattttcttagagatcaagaagcttgaagaaagaaggaaaaaaaaaacaacgtgcatccactattttctccggaaagaagaccaaatctgcaaattcatcaccaaagaatcagagatggatgttgtgcaaagaaaagtgaaaaaaattggaagaaaagttgcttctttccctcatgttgaaactattggaagagctctctttgcctcctccttcttcctctcttcttggcatgagtaagaaacatcattctgattcgtacttggaattcaaatagatctaagtcagagtaatgggatctgataatttttgaaaattcatatatacaaacatttgaagatgacttgtaattgaatgattcttaggcatcagagactctttgttttaacaacaagaaggttattgaaaataaagaaataaaaaaaattaaagaggttcttgatatttttctcagttgatgattaaacttaacaagtgggattcttttctttgttatatctagttacatggagctcaaagccaactggaatggaacagaggattattggagcccaaagtttggctattcaggagaccagattaagcatcttatgacagttagtatcattgtgagaactcttggaggacttatcttcatctatggcagcttcttcggagcctttctcttggtactaatatgaacactttatttataggaaagcttgaaacctaatgaaattaaatacgaatacattgaaataattataagaataatatacagctattgtgatatgcatcacttatagatcatatgctttgtgtcttattccaaatcaatatgtttcttgtgggtgcatatagcttatgtaccaaggcattgctacaatggttcatcatgatttctacaatcatcgtttagatactgaagaatttggactgctctatctcaaactcaaaagggtataacgacctatatttcttctttttaaggcactttcagtttctttagctgctcatttgttctttgttttgtctcctggtttgtttgtcagattctgaacgaaacagtgtcgtacaatactgcatacaatctctacaaatcagactttgacgagcagcagatagagcaagtgaaatcaaaattccgtgaggtgcgttattgaggcctacatgtaaatgtaataattgtagcttgtgaacactgtgtgatgattgatttaatgtgttgtgtagcttgcggatcacgcgatgacaaaccctgcattgttcggacataatgagtttcttcgtcggctcttaagcttcgtcaagggattggccgtagtaggagcattgctgtttttcgtggatatgaagtatcgtctcaacaaagccaagaagcaatccaaagttaaaaatgattgaaaactaaaaagccattacaaatgctttatctttatgtgctattgaactagaatcatatatccatcttttgacaatccaacaaatatgttacctttattaatttggtcttgatttgaataatggagctataattaattcatgtagttgaaaagttcaaaatacgaaaagaaaacaatatgactagctaaatttatttattagaagttgtagcagaatataaaattgaccacattagtacaactgtgcacgttctatgctactagctagcatagtcaattacaagcaagtaaacatatttttaatgaccttttcacaaattttcgaaaccaaaaccagacaacacttgataatattatttgttgtaaagctacaaaacgtgagaatcccgatagctatctttaatacattgacttctaaccggttaaaaaagaaaagacatttggtatgtaccaccaacgagtcaccctaactaaaactataattgggaactccgatcaatttttcaaatccctctagtcatcttaaaatataaatttatttcactctataattgagcataatgcaagttcgttctgatccaaaaaaaaaaaaaagttccggtcgttttataaggcaagtcaactttgatagaaactaatttagcattcgcataactgtacattttctttaaaatacacattaaaaaggtttaaacgttcaagtctttattttttatgatgaggatatagacggtctttgatttcaaatattcgaaagtcatttttttttaatatcacaagttgtagtattttaaacaatatgttatttcttgacatagagattatttagtcttttatttatatgtgtttactattcttcttccttttatataatcatataacctatagtttgtatatttcaattattccatcatttaccatttagtcgtctccttggtgatccaaatacttcatcaccttccttcatagcaaattctcttcgtctatctcatacatttaaacaaacatagacatacactaatcaatcttccttaatttaaaaaaaaaacatggagaaaacccaagaatcagtggttagatatggaaaaaagatcgagaaaatgccatatcttatgcccgccggccgagttgtctttgcatctgcgttcctcgtgtctgcttggagagagtaagcactaatgaaattgttagttctgaatgaaatatattgttgtctcttcatgctagctattgatttttatatttcatggtttttttgttttgtttttgttaaggtattatggtttcggattagctgccgatgagttaagaccaaaacttggtttctttgagaaccaggtaaacattttattatacataagcgttaaataaacacaaccgatcatttgtgttgtaattaataacaaaaatttataggcaaaagccatagttgctcttggtatattgatgaagtttgttggagggatcttattcatcttcaatacgtacgtaggagctgcgcttttggtatactaatttacctcattttcgtattcttatgtttaatattgaaataagaaacgaaattactaaaacattgcatatggtttgatcttatagcttgtataccaagccatcttgagcccgatattgtacgatttctacaatcgcgattacgatagagaccatttcaccgttttctacacaaagttcaaagaagtaagcaacccgatccacggcttaaagtgtaactataatcagtatatttgtaatcattattggtaatatatgactatatgtaacacatctggtatatatatgattagtttgtggaagagacgacgtcagctgatggtggagtggccatgagcctctatacctctgtggttaacgaagaatcgcgccagaaattcatcgatcagcttaacgaggtaatgaatcagactagataacaattattatgtcattgcttttacatatatatcaaaacttcttaatggttatgtttttgcagattgcgagaatcgccatctcgaatcctctattcacaccaagcgatttcaacacattgttcataaggtttattaaggtagaaaactaaacaagaatagttaattaacattaagaaagtaatgattaattcagatgaaattatcggaaactgaaaaatttgttgtctattatttatagggtgttggaatagcagctgcattggcgtgcttcattgcgatgaaacataggcatgcggtgctcatcgagaagacgtccaagaagcaaaaaactaactgatccgatttggcttatttacttgtggatctcaatcaacaagtgatctctatgtttttcaataattattagtttcttttaagatttgtgagttttgctttttgctatgaataaatagcaagtatttaattatgatgttgtactgtaatttcatatccgaacaaatttaaatttccttcggatcatttgattaagctttttatgttttatttttctttatatatggtaagcttttttaaaaactaattaactaaaaaataatgcgcaattgcttatactctttttttttaaaagatatactatttaattatatgacttttgtttctgaaagtttcagtaaaaatttgatgatttactataaactatctattattttcacttttaattataacaaaaagttgtgattatagtttgcgaaaagtaggatatattctggctgagtaaaaaactaataaaatagtttaacactaactaaaaaggaaaagaaaactcaataaacaacaacatacaaagccaaaaaagcctaatcaaataaataaaaaataattacatcaatcaaccctaaaaaaaaaaatcccaattgaaaaaagtgaacttccaacaatgctaaagccaaaagtttgaattaaataaaatatttgtccatcactttcaccattagctaattttactattttaaaaaatttccactttccaattaacaaaaataaaaaattacgcatttgttctttcttcgtcttctctcctcctctctatgtgcccctctctctgttgaaaaaaaaacaaaaagtcttcaattttccattttcttctcctctgattcctcaatttcgtaccctgaaaaaacgaaaaatctcacctttattgttcactcgccggaataatcgcctgagtttcaagaaagttgagcttttgatctcggagaagtaataaagactataattgacgatttgggtttgtgttgatttggagattattgggtttcttgtggaagagaaatgatagatatccctggaacaccagggactttgactggtttagtcttgagaatctctcagtgtgtttttgctgctggttccatttcttatatggttacttctggtggcttctttagcttcactgctttctggtaaagtctttttgttctgtttgatcagattttaggatgtttaagttcttggattagtgtgaattgttagatgaaccgtatagatccaatcccaagaaagttgttttagcatctgtaactctttttattacctctggatttagtgtttaggattttgaagcaattttgagtgtgtttgagtcttatgttaggtgcgtcaaggatcttgttttagactagtgtagcttgtggatggatccattacctttgttatgtgcaaagatcttgaaaacatctgatatgtgaaatctttgattctgtgacattttttagcattcattctcaagcatatgtagaattaaacaatgtggacttttcgtgtctatgttcttacacctggaagatttggttgcagctatctaatagcagcaatgggattgcaagtcatatggagttttggtcttgcaatactagacacattcgcattagtgagaaagaaaacgcttcttagtccagttttagtcagcctctttgtagttggagattgggtaagactagaccctctctctttctctctagtataatgacacaagaatcatcaaaatcttaaaaccatcttgttctttcttctccggtttaggtaacatcgacattgtcactagcgggagcatcgtcttccgcgggaataacggttttatactttggagatttaggaagctgcagtttcgaagcagagtgttggaagtaccaactctctgtagctttagccttcctttgttggatcactatcgccgtttcttcacttactacactttggttacttgcttcagcgtaagtaaaaaccgaaaaaactcttctgtacaattcccatatatgtatagacacaatactcatttgagatttttgattctttatcttgttaatagtataccattacacaatttttaaactctcagtgtataaagattactcttgttgatgaaattatgaaaaatactctcatttttatcaaattttgtggggcattttcaattatggattgttgtactaaaatagataatatctaacgtttcgtttttggatcgaaactatttatgattacaaattacaaacatgtaaaattcggttggtggtggttttttgccttgctttgaagctacaatatgacaaagatccaacggctgggaattaatgagttttataaatgagtggttaagatgcttttactggtacctacctacttaggaccactaacttttgagtaatttacaaaatactccttcatttttttatttcttctacatctggtgtcatacattttcgaattaatctatttccaccaggaaactgacattttattcaaatcataaaattctctaatctccaaatggttactgcaaaactactgattaaagaatcatctgaaggaacaaaaattcctaagggattgataacaatgatcaatgatgaatcaacatgaagaagattaagcaacaggaggaagatttttgagatcacgagacgtatcacggtcagcaggaggtaagggtgaccacattggcatgtttggaggatagtagccgtaagggtaagccaccgccatcttatgggaatggaaagctgctggatgctgggagggcatgaaacctggtgatggaaccaccatagattttaactgttgctccatcttctccttctccgccttcaacaccagcttttcctctcgtagctcgtttttatccgcctattacagacagttagatgagaaatcagataagtaccaaacataatgattatgagctagaaacattttcaagaagaagatacacagactactacttaaattaggttctcataactttatgacaaagttttatgaccttgagctttatgacaaagtgagaaaccaacctttagactcttgatctcttctagaagcttttggttggtttcttgaagctcatgagcttcacctctaagctgattcacaacccggattgcatcgtcgagtatagctgatttatccgtctttggagtcctgccaggctctaaaacagagctcaagtccatgaacctgaaaaaatacccaatattttttcatataagacgactgcagaacaacacagtgcaagcaataactaaaacatatgtagagaaagctctgaacatacttgtcatttagcttttcccttcttagtttctcgcgacaggctttggttcctggcttgctacatgatccagttcgtctcctgttcatacataatcacatcaaacaacgaaatggatgctatagttgtcttgtagataaccaaacaacaagataaccatggccaatccaagctacataactaaaagactcaattcaagacccaaaactagtggagaccaagagaaatcattagctgcaaatatcttaattcaatctaaacacaccacagaaaacacaacatctttcaaatcatcagaacaaagaaaagtaaagagcaaggtattcaaattcttaaaagactacctcttccccgaacattcttcctcaaactcttccttaacagctccaacagatgacgaagaattgatttccactacaccactaaacacctgtccttgttgctgctgcaaatgaggcactgcagaatcgtcgttttgtcctctaaagccacagacttgatgtgtctcttgctgcaaaactccactaaacgatgcagccaaatccaattgtgctgatccaatgctactactataaacaactccattgtttcctcctctaaagctactacaaacttgctcaagatttccattaaaagaatcaaattgttcttgttgtggctgcatcagattcacaccacaagacccaaaatcctgaaatatgttatcttcatttgtttgcatatatccataaggatcttctactccattgctacagaatcaaggtaacaacaatctccatcaacaacaataacgaccgctagaaaaacttttcatattcaaaatcgaaacttttgctaaaattggattgaaatttggaattgttaagaaacccaaataacaaaaggcacaatacaacacaattcaacaataaaaatcaaacctttgatcaaaacaaagagcagcgagaagatcatcatcgtcttcgattgatggatacatcagaagaagaacagagaatgcagaacgagagaatctgcaaaaatctgtctcaaacacacaaatactgtattccctagaaaatttgaggagatatatatcttttgttattggaaaatatatattaaagatttgagagaattttggaattttaaaccaaattttattctcgtgaaaaaaaacatatcgaattttaacaagaaaatcggaatcggttttatagtattaataaattaattaattttttaaaaatgtataataatatgtggggcttttagagagccacgcatttggcaaatgaaaatggttggggtcaagagtgaagagaatcgttcagtgttggaccacttttcttaaaaaaggcggggcattacgtttcgttttttgtattggttcgatttgtttatgtatagttaatggtagcatttgcactatcttaataagtgtgcatgttgatgtagcatcacattacacacatgtctaactttagattatggtgaacactagctactcgtcacatatgtcgtatatgaagtctttgggataggattgaattgatgcagattatcatgttctaaaattaaatcataatcatgttgatctcatagtattgtatgtaatatataacttatttcttatgatgttcacaaaattgtctcaagtaaaacaaaataatagtttaaacatctcttaacatgagttgcatggtgtgactaacaaaaataaacatttgcctaatgtcctaaaatatcatacatattttggggtcccaaataatcgttaattgatatattggtaaataatttctgttaactatatcttattttttcgttttcttttaactatatcttaattgagtataaacttcattttcgtatatttaaaaatttatttactcatgtataaactgaaaatatttatgaaatcagtatttcaaatttttcatttattatttgtaatacgtcgtttccaaaacttgacactaccaagaaataaaagaagtatatagtacgtagttttgtcaatattctagagcgagcagtatccacaaactcaatagaaggccaaaccaattacttgtttggtcaaaaagtcgaagacttgtgaaagagttggcacttgacatggaaaaaaaatctaactttgataaaagcaggaacaaataaaagacacaaagtgggaaaatggccaatcgaagaaaaggaaagacaagtgaagcagtgtcatgatcattacagtgaaagaatcaaagaatcattcatgttttcttttaagtttttgacacttggaagttggaacaacaaaacgttcgttggtgttttcaaacgccgccatgcatcttcggatttcaagcatctatctcccggagatgatcttttcattatattttatctttgtaatttaaaacctatgttatgaaattatttggtacatttttttgtttaagtgaaattatttggtacatgctgatgttacttccacaactttatccaatttctgaattagatttctttcgttttgttttatactcatgaaaatacacatttcaatactcgaaattattttaagcataacccacatccaacatgtgatgggacctatagtgatatgagataatacactcattgttaattaatttcaagttaaaagctatgaaacttaatgtggtattagagaccatatttgatctacgtaatatttgcatagtgtgatcaattcgaaattggacggaaaaccattatttcgaggagaacgtgttaggaatttcacattgaaaagatgatacgacctagggtaatatataaagttaacaaaagtgaacatattctattggatgttaaagttgttctcctacatattttgagatgaagatgtttttataaactaatatcctttgtccaatatatggccttcaagcattggtgggaaacagtttgttgggcttattgggtcgctcaacatacccagtaacaatgtcgaattaagaggcctaagcccatgatttgacatttgtagttatttttttgaacctagctaatatacagctgttctaaaatgttctttctgcaatgttttgtagtgatataatcatgctaaagtacatataatttgatcaaataggtttacaatacacacaactcctaaaatttgaatttattttaactatattttttaaaatatatgttattaaaactgaaataacttgtctatcaaaactgtatatatattttatattatctactataagtgttatcatattttacatgtctttatatgtattatgattcaattcacacacatttctatgtgtttcgtgatggtcaaattgaaatttaaaagactagaatctactacacgtgcattcaaatttcacacgtgagtcaattaattgaaggaaaaacaaaaacaaaagtagtatgctctatcaaaatgcagaaatattttatgttatctactataagtgtatcatattttacatgtctttataagtattatgattcaattcacacacatttctatgtgtttggcgatggtcaaattgaaatttaaaagactagaatctactacacgtgcatttaaatttgacacgtgagtcaattaattgaaggaaaaacaaaaacaaatagcttgacccaaaaaaacaaaagtgagaggctgagagtatcttttggtccgttgtcataaaaatactttcattcaacttagccgtctccttgaccatccagatacacatacgaccctatctttttgatttttacaatttagtcccttaattcttcatatattataatgtacacagagcagccacaatatatccaattttttagtcgcaccaataaatttcatatactattacgatggcatataaatatttttatttgcaatttatccccctgatttaactttattggtaatttaaaggaggcttttgaacaggcacgtgcgttaaaataatatccactagatttctctaatagagtcacattacttccacgtataagttgtcatagctatcaactcatgtacatgcaaaaacaaaaaccttaaaagctttcatggaacgtatagagtcttataacacgaatgagatgaaatacagaggcgtacgaaagcgtccatggggaaaatatgcggcggagattcgcgactcagctagacacggtgctcgtgtttggcttgggacgtttaacacagcggaagacgcggctcgggcttatgatagagcagctttcggcatgagaggccaaagggccattctcaattttcctcacgagtatcaaatgatgaaggacggtccaaatggcagccacgagaatgcagtggcttcctcgtcgtcgggatatagaggaggaggtggtggtgatgatgggagggaagttattgagttcgagtatttggatgatagtttattggaggagcttttagattatggtgagagatctaaccaagacaattgtaacgacgcaaaccgctagatcatcactacttacttacagtgtaatgtttttggagtaaagagtaataatcaatataatatactttagtttaggaagttattctgttatgagtcaattttcccgggaaaatttaaattactagttgtcacaactcacaagtgtgttgattggcttcagggtataaattaaatagacttggcccaagttactgccttactggctagaatctgaaaagtgtcctacaatatatcattgatctaactcgagaatagtttacttagatttagataaaaaaaagttctgtttagttttctgattataaataaatttaattttacctcttcttttcaataatattatggagatcccattgaatctaaaaaatgatatatttttattctcctacttctctatttttttttttttgtcaacaaggtctattggtttttctactcaactatttgctgtggtggtgtggatacaaactatatatcgcgctcaaagattctgcagagacaataatgtcacttgaccgattctcatacttaaacaaataaatttgcaatatatcctagttttctcatattttcctagtcaaaggattaatagtctatcttaaaaactttaactacgacagttgatattaattctgctttttttttccttaaacaaaaatttattatagatgatcatcttgatcggatacgataatctcaatttctcacatacgacgatgttctagttgttggcaaagttgattttcaagtaaaaagataatatattgttctattagaatatttcttttagcacaccgatatcaattcatcgtccatagattctctaggatggttaattataatgaaaattttctcgtctgacttctcttctacaaactgaggaattttacaatgttcaagaaggagttatagcaatgaggctaatcacacaaacagaacttattagttatttcgcctacaataacaacactttaatttatattggcataatatcatatatagtaacttagtgaagatctatctcattaaggaagaattatttgaatccatgtatatattaaaaacaatgaaagctggtgtacgtactcaaaccatctaacattcatatttcatgaaaacgcaaagtacgtcttctcttacaatttatggtcgtggcatgcatgttataaagtactaatcaagcgacctatacatgcacataatgcacgtaggtagccacaacagtgccacataaaatatcaaaacaaaactaatcgtgattatctcttcctttcttctgaatcaagaagttcttcaagaaccttatcgtccaaatactcaaactcgaaaacttctctttggttttgtcgactcacattagtagaagttgaacccgatgacgacgacgaagaagaagaagcataaggagggcgaagcgagtagtcgtccatacgtggataatactcattagggaagttgagtatagcgagatgacccctaaggttaaaggctgctcggtcataagcccttgctgcctcctcagcggtctcaaatgtcccgagccaaagacgggcaccgtttctcgacgggtctcgaatctctgctgcaaactttccccaaggccttcttcgaactccccggaaacgagcttgcttgtcatcttgtgattggttgttgctgctcctgtttgagctctccattaactttggtgttctagattggtttgctttgtaagagcttggtcagcactgttatttaataagagatctatggattatggattatgtagtatcatctgtctatttatatatgaggccggattgtcgtcgagtcagaatcgacgttcgttttcacgtgacttgacgattcttgccttcttgggttgactattctttcctttaataccctttctatttttttctatttttttttgttatttttatgcattaatgatacattgttgtcatccaggaagattccacgtggtgcacaaaccaaatttgattgttcgcacatcttaaccttttcttaattgtgaaaaaaaaaaaaacttttcttaattatgtaactaaaatttaattagtctttgactccagagtgatcttaattgtaacttatgtagaagaagttgtaactcgtaatatcgatggtctaggattataaaaatcttcacaacagtgattaaaaatatctaaaacattataatcataggttcgcaaatattgaggtctgagtccatagaatagaaaaagcataaccaaagtaattaagtaccatttaattatgcccaatcccgtaagtcctacgcgtccaataacgacatgtatacgatgtatttattaaaataataactgatgaaaataaaaatgatctttaacaagttgtcaaaaatatagggtatattcaacaaaaaagcaaaatttaattaaagttttctatgtataggatatataaagcacatcattcttgcaaattattgctacgcaaatagacttaaaccaactaatggtggtgtagtagttgaacgtatcattttgagttagaaaaatgtccaaaatttcacgattcttcacactctcaagtatttgtgtggacatagagagagagagtaacaaataatatataaagtgattggtcacttcatatttatatactattttatagcatctcatttctcttaaaataaattatgtttgtttcattctttttactaatttgtttcattctttttacaaattaagattaaaaaaatgaaataattaactcgccctctagaaatggagtaaaacgcaagattgttcaaaattactgatttatatatatctatctcgctttatatcttgtatatgtcagatcaatgtttttatgtctgattatgtttgcattttcttttacctaatttatgagatgtctcttttgccttaatcttttcaatgagggatgggattctgatttgccaaaactggaatattatattttgttcgaactttacagttgatgttacatgagttctgattccggagctatctttaaacattttattagtgttttgttttttccttttatagtacaacatctacagtgtttttaattcgtatcatatttttaacagtgatcaagggaatttttaataactcgcttattaattgaaaaaattgctccgttatgttttagtttactcatagtttccctagtcataacctagtaatatcaacattcaaacaaatctagaaaaaaacgaatcttttatatgagatattactaagctaataatagcttcgagggtttggtggctaaacagtcaactcttttatggtaacttttaacaattattagtcaaatgtgttttctaaaacagtatgatgattaattggtatcaaactgtttgcaaaacacttttctaaacatgactccgatttggcaatttggtcgatgtggaatgtcgtaataaagtttcttttaaagattacccttaaattataatataaacctaatcttggtcaaacgatgccacatttgatacaaattccctttagactaagcaatttaggaactgaaacgatatattttctggcaaacctctttgattttagtgagtaataatattaagaaactaatccaccttaattcgtaaaaatgtcttcggccattctacatccaagatccgagtttgcaagatatacgtatattgcatatcagtaaaagctgtatatgtttataactaacctttcatatggaattttttcacatctaacaaaaagaaaagatactgtgaatcaaggatacgagtccagttaagaagatttataagcagaatttataaagaaagcatccaaaattgttgtttttgttaacaaaggtaattcgaagcttttggcctatgacactttttctgtcccggatcagtccttggtaatacttattcaaacgtaaacaatccttcctaaacgtaaaacttcgctgatcaagaattcaacctctccccaaaacaaaacaaaaaattggttagtgtaatgtgttttaaataattaattagtatatgttgtagaacagtggacaatacttagcaaaccatgtaataaataaagaaatagtgataatttgtgttttattcagaaatacccgtcgtaacatcaaaacattacttataatcttattatattatctttgacacacaatgacacaaacctatattttagtagtcaccttgcaccattcgtattcattacatgtgcaaccgaccataatctgttattattcgagattttgagtcttctaatatatttttggtaaaagttacaattttttctatacacccattaacctctacttttgggatattgtaacttgtaactaaaatgatgatataaagtggattataagcaatgtgataaagaagatagtggaatagcgaaatgcaactaccttggtacgttagtagttggggccgacaacaacagttcaagaatgttcgttaatcgtgttattgggcttggtttagggcccattcggtttcttatcatattgatactgtaaagtgtttactatgccactctatagaagctactactctctttaacaattttttttaatgttaaagtagttgtaggagattttctcgtatatgttgtgttggcctctatatcgtatcaaaggtctctcccaattgatatttttgttatttcttagatagaattgatatcatgactcaagttttaattttttcattcactcgaaaaaaaaattgatttgagtccagaaattcttttgtttcaaatccaaatggattttccgaacgacagaaaatgttgccgattatacataaataatttaagaaaatcatgtaaatacattaaatttttttaactgatatgactataaaatcataaaaatgactagaaaatatacaaataatatgaccacgtaccatgaatgtgtagctatcgccttacgcctaacaccttagtcaaatttgaatgcttactggactttgttttctttcttttttgatttgactataaataatctttttatatttgcctatttccatataaaaatttgaatcactaagaattgaaattctggagcttccactgaccgaagggaaaatattgaggaatataaatcattttagaaaacttgtttatttttatatgaagtattagtaattattcgaataattatattattattttttgtgtcaatttatggaaatcatttagcaactgatatcaaaagcaattattcttgggttacttttctgatgtcaatattgaaatcaattaatttattcattttcggtacgtgtaagaagtttaaagtattttaccacaaaaaaatgaagtttaaagtaaagccaaaagagatacaatgtccaggtttgaagtttaaaatagagccaaaaactttgaacacgtgcgggatatcaaataatcagttatgcatagttttggatgggcttaagaaagaataaataattttgtgtcctactggactcaggatgcatgtgatgatgtgtagtgttctaatagaatttagttgcgtatccgttcgaataattattttcaacacctcctacttttgttacattgttttaaatgactattgacaaaataaaagtaaatgtaaataactaaaacagaaaagatgtgagaaaaactaggaaattcttttttttgaagaattattaaatttgctagatttggataatcgattcaacatttggaaaagaaaaaaaatatctaaggatggttgaaagatagtttatgatcaaactagccaggattttagaggggtcatcagttttctgaacatttatatgttgttttccgataatactataaatttgatcaactaattagatgacttaaaataatgtaattgggataatgtttaagaaaatattaggtaactcatataatttaagagttataatttggttataatttgcaccaaatttgaaatatatttctactataagataactagaaatagtgaagaaaaaaacaaaggaaactagaaaaaatgaaaaaatggcacatgaagtatcttttttgtttgagaaagaagttgaaagcagataaagccaaattatcttctaaacatgagatggctcgaaattatttgttgtttgggattcaagggggcatgtatcttgaatccttccaaccaacaattttctttaaccatgcttttggccaaaagattttctttaataataattaataatagcttcctaagattataggataatgatttgatattttatgtaatcatatttgcaatacctaagcatgaaaatgttttgttgagttgatccagcagttattttggaatatggcttaatcattttcacatcgatcttgttatttctgttcgtgaaatgtgaactttcgcagttatttgttttattcataagttgttttagatcaaataagtggagtccacttagaaattataagatgggaattttatttgcatatcaaaattatctataaaaattttagtcaactgatttttagttttctactaaaatcgccatcttattttcttctagattcaatttgatctgaatgtggcatgtaggttgataaaacttatcaaatagcatcaaatcagtattttctaaaactttttacatcatcataaatctttcacttataaaatataatatcttgggtacaccaaagtaatcctgatatatactacaaaatataacattttagttgttttcatatgtggttaatcttttttaggtcgtacatgattcataaaccttaccgtcataaaaagaaaaataaattatatttaaactaagaaatgtgatatgatgcaaaagtgacaaaatttcgatgaatcatgtgatgataatacgaaatgatatacctaacctacactgctcattctacatttgaagaatatatacctaaatatacataccaattctgggataattacataatatacagtttcatattagtctcacgtaattacgattcacgacagtaagaagattagtttaaacggtacaaaacaattcatatattacgaaaacattaaatatcacacgaagagaagaaatatgcaaaacgtctttgctcgaatcttcgacgaagcaacatagtttttcatttgagtgtaacattatttttcgtaaattcccatttcacccttttattacatgacatttgtctttcactgagacagtaaaaactcaagtctaatttggacatttgcatatacatactcatttttttctctatatatatagaccatgtcaatccactaacgatccctaaccgaaaacagagtagtcaagaaacagagtattttttctacatggatccatttttaattcagtccccattctccggcttctcaccggaatattctatcggatcttctccagattctttctcatcctcttcttctaacaattactctcttcccttcaacgagaacgactcagaggaaatgtttctctacggtctaatcgagcagtccacgcaacaaacctatattgactcggatagtcaagaccttccgatcaaatccgtaagctcaagaaagtcagagaagtcttacagaggcgtaagacgacggccatgggggaaattcgcggcggagataagagattcgactagaaacggtattagggtttggctcgggacgttcgaaagcgcggaagaggcggctttagcctacgatcaagctgctttctcgatgagagggtcctcggcgattctcaatttttcggcggagagagttcaagagtcgctttcggagattaaatatacctacgaggatggttgttctccggttgtggcgttgaagaggaaacactcgatgagacggagaatgaccaataagaagacgaaagatagtgactttgatcaccgctccgtgaagttagataatgtagttgtctttgaggatttgggagaacagtaccttgaggagcttttggggtcttctgaaaatagtgggacttggtgaaagattaggatttgtattagggaccttaagtttgaagtggttgattaattttaaccctaatatgttttttgtttgcttaaatatttgattctattgagaaacatcgaaaacagtttgtatgtatttttgtgatacttgactttatcaatttcaagttagtgtaaaagtctttgtctcttactattcaactagtaagaaaactctcatttttcttatttatcgtaatgaggattgtctttaagcatgtgctattagagtattcaaacatgttttaagttaacataataatttttttgcacaaagcctacaaatagtgtaagatggtcataatcaattgctcataacaatatacaaagacagttctttttattgttctgtaatatatgagtccatgagtattgaggagcgactctatatagtagtataatttatttttgttaatcattaattaggagccacctaaatggctaactataataatggagtataagttaaagtgttttaattttgtttcaaatagaccacaactgaaaaagatggtcaggtagtgtaatgaaaatcttgacttctttcggattaggtggcaacttctagaatttttgtgctattttacatatatttttaattcatgatttaaagtagctatggattttcttgtgactttctaagggaattatctaagaataattgaataaaaaagatttaaatatgcagaaacttgaactttttttttgcaatgagatgcatctgtaactagaacttttgtccgataaaacgttttaggtaaaaaaagtagtcacataatcacattattgttttggtagttgaggtcaccagaacgatctgtcataacttttgggtttgcttgcgtatgggtcatgaccaagtgcattgtaatcaaaatttagccggtaaatagtattatggtaatgacatattaaatcaactcatagatttctttataatattttaacctgtaaaatctaatcttaatattcaattattcactaaagacaaacctgtaaacttttgaatgaactaatgttaattttgattttttttttatctgatgatttggaataataattaacaatcctatcaatattccccatctctagtaataggaaatagtataacaattactgattatagaaaaattctataaaatgccacacattcaaattttgttgtaagaaatatcactattagtttaatgttccaaaaataccaccaaaagttttgatttttcaaaaataccacaaacaccatacttgattttcaaatgttcaaaatttttaattttaaatttaggttaactattttagataacttaagtgatatttttggaatataatggtatttttggaaaaccaaaatttaagtgttgtatttttgagaaaagtttaaaatactgttaataaaataatttgcagttataaaattctatattaaatttcagcaacatagtagtatatctttatatataatttcattttaagataacataacatctactagtagtaaattgccaaattgatacatgaaacatcatataagcattaaaaaaggtatgcaattttatttcagcacgtgtttatttgaacgtcggcgaattgcagaacaaaacagaaaagattatttgtttttacgatggtggaccaagtggtcaatattttgctgggggacatatcaaaaagagcatagatttaaaataaaataaattgtatgcaatataaaaatagatgaaaaagggcataagctatgtaaatactctgaactattactgttcatcgactataatgctgatgtggtttgatagctttatccattatccacaatggttaaatgaatttggtcaaaaaatcataagaacttagtattttacaaaacctcatttgcatgagaaacaaacaataacattaaatcatatacactttacacttaagtactccacagaacatggacttggtccgattctttcccttcaacaattaacagtgacgaatttttgtatatcaatatttttctactaaaatttctagatccataactataatcattatataggtcctacaataattaaaatatgttatccagtattttcggcgttgaccattgcgctgttaaattttcaatattttatgttccaaaaaaaaaagtgttcacaaactttgaagacaagttgaattggaaaaagggagataaatattgaataacaaaactaaattttcaacatattttaaatcaattatcttagatggacgtttaaaatatcaactttgtacaagttttatagctaaatgaacaacaagcttcattatgttaagttttaaaaccaaaaatatatataaaaaatgtatcgtaagtttgtttagacgtgcatgcttcaagcatgttacaacattctgtcttgaatttattatcttggtgcaattgaggaattcacctcccatagtatgtacttcttacagtcgagtgtcagatctttgtttttgccattcttatatttggtttctaaaactattaaaacaagctttaattgaatccacttcactctttcattaatcttactttatcaatttcttgtcagcccatgctaaagtccattatctattttctaactgataggcccatgtgattagtacaacatacaattgttgatatttcaactggattcactaagccttgtttgcttttaacatttgtttttgagtttgcttattataacaggatttcttccaaaatgaaattataattttaacaatgattttttgttatttcttttttaaactttaacagaaaacataaagaaaaggagagccattggtgctgaaggtttttctaaagaaaattttcattcaccaagtaatgatctatttctataaagaacttttgtttttgaagatgtagatgcaatgaagtatgttggaattcgcattagtaaaagaatcaccatccacaacgaactcgaacctagcttggtatagttggtatatggttattggaaaccaaatcaaaattgatttactaatttttttttttttttttttcattacaccgttttcttgtattattactacacaaaactgtgacgttagcaaaataaaactgttttaaaaccaaacttggaccttttcttacgttacataaacgtaaatgtaatggatgctccatttttcacttgttagacttccacatttaacgaccaattctcgacacgagaaattatttattcaggaggccaagagctattataaagagtttggaagatatttcgactgatcatacaaaaaaatgttataagatatttgcttgtttttttaaaaaattactcgcatatgaaccaatcatatagtcactctcgatgtgtcaaaagtaaatgctacttttttttgttttttgttttttttcacaaacaaaatgttaatataatctccaaaaaaacgtttaaaacgaatctaaaaatcagcaaaaaaaaatcaatctccaaaagaatgctaattttctctggttttctgtttgattttgataccaacaaacttacatttaacatgttttctttcctctatgctgtgtagggcatgtatattcgttaaattaaagtgcggcaaattaaatgacgttgaaaatatggtacgaaaaatactataagtaaataagatcaaatgtttggggatatatcagaacgtatctctcaaaatttgaggatacatatccggtacctagtccaatacataatattggttttaattattttgtatgtttatcatcataatattttccttagcaatagacacaaaataataattcataagaaaaactgaaatttattgcaaaattgcaaaacgacagtttactttaattagacataaaatgaacctttttttgttgttttaatttgtatggcgtatgctttatatgcttgaatgcgtctcgcatttttacgtacaaaactgctacgcgtagcaaaatttataatttagctctataacctctgacttaatcttattcttcgatggctagaaaaaatccctcgccgttggtcgtatctctggtactactggtgcttcttgatgagtttcttccgccgccgcctcctccaacttaacctcattcttcgatggctggtagaaatccctcgccattggtcgtatctctggtattacttgtgctccttgatgagtttctccctccgccgcctcctctaacttgacctcattcttcgatggttggtagaaatcccttgtcgttggtcgtatctctgatattactggtgctccttgatgagtttttcctgccaccgcctcctccaacttgacctcatttttcgatggctggttgagatccctcgccgttggtcgtatctctaatattactggtgctcattgatgagtttctcccaccacatttatgcctgctccgttcgggttttggggtaaaaccgggtatccttggagagagatttcagtcatgttgaagatgttcaggatgataataaccacatagaacgaaatccacaacataccttgctaaactttcccaaacctttaaggattatcttatggttatttatccataacatcacaataacggccacgaggcagtcaccggttcgaacagatcatctatcccaaatagcttggcataaatacaccaaaacaaaatctttttaaaatcactaaaaaaacttaacatccccactccaaataataagactcacaagcttcgaatgaagaacagcttccgcaacattgaggaacaaagtatgtgttgagttggtacgtaacacacaaacttaagttctctagccgttacgattaacgagtgtctaactgtctatatccctgtatattcgataaataaagaaatcgttcatgatcttcctcttcttcagacgttcacttagataaacgtcattttttagacgttcttttggagactatattagcatttgtaattttaactcctatatatttattttgttataaaatttggactcataaatgattttttcttttcttacaaaaaataactcaaaattttctaacgaccgcaagaaaatagcattttagaatgactagatattggatttttaaacctttataattacttagaagagtttacatatatatatatatatatatatatatatatatatatattacaataaaagtcaaatacgaattctaaattttcttcacaccactatcatcttataataggggctatacaatatctaggtactagactataggctaaggaatcatatatcaatttctcataaatatttgcattcaattatggttcctaaagtagaagataccacctgtataaaccaatgaccggaagccaagtagaatataccaaatatataaaccaatgaccgtaacgcgtacgtaaagttgaagtttgttcaaagttaggcaaacgtattgtttgtcacatacaatagtaaacaatcacaatcactcatcggattaatttgtcatttaatgtggaatataatactgcgaattgttacatataaacaatctgatagattgcatgttgttgaaaacaccctactatgatacaaagaaaaagattatcctcagtttacgttgcatgaaccattattttgaataattaactgaatcgagattctctagttatgaatcgggtattaacaacttgagttcatagagaagatcaagttcatgaaatcttttcacattttataagttatagactagtatatgtcaagagatatttttttcacatcttccgatcgaagagtctcgatgcataactaatctctattacgcaggataacacgacttagtagaatcgaattccggtgaaaatggtgaactcaaatggatttaaccacttgaccaaatgcatatttccttatgtaaccaaatgattttatttttcttacgcaaaatagcatttccttcattgtataaaagagaaccattttgacatttcactcatgttaatatattatttaactgtatacatattctacatatgagtaattaaattaatttttttataaactatgattaagagatagattaagttgggctattttgtaaaaatattttaaaattctaaaacaatgttgaaaaaaatcagatactttttcgcaaagcagaaaaaagtactaaatttttatgtagatcgaccagttatttatcatcaagagatggtatagccgccaccgtacatgttgccaattcgatgacataaatcaagttgaaatgcctattacatcctaaggttaataatgttgttattttaatcaaagtaaagtacatctccagttattcaaagctgagtggaaaattcctaccagattctgacaaatcattagctgtttgaacttgaattggtttgtaaggtatcctcttgaggctactaattcaatcatcatgtctatatattttaacataatctatattaaactttggaatcgtaaggtaaaatataaaatatgttttagtggaatatagtattataaaatctatcaatcatgaagtaaaatttgctacgttatcatcggtttttcaaataaaggatgataaaattcaaacttgaatgagccagccaataagaagtaaaatagaaattttacagatgattataatttccatcgacaaatagaaacacgacatataatttaactatgaacaaagcgttcttgaaaaaaatcactgaaatcatcaactttcgaaaatggttagtatacggctacactagtttaagcgggatcaaagtcaacatttaatattcagtgtttacgttaatacgatccttaacatgatcctccatcaaaggatagactcaaatcttagctatgcaagccaaccactttagtcagccaaccacttcatcacctggtcacatttatgcggcccaaagaatgcatttatcgtctaagactatgacgacccgtctcacgaaacaactaatctattttttagccgagtaaatacactagaaaataattctactcaccaaatatgagggggataatattagataagagaaatcaagagaaataaatctacacaacacttcatgatcgataaagaggaaaaatcctctaaatctttcaatattgtaaaaatcttccgaatgacaacacactagtagcaaaaagcgcataaacttgatttgaccctatatgtgaaatattcgtaaaactaactgatatagaaaaaaattagaattttggtgtaacgtatagactgcccttattagtgaacattcacgtcttttttcggactcgtaggtttaatttctatcaaacgatcgactgctatatccgaaagttttaaaaatttgaaatcagcatatggtgttttctcttgttttgtcttcatctacacgatttcgacaatcacttttcgaaatgttatccattctaaatttttcctaactcaattaccattaacttttgagtttttttcagattagttaaccaaaaaaataagtaaattttagtgacataaatggtcaaatcattttcttaaacctctgcacagcatcaacacatttcctaaaacaagaattttagatctcgcattacataaaattaagtttagcaaaccatttgtaagtatgttttgattttgagcattcgaatgagaaccgaatcaaacatacaagacaaaataaaataaataaaaacatttttgtctgcaattttcatctataaaatccaacaatgacagctacactagtttacgaaacaatttgaaatctgctatgcgttttttttttgtgttgttgcattttgtcttcgactgttttaaaagtgctataatattttttaggattactcaagacaaataatcattatcttattccttaatatattagagtttacttgagactgcgaatgtataaatgctgatccactggattaaccactacttagcagttcttttttttaattttctaaatagtaaacgaactacacatggttattttagagaaaaagaatgaaaaaacattggtaagccattattacttcttttttactttcttaatactattattttagagaaaacgagaaaattagatatagacaagttggtttgctatcgacaagtggtaaaagcttaatacttaaatgggaaaaagcatttacaaagttggaaagtataactatgttactgtcattggcagtcactgggtacttaagtaaaataatcatagcttaggaaaagtcgaattcggaggtttataatactgaaccgacacttcgctatttagttgtgtttaagtcgaccaaagtaccaatccgaaagattttgtattcgttttttttttcttttgaatagagattaaaaataatcgatgttaattcacaacaactgtatacaactattgagtcttaatcatccagcgaatttttcacacgttttgaccattttaattagactaccacaaatgaaaattactcacttattaaacgatgttattcaaactttcggattaaaatactcataataaattccaatacgatccggatcataataataggtttctcatactatagatagactcaaattatcataaaattgtctccgcatttaaaaaagaaaaagctcgttgaaaatgattatctagactataaacgcttgttgaaacaaaattgtcaattcattatcagaaacccaaagtattgcaaactgaaatataagtcaaagtattcacagaagttgtgatgataagaacgcggatgaattagtatctcaattcaattgtaattatgaaaagaatcttggacattttgtacacatacatatgttcaactaaatatatcttgtatgaattttgtaggtctagtcttgatagagtggatgaggtattaattgtctaattaattccaagttttcaaaacttgagttcacataatttggagctaaatgttgagtgttgactacgttgatcgatcgtctgctaaattaccaaactttgaatgtcgatattataataagtagcaattttactatcaaaagataggtatatagtatgctaatttcttattttagccaacatgagaaatcaactttaattaaatacgtttacatagccactgtaaatgtaaaccatacatcgatgggtattacccaaaacttgtatcataataatgtataattgtgatgtcatcgtgaccattatgaaaattatagcataatggcttgtaatagtgtagtagtcatgtaaattatctttgaatcaatttcttattatgtgtatgtggaatctaagcgacgacaaattaaaacatatcaattgtacttgtaaaatcaccaaatgaatctgaatttttgaaaaaaaatatattttataaactatgacttatttttaaagagtgccatataatatagacgatctgaattttggagaaaaaaaaaaaaaaactcataaaggatccaacaaaagaaaagaattaccttattctgttgagtgtgaacacaaatttttatatttatattctaaatttaacaagtgtctactacgcaaccaaatctattattgaccgtgagagaaagaagacccgtctccaaaaggaaatccaatgttctttcaaaaaatactattgaaagaattagctccaaaaaagtgaaaatagtggaataatggtcctctaatttgtatagtaatagtaatacctctgtaacaaaaaaacaaattatatagtaatatctttgacatatttcggggacaggacaaaagtaccaaccccatcttgttctctcactccgtacgtactattgcgactttagtttttttttttgcttacgattgtgttttctaacgcgttttaaaacccaagaattttttgtttcctgttgaatttcaatttgcatgcacatataatatcattttacttcttagaaatcagtaccagaccttcatgatttatgttgaaattctttgatgaagttgacattcacaatcttatcatttatttcaaaagtcagcttttacttttacaaaatcaaattctacgattatatgctattttaggaatatgatctggtttataagtacactgtagactcagaatgtatacttcaagtttaagagaaaacatgtatataccagctgtttttccaatttctgagttgaaaaaattcttatcaaatattaagaatcataaatctttaattaaaactacatgcagtgatctatatttgattaattattttagaaattaaacagtcagtcaaggatgacatgcttatacattatcatttattcaaaaaaaaaaaaaaaaaatgtatactttatactatttataatttattaattaggcgacagctttgcaactacttctgttcttcagctatacgaatgcttgtaaattatgtagtgtatcatattaattataggtctaatatatattccatgaagtcaaaattttaccggcgattcttgtattggagtcaattgcatttatatttgagtttgaaaaggctaaagtttaagaaaaaaatggtaaataaaaatcccctacgtatgtgaatatatatgactttttcttgtcattcattaactagcattatgaaccaagaaatagtctaaatgtaccaaggtgtttaaactgcacgcgttcacataacaaaaacggtattcattttgtgttagttttctttacctattggttcacaatggtatttggtatatatgatatcgaatactcgtgtataaattttgttgatcgactattaacattgtaaatgtaaaccaagtgaccttcactagtttcaccaagtataatttaatattttagaatacatcaaaaagtttatcacttgttttcaacacgtaccaaccttagttttatgcaaggtgctaggattaacaccttttagaacaatatttgatgaagagagatatcatgtttgataaacaatatggaaaactaaaaactttttcataattaaagatggttaagctaggtgatgctaatatatctgcatatataaaattgcataatttagaaaaattatggatttatagaatcgcaaaatcaaaaatcgaaataaaaagttgaatactaaactcaggcaaaaaagatgaatttgaataaactaaacaaaattaaataattgatgttttggtttcataccatatcaaatctgagaaagaaacaaaaagatagagatgaaagtgattttcacattaagctgtggattatgtttacaacgaaatacatataaatattatatttattaggctagcaaaaccttaactaaacccaaacatgatgcaattgataatttgtctttctgacccaataaactgggtacataaattttatatgtcagtatgcttcatgttacagtactttaattatttaacactagtaacgcaaaaaagattttttaataaatgatcatttaatcattatcattcttcattaaacattatttattgttttctaataaaatataatgatggtttaattgttagtgtaaatttatatggtaaaactaaaacctgtaggtaagcctcttttcagtcttttgttgaccagaaactttgaacaatagagttctattttaacaaatactaacaaaatacagaagaagggtaaagttttaggttgaaacttaaaagggtgcgatacgtgtgaacgcgttggtcaacaaatactatcacgagctgttctctttcccgcggacagatattgattttttcgtgttctatttttggattttgtggctggtgtaataataatattaaagcatatatactagtataaaactggtaatttttcgtagaggattgttttctcaaagcccaaacagtagttgcaaatttgtaataaccagattttgaagtaaaataaaatggtgaggaaattttagaataatttatttatcaaaaaaaaactttagaatatgttacatatttggtagttatagtattgtatcaaatacacatattaatcgaattgtttgataaaatggaagtaaattatttttgactgaactatgtagcacatatttattttatatgaatctcaaaatcatttatataatttatgaaaaagttagttttttttctattcgatacgttaacaattaattatgaccaataaattgttttaaggcattcagcagtctaaaaataaagactgaaaatggcgtcataataaacgtaaatgcagtaaatattattccctctatttttgaatatttgtagtttaaaatttttgcacacaaattaagaaaacatacaaatctcatttaatttatctctttcttataaaaatattattaattacaattaatccaaccaataaaaaaatatgatataaaatataattggttaaaaactattaaacacatttaattttgcatagaaaagtgaaaacaacacttatagtaaaaaaaataaaaaatctttaaattacacttaattagaaatagaaagaatacaaaacgtacggatgttgttaacctaaacacgattactaccgagactaaagatgtctaagtttaatactaagaaaagtaaaacaatttttcgagcagatatatgaatagtgattttttgggtcaacacataatccacccaacgttgatttttgtttgtcgtttacaatctctaaaacgtttattttctaagaaatatacgtgtgggctcattttaatgcccttcgtgcgtctacccgacgactttgtttactcgaaactatatcacacactacaccacatatttcaacatcacactgtatacacacatttatatatacatgcagaccgattattataataatattttctccggtccctaaaacatatatatcattcattcccacatgagatataatattatgtaaaacatacttttgactatgttgccaataatcaaaaagacatctctctctctctctctcacatcctattttccaagaagctcaccaatgcttttgaattctcccacatgtcttttgacaattttagtataaatactcaaaccccttagtcagtcattctcatgttcatcaacagcatttgatctcaagctcataggaatttgatctccacattatatcttgatcatcaccacaagaaaaacatttcaacttcttttatcagcaatcacaaatcaaagagatgggaagagctccatgctgtgagaagatggggttgaagagaggaccatggacacctgaagaagatcaaatcttggtctcttttatcctcaaccatggacatagtaactggcgagccctccctaagcaagctggtatgtaaaaattataatatcaaatttcttaattttgatcaaatttcttacattaattattggtaattattatttacaggtcttttgagatgtggaaaaagctgtagacttaggtggatgaactatttaaagcctgatattaaacgtggcaatttcaccaaagaagaggaagatgctatcatcagcttacaccaaatacttggcaataggtattttacttcacatataagtatataaccgacacacaagttttattttgttttcttactatatataaatcaccaaaagaaagtaactttatacacacgtctaggtcgcactactattcttttaactacacaatgatcggctctttaattacttttgtattgatgttcttcgttttccttttggtatcatctttagatggtcagcgattgcagcaaaactgcctggaagaaccgataacgagatcaagaacgtatggcacactcacttgaagaagagactcgaagattatcaaccagctaaacctaagaccagcaacaaaaagaagggtactaaaccaaaatctgaatccgtaataacgagctcgaacagtactagaagcgaatcggagctagcagattcatcaaacccttctggagaaagcttattttcgacatcgccttcgacaagtgaggtttcttcgatgacactcataagccacgacggctatagcaacgagattaatatggataacaaaccgggagatatcagtactatcgatcaagaatgtgtttctttcgaaacttttggtgcggatatcgatgaaagcttctggaaagagacactgtatagccaagatgaacacaactacgtatcgaatgacctagaagtggctggtttagttgagatacaacaagagtttcaaaacttgggctccgctaataatgagatgatttttgacagtgagatggacttctggttcgatgtattggctagaaccggcggggaacaagatctcttagccgggctctagttaacatgtttgaggagtaaagtgaaatggtgcaaattagttaaggctaagaaattcaaaagcttttgtttaccgagaaaaaaacacactctaactcttgatgtgatgtagttagtgtattaattagaggctgcgttttcaaaaaattgaattcatttgtttctccaaaattgagtagtttagcttgtacgagtaattaataatcaatgacaagtaatcaaagagtctacgtatattaatattgccttgttgatgaaataattatccaacaaacattggatgccactataacaacaacagcaattaaaataatataagtactagattaattcactgttataatcattttctaatgaggttttgaaagttcaactatggcggaaaaggtaaagttacgtagttttataataaataacttgagaaaaaggagcttaatgatcataaacatttttaattaaaatctcaaatctctaaacatttgtagtttatgtgttaacgacgtctatgcgtcatcatccaaatttaagccccatattgatgacaaaaaatatttaaattataattatacaaaacatataaaactattgattacgttttttttggtaaggaaaactattgattactcttaaactagatgttgtcctttaagataatagcccaccaaaaacaaaatcgagataataataatctaattatttttaaaaatttagacactgctttgtattgtaatttttgaatatctaattcataacataattaaggtagcttaaaagaaaagaaaagaaaaaattgtgccctttatttgagaaaggtataattgtgtgaagttaaacgatgacgtttctttggtaccttaaatattaatttgtgtttgataatttattgtctatagattgaatgctttgttacataaatgggtttgaatcaatggataatggattaaagaaatggatgtttacattaaacaaccacacaagtataccgaaccgaaattgtttgatggctttgttatagaccgaaccaggtttccaattcggaaccaataattattaacctgaaccaaatcgaaatttgccgtctccgaattcaaccgaaccgaagttttttttccggtttaggagcttcgttttattgttgatgcttcaatttccctttggcctttgatacaaaatggtagagagattcttcccgacgaagcggagctccggcgacgagaatcaccgtcggggaaatctctcgcttctctccggtccaatttcctcgtatctttcttcctcagacgcttttctcttaaatttgattctctctttactctgtctcactcattgttcctctctacagaggcaaaacctctctgctcttccaattagctctcaatgtagcgagtgcttctacaaccactcgtgtcgtcttcatctgtcaccggaaaaaaatcgaatccaatcctccgtttctctctcaggtacctttacgccatcttcatctgatctttctgttaggttttgtattgaggaatttcaaattcttctcagggaatcgatccttcctctgatgtattcaatcgaatccagattaagtaagaacacaaaaccaatttgaaaactaatttaacttagtttagcgaatgattcgatgattttgtgattgaagatatgtagatgatgatgaaggaatcagaaaatactttgctgcgtttcatcttcatcatgttgatgatttaccatctgcagttataatcgatgattttggtgattactttagcaaattgtaagctcaagattttgctcaaatccattataagaatgatgatgatgatgatgatgatgatgatacaaaattcatgactcgagttgttaaattaggaactcggtgatgaattctcgggctagagacatggcgatggttcggactcttgctctatgccacaatgctatagttgatgctaagtgagtgaaccttttttcaattttccatgactagttggtattttgcaaaatggttatatgagtgctttggttttagtaggaaagctttgtgcgagcttgtcttatctgagactaaccatggagactctccgaggtcgttgttcatctacaaacgatggattccgaagatctttactataaaaggttttgtgttttttatgttcctataaacattacaacattttgctgacgcttagtttgtgatatccatttaatgtgatgaaggtcatggtgatggatcgtttctattgacaagtaatgatacatccgagagaagcgccaagtattcgatcgcgctgcaatatctcatcttggagcagattattgatgatagttagttaacagaggagagtatcccctagtgacaagttctgtttttaagatattttagtcaacccgtttctttaaattcttgttgttttaagaagttttgcattattaggtacttctttgcgaaaaattgttaaattgtctttcttggctcagtttgttttaaaatagaaaacctaggtatagtaaggattaggtctttttagcttgcttgcgactctcggagaaagaaagggtgagctctctgctaaatttgctggcaagcttgggtcggcttgctctctctccatctctcgctctcatattctaattaccgaatttgatgttgattgacaaagttatttaatcacaagtgctgtataattagggattaggtcgttttttccttgtagctatggagtggagaagccttccggtggaattgcaagaagagatactttctagggttccggctaaatatttggcacgattgcgatcaacatcgaaacaatggaacgctctatcgaaaactgggagttttgctaagaagcactctgctaatgcaacaaaggagcctctgattatcatgttgaaggattctagggtttacttagcaagtgtcaatctccatggagttcacaacaacgttgctcaatcttttgagttaggatctcgattgtaccttaaagatccgcacatttctaacgtctttcactgtgatggcttgttattgctctgctccattaaggagaatacactcgaggtttggaatccatgttcaggagaagccaagttaattaaacctagacacagctactacaaggaatcagacttttatgctcttggttatgacaacaaatcctcctgcaagaaatacaaagtcttgagggtgattagtcaagtccatgttcaaggtgacttcaagattgagtacgaaatctatgacttcaccaatgattcttggagggttcatggtgcgactaccgaactgtctataagacaaaagcatcccgtgtctgtgaaaggaagtacttattgggttgttcgtaataggtattttccatataaatacttcctaagttttgatttttcaaccgagagatttcaaagtctgtctcttcctcagccgtttccttatctggttacggatttatcagtggttagagaagagcaactctgtctgtttggttattataattggtcaacaacttcagaagacttaaatgtatgggtgacaactagtctcggatcagtcgtgtcatggagcaagttcttaacaatacaaatcattaagccgagagtggatatgtttgattatgggatgagtttcttggtcgacgagcaaaacaaatctttagtgtgttggatctcccaaaaagtcttacacattgtgggagaaatttatcacatacaagatttggatgatcatggtagagattctgcgttaagatcatcatgctcagttcttatgaattatgttccaagtttagcccaaatccaataaagatttggcctgatctcttggaggaggcaaacacaaaggactttgtatgaattctgttccaattttgacttgtaattctcgcaccaatctagccaagtccctttttctttttttcctttaggaactttaatattgatcaggtttaaggttttctctggttccatgaacttaaaaataatcaactttgcttacatgtgttatcgcttgagttattttatggattatatacattcaaatactcaagcatataaatggtgaatcagcttgtagctagaaactgaaaaccattcgtttgacctaaaaacgaataaactttacagtgagcagaagaatcaactggcaattagtaacctatttatccacttttacatataaaatgttttattcaatctaaaactgggaaatagtaccaatttatacaagagaggattgatatatttttgtcaacacaagagtgacttgaaaagctttcttgaaaagaataaagaaaagacaatcaagcagtgtacaaacgaatcaattgtcaatcctcaatcttttttttggtcagcatcaatcttattttgtagaaatacaaacaaaaagacgcacaagtaggagaaacaaagacaggaagaagaataaatagatcaatagaacttcgaatgaacctttcttggaactcaagaaaagatctctctttgcagatttgccagatagtgctctcatcactatgccttctaaaatacctttccttggaaaaaggacgagacaagtactcgagaaaccgagaacgttgcctcgagcttgtattttgaagataccttgctttgaaatgaacgataagacagtgcgacatgacatgaaggagacgagaaatcaaaaatctctaaccgatgtagcaatctcgaggtctctaactttcgatctgagcttgttaataaagctcctccttgccagtttcaccacatttttcttcttgccaaactgcaaaagagccatcagcaactctttttttttttttttttttttttttgcaaagaatgatgtgttggaagaaatcacaatggttatcaaggaaaaattagtcttagatactttacttgaaggtcataaataattgaacctcattgtcttataaattactagtatcatgtttcaatgattgaaatgcaatttgtgtgtattgcttatccatatatgttatcgtttttgttcacatttgataacggtcggtcttctcaatttcccttattagttaccttcccgtttttgtgatttaataacaacaatggttgtaagtacttccctagcctcatcattgcagtaaaagattaacgaagatttatacaaagatgaacaacatataaaaatgttaaaaatcacactgttactctaaaattctaattggaagtttatgttgtattgtacgaactacaagctactaaattctatgatgctgtttctttttgcgtggaacacaattttcaattctagttctatttcaatatttgtagatcaagggtagattgaaattgatcatggtcgtaaaacatgtttagtgttccattgaattggtctaatcttatttcttcctcacaacgtcacgtaacaaccatcaactaaatgtctattttaagctaaatgttaatcataaagtattaaattaaaaataaaaagacagaaaaacgtggtaagaaagaaggaagagcgccaaagtctgagctaaatctatggtggtttcaagcattcctaaaatggcaatcttctcacaaaaaaatattatctcaccactgaaccattcttacaattcctcatatcattattccaaactgaaaaacttcccaagattttttgtgtgtagatatgttttgatagattgaagataagtttaaatgattttggatgagacttgaagcggatcaagctagagaaaggaatcgacgacaaatgaatctatgaagacaggtgaattacaacacttgatgcttcttgagtttatccgacgttcttctttcgggtttctcagatggaatggcagatcctgctagttgttatatctatcacgagcgtgacgtcgaccaagtttgttttccttctatcttagtactatattggagatccttttcagccataagaaatgaaataagagaacaaattttatgtttttattttattttattttattttattttattttatgttcaatgatattactttcacatttaccacatattataattcacttttttcattttgttgtaggcacttgtcgtattgaaaaagggaactcaattactcaagtatagtcggaaagggaaacctaaattccgcgcattcaggctttctccggtatgcgatgtttttcgatgtctcgtttatatatgttatacaaactatacatatgttttgtgctagtatgttctccatatatcgtgcttactattacattgcgctcatagtatatgatgacactccatgtttattaatataggatgaaaaaacgttgatttggttctcgcgtggagaagaaaaaggtttgaagttatttgaagtttctcgtattgtcccgggacaaagaactgtgagtttaaccgaatcttttacttaaaagcaagttctttttttcggtttctaaccatttttcatgaataggctgtttttaagagatttctacgtccagagaaagatcacttatcattttcacttctatataacaacagagaaaggtcacttgatctggttagtaaagagaacatttcaacttagattgtaaaattgaacattcacttattacatatgttctttttttcttttctttttgaacagatttgtaaggacaaagctgagacagaggtgtggtttgctgcccttaaatttttgattgaaaaaagtcgtaatcgacgcgccagaagtgaaatccctgaggtatgttttcttcataatttctatacattatgttatatatcttatatgtagtcaaatttataatgcattgattcatttttgttattcagatacatgatagtgacactttctctgttggtcgtcaatctatagactttgtcccaagcaatattccacgaggtagaacatcaattgacttaggctatcagaacaattcagatgtgggatatgaacgtggaaacatgttaagaccaagtacagatggttttcggatcagtgtctcaagcacaccaagttgttcaagtggaggatctggtccggatgatattgaatcattaggtgatgtttacgtttggggtgaagtttggactgaagggatattaccagacggaactgctagcaatgaaactgtgaaaacagatgtactaactccaagacctttggaatcaaatgttgttctcgatgttcaccagattgtttgcggtgtaaggcacgttgcgcttgtgacaagacaaggagaggtttttacttggggagaagaagttggaggaaggcttggacatggtatacaagtagatattagtcgtccaaaactcgttgagtttcttgctctaaccaacatagactttgttgcatgtggagaatatcatacttgtgttgtatctacctctggtgacttgttttcatggggagatggaatccataatgttgggctattaggacatggtagtgatataagccattggatacctaaaagagtctctggtcctttagaaggtcttcaagtactctcagttgcttgtggaacatggcattcagctttagctactgcgaacgggaagctattcacgtttggtgatggagcgtttggcgttttaggtcatggaaacagagaaagtgtttcatatcctaaggaagtacaatcattaaacggtttgaaaacggtgaaagtagcttgtagtatttggcataccgcagcgattgtcgaggttatgggtcaaaccgctacgagtatgtcatctaggaagttgtttacttggggtgatggtgacaaaaacaggttgggacacggaaacaaagagacttacttgcttccaacttgtgtatcttctcttattgactacaactttcataagattgcttgtgggcatacatttaccgtcgcactcacaacttctggacatgtttttactatgggtggtaccgctcatggtcagctaggtaactcaatctctgatggtaaattaccatgcttggttcaagatagattagtcggagaattcgtggaagaaatcgcgtgcggagctcaccatgtcgcggttttgacatctagaagtgaagtcttcacgtggggaaaaggtgctaatggaagattaggacatggagatacagaggataaaagaacaccaactttggttgaagccttgagagataggcatgtgaagagtttatcttgcggctcaaactttacgtcaagtatatgtatacataagtgggtatccggagcagatcagtcaatctgctccggatgtcgtcaagcattcggatttacccggaagaggcataactgttataactgtggtttagtccattgtcatgcttgtagctcaaagaaagctttaaaagcagctttagctccaactccggggaaaccacatcgcgtatgtgatgcttgttacagcaaacttaaagccgcggagtctggttatagttctaatgtaaacaggaatgttgcaactccaggacggtcaatagatggatcagtaagaactgatagagaaacaacaaggtcatcgaaagttctcttgtccgcaaataaaaattcagtcatgtcatcatcaaggcctggattcacacctgagtcttctaatgctcgtgcctcgcaagttccatctctccaacaacttaaagacattgcattcccaagttcgcttagcgccattcaaaatgctttcaaacctgttgttgctccaactactactccaccacgtacacttgttattggaccatcatctccatcaccgcctccacctccaagatcatcctctccttatgcaagaagaccgagccctccacgcacttctggattttcaagaagtgttatcgatagtttaaggaagactaacgaagttatgaaccaagaaatgacaaaactgcatagtcaggtatcttcattactttttttcttgttttcaagcaccaaacactaacaatataataaacctaactcattattggaacaactcaaacttttaggttaagaatttgaagcagagatgtaataatcaaggtacagagattgaaagatttcaaaaagcagctaaagacgcttctgaattagctgcaagacaatcttcaaaacataaagcagcaacagaagcactcaagtctgttgcagaacaggtttgcttcatttgttttatgctcaaagaatctttttttttttgttgcaacatatcatatgatattttctatttcagttaaaagaattgaaggagaaattacctccagaagtatcagagagtgaagcatttgaatccattaactctcaagctgaagcttatctaaacgcaaacaaagtatcagaaacatctccacttacaacttcgggacaagaacaagaaacatatcaaaagacagaggaacaagtaccttctaactcaagtataaccgagacatcgagttcatcaagggcaccaagtacagaagcttcatcatcaagaataagtggaaaagaaagtaaagaacaatttgagcctggtgtttatgtgacttatgaggtagacatgaatggtaacaagatctttcgacgagttagatttagtaaaaaaagatttgatgagcatcaagcagaagattggtggaccaaaaacaaagataggttgcttaagtgttatagttcaaattcatcatcatcatcatcatcatcgaatccaacggcttccgactcacctgttgctccacaaccaccgtctgatccgtcggtacctgaacagagcaatgagaaggaaccagattctgaaacctagtcatatgtgtgtaagtttatttattgttttcatttgtatcagttacagaagcaaaatggagaagtagtcactactgctagtacattgtcacatgttaacagtaatgtatgaaccgagttatatactaacgtataattttgtatacaaacgagctgagtcttttaattacatttatgttcatttaaatttattgtatttttcacatctctattttatttttattttttaagcgctaacaactttttatttaagattttttccccccaatatactcaaatgaacgaacttttaacaactaatatttttcgaatatttcaaaacagtttttggtataaattattttaagacttaaaagattccaacaattttaaatatagaatcctttcaaatatatgacaagttttaatttaaccaattttatatttgagactttaatctatatacaacaatcgcaaaaataatttggattggagagttccatctctttatcattactacttgttttgtatatttacaaagatcacaatttactacaaatgtagtcacattttttttacttacctcatcttattatcaactttcgtttcatattctttttacaatttgtcacatttatttattataactctttgttttacatctactaacacactaaatgtttgtcccacatcatgtgagagattaaatgtcatttctctaggacctctacatcacaatgccattgaaaataatcattagaagattttttaatattttaaataatataagaaaatatatatgaagtttagtgtaacataaaatatggttacaaaacttatactttttaagtatactgatcatgaaaaaaaactcacatatttttcaaaatggttaatgaatggtttataatatccaaaaaatcatctccaaaaaatagttaaaggatacaaagatgaaatatcctaaactatagggagcattttataaaatccagtaaactctatagaaggaagaaacgtcaaacgtgaattacaaagttgttgtttcctctgaatttctcagaactcttctttgctaaggaaaaattaaatatccatccaactgtgtgaattagatattttctcttatctcttctctttgttcgatcaaaaattcaattttcccgagatttttgtttctctcgatcgattcaacacctaaagattgaagcttttgctcgtgggttatgtaaagtttccacctttcgtcttctttctgatctgtgagcaaaaatgggacaacagcaatcaaaaggggaattgctgtatcagcaagttagttatggtaactctgaaggaattcgagctcttcatcgagatggtggagaccttgaggttggtttgttctccatttttgtttaatcaaatttgttttgaattgattgaaattaagggttcaaattgattttgtgtgtgtttttgggattgcagtggatggatagagaaggaaaaactccgttgatcttggcttgtatgaactccgagctatttgatgttgctaagactttgattgagttgggttctaatgttaatgcttatcgtcctggtatgtcaaagatcttaacttttcttgtaatcctagctttgagtagctgactcaatgcttagttaggatccggtgataatcattgaaatgtaacaacttgttaagttgaagttagtggaatgtgtttggagtttgagacattgttgattctgttagaggtattttgaatcagttctgtgatattagatgctttggttttagagtgtgattgagctaatgtggtcatatgtgtttctcttcaggtcgtcatgctgggactcctctgcaccatgctgcaaaaagaggtcttgagaacactgttaagttacttctttctcacggtggtaagtgtttgtcttctcatacaactcgatgaatgtgaggtcagtgaatacttatggtgtctttatctcatatggtgtaatcccattttcttgtagcgaatccacttgttcttaatgatgattgtcagacaccacttgaggtcgctagagtcaaagggtttagcaatgttgtacgtgcaattgaggtatgtttgtaatacctgtttgatcatttattctaacagacttttgaatgatatgactactttgtggattaatagttttttttttattgtggattctgtagaaacacatctgcttgttctcgggttggatgcgtgaattttacggccctacctttctcgacttatttgctccgcagcttctttcaagaagagtgtgagtatccatccattaaacttcaccattatatttcttttttactcgtttctttcactgaatctgaggaaaacatttctcttcatggcgttgaatcttctttaaaccttacgatttgcagatgggtagtcattgtacctactggttcaagaaaccctacaaagcctttcaagttggagctggttgtgtatgctagtctgcaagtatgatcatcattaaacaataataaaatcatgacgtgtaacttttaatgcttttaagccttgcatgtttggctaatctgtctacaaaactgatctgatgtaatcaggatgcacagccacgcacagtgatgcctttgtggaaagcaaacttggaagaaccaaaagcgaagcagtccgatacttcagtgatgatcgttgataactccacaagtaattttcccagcacttttgtatgttgttgacatgcaacctctagttttgtggatgttgattgaattttattctggtggatagtcccaagccgcaggatgaagaaacgaagggtctgcgcctcccacgggagacgtaggcctcaagtagttaggcgtaagtctacactgtatagttgttgacaaactatccttagtttcgtatagtaatttttctgcctccatatataagttaaccaagaaagtatctaaattaatgtctctgttttatctctgctcttgctttactatttttttgtttcggtgatgtagaagcatgttaagtttttctaatctttctttctttcagaaacacgtcttaaattcgcaccttcgactgaaggtgacagccaacagctaaagtggttttgtgatgcatgtaaagggattccacaggtaatgtcataaacaacatccattggatttcttgtttcttttcttccttatttggttctaagtattgaaacttgcttggaatatatgtatacagccgatgcatccaccggtcttcctccaagcaccaccatctgctccaccaccaccatcagaagatggactagccatgggaatgaacgcctcacttcacactactatgagtgacccatcaaatctcaatcaccattccatcggtcaagcaagttcctcatccggtccaagctcatcaactgcacctccctcaggaaaagcaagtgcctttggattcaatagccatggaattggcattgtgctagaatcttcaccatcagctcctccattgacagatgatgatatagctacagtagacgatggtccaattcattacccatcaatcgattcaacaccagtcgatctcccatctgctgcttctcttccagcttcaacagaaggtgaaaggaaagaagacgggaacactggaacgtgtgcgatatgtctcgatgctccatctgaagcagtctgtgtcccgtgtggacatgtcgcgggatgtatgtcttgcttgaaggagatcaaatccaagaattggggatgtcccgtctgtcgagccaagatcgatcaggttattaagctgtaccgtgtctgaaaacaggtatcaacaacaacatgggattatctatatccttcattgaactattgaaactatatctctctatttacacagctaaaatcaataccatgttttctttttatcaaaagctaaaacaatatgtttgtaatttggaacttgataaaaaacagttccagtattttgtatatatgtttttggacaaaaggaagaatgtatcaatgtaaagtgtggtaatatattctgtatacaatatgcttatttatatttgaattgataatatattttgtaatgaatcgtggatttgttcccaaaagtaagaacagcatatttaatcattgtacggaaaaagttgaatgggttaataaactgtttgtgttctgataaacttttccgttaattactcaattatcgtaggcttctggcttcttcttttaccatgcctccttgctccagtccacactccacaataagcaattatttccacaaatataaatagaaataaagatggatttttttggttatatttcgttacatatgtaaattttgaggataaaacaaagttctgtgtcatatctattctttttttttttcattttaattaaaaatttggcagtattgattatttgatttatagttgtaatggcatgttttaaaaccaaaatagtatcttattaatatatgttaaactttttaaaaggaaaaaaaaatgtatgtagaggattacaaattcaatggatatattactccttttgtttggaaatttgaataaattagtaggctacaagtataagataaagatatccccaccaccaaatgtagcataaagagaagctt

SEQ ID NO: 454 - DNA, 87487 bp, Arabidopsis thaliana
gatcttcattaattaatataatctcacttgggctctatatctttcatatattttcatctatcaccgacaaatagtattgcaacatgattctgaattttgtttatttaaaaagttaactccatcgttattagcaaataaataaaatatattgtctatgattcttactgtgatgatgatatactattgttgtatatactcaaaaatgtttttcatacattacaagcacataatatctatatagattgaaaatgctgaagttaaaacgccactttgatctttgtatctctaggttcacacacacctatgtccgttcttcggacacccaaacccaccagcaccatgtgcctgtccactccgacaagcgtggggtagtctggacgcactcattggccgtcttagagctgcttttgaagagaacggtggttcaccagagacgaacccttttggtgcacgagccgttcgactctacctaagggaagtacgtgactcgcaggctaaagcacgtgggatcagctatgaaaaaaagaagcgcaagcgacctcctccgccactaccaccggctcagccggcgatttcaagtagccctaattaacattaagtcatgagtaagatgtttcaatgaactacgtttgtttacaaatttttatcaatgacgaacatgcacgagttcttttaaagtcacatgccctttcctaaacttttatttggcaaacctaaagaattcttatgttgtattaaataaatttgtagttctttctgtttggcctcacataagtatagattagtatatatttttaatatatacatgtaacatgttagacaagtcataagttttatcttatagactagtaaaagcactaaactaatggctttgttatttatttgcaaaattgaaagatggcaaacttatgattatgttggttcatttatcgcatgtatttataaaacattatataatattacgttttctctaagtgattcaagagtttatatttaatacattcttgaatcatttatccaattatttcaaagaacctctatctctatatattgatcaagttaaacaagtactaatgttttgtaggatactaaatttagggtttttctttgctatttacggatcccaatgcaagaccgaatgtgaattagttgtaatatagtatttagtttttttttttttttgttgtcttatactacttaagattatgatgtaaattcttcataattaccagccattttagcaaataaatcgtaaagttgaacttatttacaactccataccattagcattaaaaaaaattccaaaataattcattttactttaaattcttaatttaaattgtcaattacattatcaagcaaatttaatccaaacaaacttaagatcaatcctttaaaattagcataaacgtatttgttaacaatattttaaaacaaagtttttgtttaaataaatattattcttactaaacgttttttgtttaaataaataaattctgtatttgaacttatttacaatttcatgctactggcattaattatataggaatgaaaatatttaattaaagatttaaattttctaaatccttgcttttagatttattatgtcattacctaaaagacaaaaactattaattttttaaatattattatttatattttaaactttttaaaatattactaatatttaaacttataaaaagtttaatatatcaaaaaatcttaacatcattatataatatatagagtttcaaaaaatctcaaatttttttcagtcatattttgtgattcgaaatttaaaaaatgaacatatattaaacaattggcgaaaaatgtgtgagttcaacgtcccacatcgattaaaatatttagagaatgatttataaacatatcataaataagatcaacattaacaaaataaatgagttttttttttgcgggacgggtttggcaggacgttacttaataacaattgtaaactataaaataaaaatattttataaatataaacaatttgcaaatttttatatatattaacttaaaaaaataaattgttccgcggtataccgcgggttacattgaatattattgtagttcgataagacatgacaaaagaagatttgcagaatcaaatggttgttcgtgtcttttcatgctctctgtgtacgccttcctttgtagcgtcttaatttggtagggaattggcaaatcattcagtttcttgtccttgttaccaaaaagtcttttctttctttgtttataaaaatatatgtattattgctccggtaaattcttgatctcatatatcttaaaaggtaaaacaggtcaatcactttgatttactctaaacaacaacttgaactcaatattaccttttaatcttgcttaaaaccttaatgtcaaattctcttttgatttttcgactaatttgatacattgatgttatctaattactaacttaagcgtcaaatgtacacgatcataagtcagggccggtcctaagcaacatttatgttatctagttactatttttttttttccatttatcgtttgagcaaagctgacatgaaatgacaaatgagacggtgagagcgtgtgatgcggtctgacccgctttggtccaccaaccaatctgcagtgcacctatgtaacgtttcccttttaagtgttggttccaacattcgttaaatgatcattattggttaacaattgttgtttatcgacataagtaggagtttggttctgaaagttgtcaaattgttgtcttttttttttggtcaaatcaaattgttgccttagtactataatttccatgtgaactcgtatgtgttttgtttcattattcatcatcgtaaatgttgcatacgaccggctctgactattgatcgtgtacatttgacgcttaagttagtaattagatagcatcaatatatcaagttagtcgaaaaatcaaaagaatatttgacagtaaggttttaagcaagattaaaaggtgatattgagctgaagttgttgtttagaggaaatcaaagtgattaacctgtttacctctaaagctatatgagataaagaattaggcaacaatcttccttctttttatcaagtcaataaattttttattatataaagcttggtttttaaagtttagtaatttataagattgtgtcacatgtcaactttagtgatctcatataattttgacattgataaaccaaaatatctttctattaattttaaaaatataaaacataattataaaaatttataattttaaacaatttaaaaatgtaaacaaatatttacaaggaaactatacttatatatcatacgtaaaacaatttaaaaaatgtaaaatggataattataaagaaacaatctgtattttattatataaaaacagaaattattatatcatttacttattctgacttaagtttaaaaagattactttttccttcaaaattaaaaagagatttaagaaattatacaattaattaataaaatactactataattaaggtaattatacagtaaagtattaatcttagaaaaatggtgaggtagctgagtatctttcgcaacagttcttctaagtagttagcaatttttttaccacaaacaaaactagttgtgcctaaaaaacatttttttctcctccgttagatcttcagtccgatctctgccatacctgtacctagctcaagatgtgagagcccatttatttacaggctttaacccatttgtttaacacaattgccgaatcaaataactattgttttgttttgaggtcgactaaaacaaagtaattagtgagttacaaaaataacagaactgcactaaacgaccataattttaaatggattaagtatatgaactttttagtttacagtatacactaaatgacataaatttagaaaggacccatgacttgtagtggtgagtctatgtaacacaacttgaaattaaattggtatataacatactgttcacagaatttttttgaaggctattcaaactctaacaacaacgacattaaagatgatattgttatgttatattaaactatatatatttcatcttggattccatttaacaaaagacatgagtttagaagaaataatatgaatttcgaaggaagaacatcatatatcttaatacaagtttatagccattatgttcatgaagggtggatgagtgaaactccatggaatttacaaaaataaaaatttcatcattctacccttaaaagaaaatcttgtggatctaccactttgagaaagttaaactgaaattataggtatgttttggtagtcgtctaaaaaacttgtccataatatgttgtggtcaatcaaaaggtggccattaaaatctaccaaacatatcatttatggactagttcttgggggtttagctttgatggacaaattttagtgaacaagtggtaatataccaaaacatattatggacaaatttttgatgaattaactaaaaaataccaattttagtactattttgtagaaatggcaggtccataaaattttaaaagagaagatagaatgagtaaaatatccttagaaaatctaagtctaacaacaacaaaagtttcttaaacaacatcaaagaaaatttagtacaaaagtttcttaaacaacatcaaagaaaatttagagcccatgttctagtggtgattgagaattgaagaaaggttgaaaggaactaatccatgtttggtccaccctcgaaacaaaaaaaattatatttgtgtgagatgtctgggtttgagccaaatacctaaacatcttatctggtagtcactaatatatgatctggtcgaaaaatagtccaaattcagaacaaacagtgtagtggcccttttgaaaaaaatgtactttaaagcacttcttttttatctgtgttaatcggaccagctaataagattaattttaaaaaaaaacacaaattatcatacgaatttattcgtgtgttttgcaatatatattttcgaaaacttgaggatacttggatcatatatagaagcatgacgacgaaaataacacaatatgtacaatttgatacaagaaaatgataataaaatttacaaaacaatttgccaaataacatgttagttagagtatagcacccatccaattaaatagcttttgcaaatgacataagtttctaaaatatccacttaattaattttcttttcttacgttttttacatcctaactaacactagtatactcaattaatttttcgtaacattggttacatacctaactaactagctctagaaaatatattaaaatcgggacaagtcaaccattagacatgtgtaagctgaaccaaatcgagtcatttattttcccagtaacccactctcaccaagaccagaaaaaaagcgtagatccagaggcgacaatattcaaacacacaaaaagtcatcaatatatataaataaataaaagaaaatacaattcctcttcatataattcatattttcatgttacgaaaacaaaaaagatcaccgacacataaaactaaaccaaatatttcaatgaaaaattaattaacgactttgacgctttatttctctttctctcttcactctctcattatatctctttcgctgccgcttttgttactttttgttcgttcgaatcccaatatagaccaacgaagaagaagacgaagaagcagtctctcaaacttcttctccagatccgaatctcactctcatttctccgatctctctatttgaatgacctacaatttcgcatctcttttgatcttgatctctgtttctctccttctactggtaagtgatttccttaatccgtttctctgattttcttattccttcctttaaccttgtatctgaagcttcctccggaactaggtttacgatttgtttaattttggaattcgatatcgatattttgttgtgcgttaattgtgtgtttttatcgtagctttgtttctctgtttatcagatccattgataagaagctttttagattgttaatggcataagcacgatatgtttgtttgttttgtagaatctcttgttttgagtaatcactaatatacacaacggcggcgatgagggggagatcagaaggagggaagaaaaagccggtgattgtgttactctgcgttgcatcagtagtgcttgtttttgtatatctcttctttggttcctctaaccataaagctattgagtatgggaggaaacttggtttgggtggtgatgatgatgatagtactaagaaagatgacacttctagctctttttatgtagaagatgtagtagggaatggtttcactcccagaagctttcctgtgagttctttagaccttctttgtgtaattgatgattgagttgagcaatatgtgtttaatattgttgttaattcttgtaaaggtgtgtgatgatcgacactcggagcttattccttgcttagataggaatcttatataccaaatgagattgaagcttgatttgtctttgatggagcattatgaacgtcactgtcctcctcctgaaaggaggtttaattgcttgattcctcctcctccagggtataaggtgtgttatttctctagctttgttgatatgatcagtgtcttgacatattttgaagtttttttctatgtgaatgtgtctagattccaatcaagtggccgaaaagcagagacgaagtttggaaagtgaacattcctcatactcacttagcgcatgagaagtctgaccaaaactggatggttgttaaaggagagaaaatcaatttccctggtggaggcacacattttcattatggtgctgataagtatattgcatcaatggcaaatgtaaggcagttactagatcttatgtggaatagaggtgtgtgtccatcttcatttactgatactattcatggaaattgcagatgcttaattttccgaacaatgttttgaacaatgggggaaggctgaggacatttcttgatgttggctgtggtgttgctagctttggaggttatcttcttgcatcagaaattatgacgatgtctttggcacctaatgatgttcatcagaaccaaatccaatttgctcttgagagagggattcctgcatacctcggcgttctagggaccaagaggctcccatacccaagcagatcctttgaacttgctcactgttcacgttgtcgtatcgattggcttcaaagagatggtattcttcttctcgagctagacagggtgctaagacctggtggctattttgcatattcatctccagaagcatatgcacaagatgaagaggacctcagaatatggagagaaatgagtgctcttgtgggccgtatgtgttggacgatagctgcaaaaaggaatcaaactgtaatttggcaaaaacctttgacaaatgattgttatttgggaagagaacctggaacccagcctcctctttgcaattctgacagtgaccctgatgctgtgtatggtgtaaacatggaagcatgcattactcaatacagtgaccgtgagttttcattattctatcttcttttcactaacagagtttcgtcattaacttcacaagcttgtgatattgcatatctgagaacaaatatgctcactaaattatttttcaacgtttctattagatgaccacaaaaccaagggaagtggattggctccatggccagctcgattaacctctcctcctcctcggctagctgactttggctattccactgacatttttgagaaggatacagtatgttatgcccattatcctttttatttgttgcaattgaagctccaataatataaagactgtagtcaccttaaatcattgcttgctcatacaggaaacttggaggcagagagtagatacttattgggatctcttgagtcctaaaattcaatcagacactgtaaggaacataatggacatgaaagcaagcatgggttcctttgctgctgctctgaaagaaaaagatgtttgggttatgaatgttgttcctgaagacggaccaaacacgcttaaactaatatacgacagaggcctgatgggtgctgttcatagctggtcagtttctcccttaacctttcacttaatcaaaatccattagtatatatgtgcctcttatgatttatcgtctgataatattgcaggtgtgaagcgttctcgacttacccgaggacttacgatttactccatgcctgggacatcatatctgatatcaagaagagaggttgcagcgcagaagatttgctgttggagatggatcgtatacttcgtccaagcggtttcatactcataagggacaaacaatccgtagtcgaccttgtgaagaagtatctcaaggctttgcattgggaagcagttgaaaccaagacagcctcggaatcagaccaagactcggacaatgtgatactcattgtccagaagaaactgtggttgacaagtgaaagcctcagagatttggagtgattacgatgatgatgatgatgaggccaaaaactgcctccaacatgaaaaaacaaaacaacattcacaagagatttctttcttgggagaatctaatcgaaaacatacaacgaagaaaattcgttttatagcggcaatttaacgttcttttctcttaaatctttctttctttacatattcatataatgtttgtatggttcgttagagaggactaaagtttcttatcaatttaaactctttttgttgcaatttatgtattaaatcattgtttaatagattgatgattattcattactaaacactatattcaatcttaagagtcatacttcataaagcttaaatccaaaaacttgggatgatgagaaatcatctctttgagctctttagaataatagttgtaatgaatggagaagagtgattgaaacaaaggtatgcgtgctgtttacttagtccccattatataactcactctcagaagtaactttactgttgttggaagaaatctttaggttatgtcccaagcaaaattgaagataagttattgttctaagagacaaaaaggaaatataattaagaataattgcatttgatgattagaacattttattggtccaaaaaggagactaaacatgtgaaagcattctacaatttttttttttttgtctcgtggacacaaagctgaagctgttgtccacttctttaagttaactcccataatcgatgcccctcactttctcgattatattctatccaaattcagtaattgatttgaaatttcttagccatgagtccatgacaataacaactttatatttgcgttttatggctaaactcatacaacaatatatttttaactttatttttacattttatccttcttaattcttatgttcagtttagctaaattatatttacatgcgaaatgataagcatgaagattttgtttaggtgacatatttgctaacatctctttaaaatgtatattaaaaaaaacataaaatattttgggcataaaacttaatgtggaattttattagttgtctcatttaatatgtttatttaatatatctgtatttgtggtattataatgaataagacattaaatatgaataaaaattccaaaataatatttgcacgtttatgatagaaataataaaagtctatttaataacttgaaaagaaatgacatgtagaaactgatttcaaatgttaaatacttatatggatactggatacatcatccaaaacatttttcaactaattttaataaataatataaaaatacttttaccatttccttacataccaacttaataattttcagacaattaatcatgacgaacacattgaccgttacatcatatgaatgataaaacaaaaatagtggtttctgttttggttttcctattactaattgttggaaaccacttcaattatacgcgttacgtagtttgatacattgaatatatggtacaatatacattaaatttattttcgaaaaatatgaatgtgatacatacctacaaagtttggcaaatacaaaaatggtccccaacgttactctcccccacctcaaagctgttcatatcgcccttcaaagattgtgaaaatcaaacccttatcctcttaaaacccttaaaatgttttcttctaaagaaaaagttgctttcttatttttatttttattttgaattctggttttggcgcatacatattagcgaaaattagagaaaaaattcctgtatatgcaaaaaaattaacgtttttttcctacaaaatttagtataaaaatcaataaatatattaaaattatcacacaagaattaactttgaatttcttttccagattagcttttaatatattttgctttgtaataaagaacatactgtattgaaatatgttctactattaactaatatgaagattaccggtaaagaattactaatgtttcatctacattaatttttgtgtgcccataatttcaaaattttgcctagagtgggatcaataattttggtgaagattgaagaaaaaaactaaaatttggggacaacattacaaaagagcattcagtatttggaaagcttaggaccatggtgatttagaagcgccacgggcgtgatgcatactgcatcttcggcggacatcaaggcttttgaaacctttttctaattttgttatctatataattcacatcaaatagaattagtgaactaatgtttacaaaattaggtaaaacataaattatatgtatgaattaacaaactattagtttaaaagtaacatatagtcttatttttttgaaacaaaaagatttactttaataatatatttttttttttttgtgtgtggatccagaagaattgtgaagaaaaaaaattcttctaaactgcatactagtcacaccctttactttcgcgtaaattcagatagttcggctgaaaaaaattggttaaccctcaaaaaccgtcatgttaattaggtttgcacaatccattaacattaggggatgccaagtagtatcacattagtacttcaagtcctcgatgaagtgttgataggcttttgctttgtttccttaatcgtaacataaatgtcttcatgtccttaggatatatacaaacctatccttgcccaattgattattcatctgcattccaaactaaacacaatgcttcttcatgtaccattcatatcagttgggtcacactccaaacatttaattttctttcatttccatataaaaatacataatccgtgaatagttgaacttctctatatttgacttgagaagttaaatagagaaattaacaactataccagttagtacagttggtaattaccaatagatattcaaaaattagggagagaattcaatgatttgggttagtaaggtggaataatcaatatatgtctacgtctagataaggtaacatatgttttattaataataactcgagatctatataattaaaacgcccctaaatcctaatccatcattaatgtcaaatatttgaagattgaaccaaattctcaaaaagtgttaaaaactatttgcaacaagagagagcagttgggttgtgttgtgttgtgttgtgttgggttgtgttgtggtctctttgtaattttacacatcaaaagcaacgcaaagctttacactttcctttctcctttctctttcactgcaaatttctcctacccttaaaaatcgaaacttcaagagaagaaattgaggaatcaaaaattccctagattcgagggttcttctctcacttgttctatcttcctgcttcatcggaatcgtttgatttgtgttctttacattttctccgactcaacttatggtctgaattttacctagtaagtacatttgtctactttctgtttattctttcgaaatcgatgctttatctggaattgatcatgttattgagtttggcttgggttaactaatcatggggaattctcaaaatttgttttttttttggattatgtgtttgattttgggaatatactgttagggtttggctagtgtgatgaagtttctgaaactggtgatagtaaaggtgtaaactttatgctcattttaggttaaattctctgtatcaataaggcactaggcatttagtttaacaattcaatgctcagaattttgatttgagtattttgttagagttcaagtgtttagtttagcttatcgtagtctcttttggtatttgaggtcactattggctcatatatgttatcttgttgtaggtgcaaggcattagagaaattggtacagtcgtgtgacatgtgaagattgttgttgtacatatagctgaaggaactctttgctgatttttacataaaagagtgtatcttgatatttggtttgcgatcgagttaagtggaagcgatggatactgccagagcatggctgaagaaattaaagtctaaagggaaagagaaatcttcgaataagaaggaaacttctagaggaaatgttaaggagggatcaaaaacagctggaggtgaagaagctgtgtctaatgtgacaaagcagaaggctgctgctgcgaaacagtatattgaaaatcattacaaaaaacaagttcaaagtcagcagcaaagaaaagagcggtatggtttcgttacatatttttaagatttttaaagatttcgttcattaatcattagcatccagttttgtgaaacctgcacaagtttcttgcatacaaatgtctgtcagcataatttggttcttatgcatggcaaagatggagattagacaaatgtgttgttgatgattggcattcaaaagaagtcttttagaatttgctatctttatgagaaattgatctatccgagagatgttgatgtaaaatcataatgtggattgacaagaagttggtgtaaaatttctctggaaaaatttgtttcttggctttagcttggaaagaaaaatactaattgcatttgttgcaggcgtgatatgctggaaaataagttagctgctgcagaagtctctgaggaagagcaaaagaatctgcttaaggatctagagaagaaggaaactgaatacatgcgccgtcagagacataaaatgggaactgatgacttcgagccattgacaatgataggaaagggggcttttggagaggtagcattagttttattgtaaacttttcctgtttcttttcagcttttcattggtgtgcatatctacacatcatcttgatcgtcctgtcctgtgatgtagaattgttaaaaacatgaataccttccttgaagggcttgcatccatgtgtgctagaagcactatgcaaatatcttctgggaggatgtacctacctgcagtagttcttgtattcgttgatctttagttggctagttagtggcctgtagggtttatgccatccgagaataaatacacgttttcttaaaaatcagattgtctttttgtagttttcagcatatatcatacagttagctcctggtgttgggatagcgcttaaaatttgtaatctcatgcttatgtttgtttttcctcttgatgcaggttaggatatgtagggagaagacaacaggcaatgtctatgcgatgaaaaagcttaagaaatctgagatgctccgtagaggccaggtatctccttcaagctgcttttgtttgatatatctttgtttattatcgttcatgtttgttgaaatctgattctttttcaggtggagcatgtgaaagcagagagaaatttacttgcagaggttgacagcaattgcattgtgaagctgtattgttcttttcaagatgaagagtatttgtatcttattatggagtatctacctggtggagatatgatgacattacttatgaggaaagacacacttactgaagatgaggcaagattttatgttggggaaactgtcttagctatcgagtccattcataagcacaattatatccacaggtctagtgaagcaatcaactatctgagtaaatttgtagcgtatcatttttcttttttggtgttctgaccatccatttacttctccaatttgttacagagatatcaagcctgataatctgctactcgacagaagcggtcacatgaagttatccgattttggattatgtaagccattagattgtagtattctccaggaaaaagatttcgtagttgcacacaaccttagtggggctctacaaagtgatggccgccctgtggcaccgagacgtacccgctctcaaatggaacaattacaaaactggcagagaaatagaaggatgcttgtgagtttatcgttcttttcttgttctgagatttctacttgccagattgaacaaatcatcattactttattcatcttatggaagtttttctcactgatatataagttttctgttcaaatacagcttattaagtgaaatgctatcaattgcaggcttattctacagttggaactcctgactatattgctccagaagttttgttgaagaaaggatatggcatggaatgtgattggtaggtgcagcaaatctgttgggtcttgttctgttttgtttcttcaactcaaaatacattgttgtcgataattttttcgggttttcttcctataggtggtcacttggtgcgatcatgtatgaaatgcttgtggggtttccaccattttattcagacgagccaatgacaacttgtagaaaggtaccaatcctcactttttgtggactttaactctgttctagacttctagtaatctcaaatttttgcattcgatttagttcttgatcttctaatgatacctctttggtaatatatgcacatctctgaatacttgttattgtttttaatgcagatagtaaattggaaaaattatttaaaattccctgatgaggttaggctatcaccagaagccaaggatctaatttgtagacttttatgcaacgtagaacaaaggattggaacaaaaggagcaaatgaaattaaggtactttgtgctttataattcgaagttcccgtgtctaaagactatcgataaatgcttaaataaacgctttctgctggtattttttgtaggaacacccttggttcagtggtgtcgaatgggaaaagttgtatcagatgaaggctgcttttattccccaagttaatgacgagctggacacccaaaatttcgaaaaattcgaagaggtaaaaactaaaagtgttcggatcagaaaaaccgtttgaaatgataaggcaacggtccaatgatgcgtatgcagctgttgatatagaaactaatataaattcttctgtaacagactgataagcaagttccgaagacgccaaaatcaggtccatggagaaaggtacaaaatattcttgctttcatgtctttctatgaaatgaaaacttagcttgaagtcatgcatatgaactaatactatgtgttgtcattagcattcttaacataagagtgtctttgtgttttgttttctctccagatgctctcatccaaagacataaactttgtgggttatacttacaagaacgttgaaatcgtaaaccatgatcaattaccagggataggtagatctcacttacacaacaaatttgacttgtaagtaaacatattccatgtttgctctgttgtaatttgtgattgtgtttactgttgcagctgagctgaagaagaagagcacaaagccaaagcggccatcaattaaatccctctttggtacttatctaaaagacatttatcacaatctatttcaactcattgtctgatattagcatatggttttagcactaacaagaattgttataaaaacatttggcagaggatgaatcagccagtagcaccacaagccaccaaggaagctttatgaaactcttgccaacacaaatcgaagttccagagaaagaagacaaatcaagctcatctagtgaaaccctatcatcttccaccacacgtttcgacaatgccacatcctaaaccagactctttgctacactttggtcccggttaacacaccaaaacacggtttgaggtggcggatttacggttggagatagtacagtttccattgtggcggtgaaggctattgtgtgagaagattaaggatttgttcaacagtttctacataggataatatttggttgttcaaaaggtttagtttgaagcaaaaggaagtaaatagtcattttcagaatgtggttttatttatttgtttgattgttttgtttgggtaaaaatcaaatttggtttgtttaccacacagttctaaagcggacaatgggaaaaatgtcaaaaaaatcatgaactttcaaatttgggacgaaaaaaacatgaacttccaaaatgccattaaaatcgtaaacttttgtttgacttttgataaatagtcaagttttgttgactttgccattttgaacatgtcgttaagttttcgttaacaaaaagataacgtgattaattttctgttaattttttctgttaaaagcgaaacgacgtcgttttgaaattaaagaaaaaaacaaaaaacaaacaccaagtagagttgaactggtgaccttttaggtgctattgaaggactaaaaccattgagccacgttaactttttagaagtatagtaaacatatacatatatatatatatatacgtaactaattaaaaataaccaactaaaataaatcaataatatagaaaattacctaaaatttacacaatccttctcatatgaatataggattaatctatacatgcacatagaatttcattcaacttcactttatatataattttatttataataaaacatatattttataaattaatttgataaatatttaataaaagaaaaatataagatcattattccgtcttcaaatcaatttttttattcataattagatggaaagtatataaaaagttattttttggtaatatatttataggtgttatatttcacaagtttgatttttatataatttaagagaatttttttttaattcaatacgtttaataaaaaaatttacattgttatttgagaatatatattaatggtaggtgtatttaatatttttacatgtttagttattgtttttatagttcggtttttatttggtaggtgcatttttataatttacatcatttttaatatttttatttgccattttggttaatatggaggatttggaagagccggaatgatttagtcttcaacaaaaaagcaatcgctgtcgctgatgtgataaaccaagcgataatggacacgaaagaatggctggatgttaagcataaaaatgatgacaacgtcaaagggggccaaaccaagtcctcaagaacggacaaatggcaaaaaccaggagcagaatgggtcaaatgcaattatgatgtctctaaccatgcgggaagacaagactcaggcctcagatggattattcgaaactcacaaggaacctgtttggactgcggctgcgggaaatttcagggtcgacaaacaataaaggaagctgaatgcactgccctcatatgggcaatacaatgcgcttgggatttgggatataggagagtagaatttgaaggcgacaacatcacagttaatcgccttattcgaaacaaagaaactaatccacgacttcgatactatttggaattcattcaacaatggagcaaagctttcaccactgtgaagttcacatttcgacaccgggaacaaaacgtttgtgttgatgttctggcgaaaaaagcagtagctaatcatataaatcatactctatatcatttttgtcctagatttctaatgtcgtttgtaaacaaagatgctgaacacgtgaattaataaagttattggaaggaaaaaaaaaaaaaatagttcggtttttaattagttttgcgtatatatatatatatcagttttcattaatatcgaaatgttatcatagcatattggttgagcgcttgtgataatttaggaggttcacgagttcaatccattcttggcgcaaattttaatatatttttattttgaaacgacgtcgtttcgcttctaacggaaaatgttaacgaaaagttaactccgttattttgttgttaacggaaatttaacgacatgcccaaaatagtaaagtcaacgaaacttaatcattttatcaaaagtcagacgaaattttataattttagcggcatttcggaagttcacgttttttttatcccaaatttaaaagttaatgatttggtttgattgaaatgtccggttctggtttggttttcttttgtaccggttctcataataatagccacgtattaaaaatttattagtaatggatttgggccagacccattctcaaagcccaatcaatttctcagtgaaacatatataaacctaattaaagtgaagcagaagttgtattcttcttcttgcgaactcgctgaagtctgaaagatgcaggtttgtctctctcgattcgaaaccctagttacttttttttgttcttatctctaattttatacaatttcttgacgattaagctaagcgtagctgaaatctgggaacaatttgctttagttcttgtaaaggttaggtttttaagcagcagatagttatgtaatctcacttttttgtttttgtgcaggcaagtgataggtttaacataaattctcagcttgagcatcttcaagctaagtatgttggtacaggtcatgcagatttgagcagattgtaagtatttttcactttttgtttggatttttcaggattccaaaattgtgaacttattgaaaattttgaatgtttttgtgttagtgaatggactgtgaacattcagcgtgatagttatgcttcatacattggtcactacccgatgctttcttactttgcaatagctgagaacgaatctattggtcgagaacgttacaacttcatgcaggtttgtttactatctttcttcttgcatcatgtcaaggaatcatattgagaatgttaatgtgttagtgtcttaagggagaggaacaattagggttgtttcaaacagggtaaagtgttcctgctgctcccctctttagcttggagaagccagtaaatatctttctcttcaaggaacttgtgggcctcaagaaaacctgctataattctagtttttcaacattcctccttctgatatcagcaacaactccttacccttaagaatggagaatggaacttcctcaaagatatttacttggcctctgcaaccggaaaggggagcagcatgaaactcttttaacccttaccctgtatttgtcaaaaacagattgtatcatatcgtaagttagcaggaaactaccaatcttgagggttgtttcaaactgttatcttctggttcttctacactcaagagtcaatgactttgcatttttgctaatagcttttactaactccaaacttctttgattttttttttgcagaaaatgctcttaccttgcggccttcctccagaaagagaagacgagtaagagcttgtgtgcatttgaaattaaaaaaaacattctacttcttagaagcttgtgtgcaatcttctttaactgctccaccaatgtaattgccgaaaaggcttcttcttgtttctagttcataatgcagttgttgatcatgatctaaacatttgtactttgttatagtcttgatacaattgtcaaactcaaagtctttttgctactcgaacaactattgcaaaagaattgaattgaacaagtcataaaaaaaagaggttaaaagttggagtatttaaatgaatgacgaaaataaaaatcaaacctttatgtttgctaatggtgaatctctgagaaggagacaaagatgagttcatcaaaagccctaatcaaaaccctgattaagaatccaactcgaatcaaatccaaatctcaagcgaagcagcttcacgcacaattcatcagaactcaatcactctctcatacatcagcttcaatcgtaatctcaatctacacaaaccttaaacttttgcacgaagctttgcttcttttcaaaacccttaagtctcctcctgttctagcatggaagtcagtaatcagatgcttcaccgaccagtctctattctccaaggcgttagcttcgtttgtggaaatgcgagcttctgggagatgcccagatcacaatgtgtttccttctgttttgaaatcgtgtacgatgatgatggatttgagatttggtgagtctgttcatgggtttattgttaggcttggtatggattgtgatttgtatactggtaatgcgcttatgaatatgtatgctaagcttcttggtatgggttctaagattagtgtaggtaatgtgttcgatgaaatgcctcaaagaacgtccaattctggagacgaagatgtaaaggctgaaacttgcattatgccttttggaatagacagtgtgaggagggtttttgaagtgatgcctagaaaggatgttgtgtcgtataatactatcattgcagggtatgcacagagtggaatgtatgaagatgctttgagaatggttagggagatgggaactactgacttaaagcctgattcttttactttgtctagtgtgcttccgatattttctgagtatgtggatgttattaaggggaaagagattcatgggtatgtgattaggaaagggattgatagtgatgtatatattgggagtagtttggttgatatgtatgcgaaaagtgctcggattgaagactctgaaagagtgttttctcgcttgtattgtcgggatggtatctcgtggaactcgcttgtagctgggtatgtacagaatggtagatacaatgaggctctgagattgttcaggcaaatggtgaccgcaaaggttaagccaggggctgtggcgttctcaagtgtgattcctgcttgtgctcacctagccaccttgcaccttgggaaacaacttcacggatatgtattaaggggtggctttggcagtaacatattcatagctagtgcacttgttgatatgtactcgaaatgtgggaatattaaggctgctaggaagatttttgacaggatgaatgtactcgatgaagtatcatggacggctattataatggggcatgcgttacatggtcatgggcatgaagcagtttcgttgtttgaggagatgaaacgacaaggagtgaaaccgaatcaagtggcatttgttgctgtactaacggcttgtagtcatgtggggttggtagatgaggcatggggatatttcaacagcatgactaaggtttacggtttaaaccaggagttagaacattatgcagctgtagcggatcttctaggccgtgcagggaagctggaagaagcatacaatttcatttcaaagatgtgtgttgaaccaactggtagtgtctggtctaccttattgtcttcttgcagcgttcacaagaatcttgagttggctgagaaggtagcggagaagatattcactgtcgattctgaaaacatgggagcttatgttttgatgtgcaatatgtatgcgtctaatggaagatggaaagaaatggcgaaactaagattgcgtatgaggaagaaaggattgcggaaaaagccagcttgtagttggatcgaaatgaaaaacaagactcatggatttgtttcaggagatagatcgcatccgagtatggacaagatcaacgagtttcttaaagctgtaatggaacagatggagaaagaagggtatgttgcagacacaagcggcgtgcttcacgatgtagacgaagagcataagagagagcttttgttcggacacagtgagagattggctgttgcctttggtatcatcaacacagaacctggcacgacaattagagtcactaagaatataaggatatgcacggattgtcatgtcgcaatcaagtttatctcgaagatcacggaaagagagattatcgttagggataatagcagattccaccatttcaaccgtggaaactgttcttgtggagattattggtaataatgaagtgtgaaacttttttgacttcatcttttgttcagagacagaaacgacgtcgcatagggaacatatgtttcattacacttattgtagtgttcaaccaatttatatatttttctatctctataattttcttataattaggaaaaattagaacaaatcatgtggaaatagacctaacaataaagtattgttttaaaagtaaagtggaatttgcatgagtttttttttgtatttattaaacaaacaatatatggaatgtttggacataaatatatatgatctgttgtgtatacaacaacaacagacagaagctgacccatgcatacaaaattttcacattattattcattgcccataataaatcatggccattggatccctttttggcactatgaacattcattttctatgtagtggaaaatcgactagtcgttatactattataaaatatgttcactatatataaaaaccaacagaatggatttgattgtaagtcagtttttttttttaataccactaaattattgctatttttttttattgcaatgtcaattggtgatatagttcatatttttaccgtagtggtaaaaaaccccgaaatttagtgtatacataaaataggtattatatttcttggatcgtttatatttggactgttttttttgtcttacgatttctcgatcaattgtttgtccatgatccttttttcactattcttgccaatattgtttgctttgcttttcctatacttaacatttccaaaggtgcaacttgccataaatttagtctgcgaagaaaagcaaaggattagttgtgctaatcatcaaactctctgttttaaacattgttggcatttgagaagtcggtaacacaaagcttactttgcttttagttttctttgtcttgtcttttccttgaatttggttgtgcttggttctacgtcgatggtcatgatttagcaattttctaaagaaagcaaaaacattcaagaaactttggcagccatccatgaatattaaattcagcaagtcctagaaatatattttgaatagagtagatatctttttttttttgctcgacagaaaaaaagggagagtggatatagagtggatttggtttataaatatatacataaaagaaaaaataggtaaaaatatagatttttttttttaatgaaatttgcatcactatgataagaagctaaaacatccaatgatcatagtgtgagagaaaattaagaatatagtgacaatttttttaaggtttttgtttttgggtgaataatatataatagggtgagaaagtaatttgatatataaaaaaaatgagtgggaaagtaaattactaaaatattatttaacaataattatttttatctgtatccgtttattttccctttcccgtgacttaaaaaatgttattaattattatgtgtataaagaagaatgagataaataaataacatccgtcaaaaccatctgtctctgttttctcattcatctcctctacttgtttagtcggtcatcaaactatctcttcaagtttatcctcagaaatatacaaactcctcagaaaattctttcgtttggtttgcttcgttctacaattttgtattgatgagaatgttatattgagtcattaaccgtttgataaatcgtatttggctctgtaagtagtatttattggtattgaaacgatggatcatgtaatcggtggcaagttcaagttaggtaggaagattggtagtggatcattcggtgaactttatattggtatataaaaaatcaatcagtttttttttttttttttttttttttggttctttgttggtaattagtgtgaattttgatgttgattcactttggtatgtgtgattcgaagggattaatgttcaaactggagaagaagttgctcttaagctggtatgttacatattcaattttcagttttccactattagtgaatcttgaaactatgttgtcacactatacttgtatctgaggtcataagttttaagttctttagttttctttagactagcttttgttgagtatgaacatcttattgattcttttgtttttgttctctataatatagctgttgatctgttcttatacatttctttgttggtaggaacctgtgaagacaaagcatcctcagctccattatgaatcaaaagtatacatgcttcttcaaggagggagtgagttttcacttttcattactcagctcatttcacttgatgtttatgtttccattggtctaagttctttgggttttcttttgactagcgggtgttccgcatatcaaatggttcggtgttgagggtaactacaattgtatggctattgaccttcttggtccaagcttggaagacttgttcaactattgcactcggagtttttctttgaaaactgttctaatgcttgctgatcagttagtaagtatacatactctttcgagttcttgatatcgggttaatgttcggttgcgggatcattgctaatgttttagctcttttgagtattactttagataaacagagttgagtacatgcactctcgaggatttcttcaccgtgatattaaaccggataactttttgatgggtctcggtcgcaaagcaaaccaagtaggctttctagtttcgtctttagtatgtcgtatgattgttcttagcatcgagtctggtgtgacgagttttggatttcaacctcaggtgtacattattgattatgggcttgctaaaaagtatagagatcttcagacacacaagcatataccttacaggttagaatacttccttgttggttattttgtttgtgcttcattagaaactaatgtaggcaagtattgatgtattcaggtcttatgcttggtaatttactatatgcactcttcatgaaactttttttatagggaaaataagaatctgactggaactgctaggtatgcaagtgtcaacacacaccttggcattggtgagaaatgtttccatgtcacacattagaatagctttcattctatatttgtgcagtaaccgttaagctactattttccttcttttgaaacatttcttatatcttcttgcagagcaaagtagacgagatgatctggagtctcttggttatgttctgatgtattttatacgaggaaggtaggaaactatcttggttgtgtattaatagtgaaatctttaagaaacatgagatccttaaacttgagacggaatacaacttcttgtctcagtttaccatggcaaggtctaaaagctggtactaagaaacagaaatacgagaagataagtgaaaagaagatgcttactcccgtagaggtacgtcatatatctacaatagtgtttttgtattgcgaaaagacgatgtttagcttttcttaaacttttcgataaatatgattttgctgtttgcaggttctttgcaagtcatatccatccgagttcacatcatatttccattactgccgttcattgaggtttgaggataaaccagattattcatatctgaaaagacttttcagggacctttttattcgggaaggttagaaacctctactgtattctgtctgactgtctccttcacctctctattaaaccgctcatgaattacatcaattgttaatgccttcaggttatcagtttgactatgtgtttgattggacaatcttgaaatatcctcagagtggctctatttcaaaaccaagggttagtgttttttttttgcatcaacatatgatgatgaagaaacttttagaaaccgtaaaatactctgaaaatctcatgtttgtattatattgtgtctcatttctatcagccaaatcctaaaccagctctagaccctccaggaccatctgcagaacgaaatgaaaagcctataggtataacattattttacatcctgcagatagtagacatatcttacgctgaaatggttgaagtataaactcagaagttgatttcctatttttgtgtagtggggcaggatctacgagaaagattctcaggtgcagttgaagcattcgctagacgaaatgtaccgagtcatggcattcgcccgaagcacattttttctgatgatgcttccaaagaagtggttagttttctgtttgctatctttctgttgtgtagatgactttaaagttttccggttggtatcaatcatgagaatcattttgatgtttgttgcaatgcacagcaagtgtctgaaaaaacccgaaatgagattgctacaaagatggcagtgatgtctagcagccaacctggctcatcaggtgagctgagtgagaaccgctcaagtaaacttttttcaagcagtgcccaaaagattcaaccggtgcaagaaactaagttatctgcaaggcttgggcgtgatgacggcctgagaagcttcgatatgcttactatcggttccggaaagcggaaatgagtcactcaagaaagcttgcggatcggagtttggaagaatctgaaaatgtgtaaacaatgtaaaactgtctcccactttatgtgtttatagttcttcatagaattttataaagtggtatatgtaacttgtaacacaagtactttgtttatattagttcaaatttggtcaaatgcttgaaatctattaatagacgtcaagtgtctcctgaagtgtctgaatctaaaaataagggttacccatgtttggtctgaagctatcatttaagttgaattgtggagacagaatagaccatccaatttcgaaaaattgatgatggggacactttggtttggagatttcaagaaacaagcctcttcgtttattcaagacaagtacaatgttgctagacttgtcctcaccgatgttaccgaagctgagttgtgagtagactattaacttcattaattagctaattgataatactccattagtgatggttaaatttaactctttcattcttaggttagtagaagaagtaacaaatggtgatccttcttcaccagacgctaaaacgatgacgaaaatagccgaggcatcgtttgataccgtggagtattggagaattgtggatgttcttcatagaaagtatgaattagttttgtttctcttgaagattattattatgattaagggatagcttaagatgatgattatgaaaaacaggattgggaaagatgaaagagagataaagaattggagagaagcgtacaaggcaatggtgttgttggagttcttactaatgcatggacctattcatttacctcatgattttctttatgatttggatcattttcgattcctctccactttccaatacgttgacaataatgggtaaactattattcccaaatctccaaaaaaaaatttgttttcatatttttcttgttattgctatcatgcttcaatttatgttcgcattataggtttgattggggagctcaagttcaaaaaaaggcagatcaaattcaaacacttctattagggaaagaagaattaagagaagctcgtcttaaagctctcaaaatcacttcccaaatcaatggctttggtaactccaccacattttctccttctcctaattctctatctaactccttctcttccttgaaaacctccaattcaacaccaaccaaaagaattgatcttatatccgagtcatattcgttaatcgacgacgaaaacaagctctcggagaaggatcaagccagcaaagagacgctagtcagcggaatctgcacaaaactcgccggatttagccctttgaacaagtttcaaggcggtcgtactaaggcggcaaaatttcaaactttgtctaacgttgagagagtttcaagtaaatgttacgatcgttgcaattctattggttactaaacaaaaaccggttcggttttaaattgtaatttcgttctgttacaaaacatccggtttagccaaaccgaattacaacgcaagaaatgctgcttttgctaatcctgtttaaagcttctttagctaaacattttgcagcttctttaggatcctctatgtgtcttattaggttaatcgcttcttgactcttcatcacctgtaaccaaattattttgctaagtgattgatcagtttgtattttgatggatcttgatcttgatcttacctcccaaatcccggggctaccgataatgataaattctgtatctgaattaatcttttctgtaatcactacaagctctgaatttcttggatctgattcatcttcttcttctccttgattacaaactgagatattacatttaaagaatttaagtctcatttcattttcttgtcacacaagtaacctaagaggatattcgggtttgaaggaactaaccagggaaaataaattgtgaccaatgttttgttgaggctttcctatctctgatttgatgagcctcaccatctttgcaaaccactactctatggtccccaatactcgctatagctagcttctctccgttcaccaccataaccgaagcggctgagccaccggttctctcttcctcaacgtacgctcttctcatagtctctttacactttctcataatcccgagctgaaaatgtcccagatacattttgttgacacacattcaaaaataaaacgatgatcacactaacataaaccattagggtaaattttcaagtcatgatttaattacctcattggggagcttatcaaatagatggttttgcatatatttgacaatctctttccctgttccagcatttgagactccaaataaccaaatctcaagctcatcactttgttgctctctctgaacaaaaaccgaatcatcattcgatgaattgtcggcatagcttaaccggtcaaccgtatagtatccatgagaaaccggagttaaccataatggtttcttcttcttccttctcttcccatcttcaactacaagtcttctaaaccggaacgcctgttggattcaacgatctttaaaatccataattcaatacaaaatcttgaattaagaaagattgaaaaaaagatgaccttgagcatgaaagggagatctaagaagcccatcgtcgttcatagcttcttcttatttgcttactatctttataaattgcaaatatcttttgataaaaacaagaaaacttttttcgattctcacaattttaaaagaaacagactttttcaattgcaagttacagtttcttaagtcatttttccatattgtaaaattacaattctgatgtatatttattaagtaacggtaggaaactataaacaattaataaacatttagaatgttgtctagaaaacgcttattgtgaacagttgaacaaagcctcatatagtaacgtacgcctttcgtctttagttaactttgactatgtttacgtttcatcagaagaagaaaaaaactacgtttacgttccaaaaccttaaaagacaagcattggagatttggagatgttatatattttattaagttttttgcattttatatgataatgagaaaattaagaaaaatagtctatttcctcacaataattatcacatcgtatagaatccaaattttatccatgatccttatgtttatgaagtgataattctattctagtttacaatcatcatgggtttgagaactttcatttcatggacataaggatcgaggttaaagtttgggctctatatgttatgatgcgatattcatcgtgggaaaataaaccatttttctgaaaaaaatcatgatagaaaatttaaagttatattacacttaaaaaaagagagaggctatattacactttaggaaacatctaatgccttggcaagtgcatgagtagtatgtatcttcagaaaacgatgaaactaagcttaagaccctagacagcttttacatgtgcatttgtcaactatcgtgtcaattgtctctctatattcggttattgcgaacagaatgaaacagatactgttttttaatttgatgaactgtaacttacacatacccaaacatattgttgtgattaatcactaagacgctaactagctttcaatcgtttaatttagatttgattattctccttcatcttttatgaaaagaagatgtaaaaatgttgtggatgagagaacgcatatttctgaaatcaagcaacgaattaaaccagtgaaccaatcggttaattactaaaccgaaatattctctgacaaaaaaaaaaaactttatttaccggttccaggcatctgccttcttctacctccgtctcctcttaaacctcaaataagggtttttgaggaaagtttctcgaaaatggccattgctcgtttactttcacccaaatcaactcctcaattcaacaatagaggtgataacacataataccctttttctaaatcttcttaatttttcattcataacccaaaagattctcattttgcaatttttaaatgtgggtttaattgatattgacgattctggaaacaaaattggtttttgattacaggttttgtaattttgacgaggaggtggttatcttcttctcttgaggatggtcggaaatgtgagagattgtcagattctgaagcttccacgaacaagtgagtatgcttaaatgggttctgtgtggagaattgtagtgaagttagaatctttttttgtcatcagaagaaactgagtaatgggttttgattaatctttagtctcagtgaagagtaatgaagctacacttagaaaccaaatctggaaatgggtttttgcttggagtttgtggtagtttgatttaattcatgcctttgtgtctttgaactgtgagtggattttcatagattaacttactgattcagttctcatgttaatttgggtgatgcattgttcttttttttactttttgatttgtgataattttctcatgtgtagagatattggacaaaaggtagtgcattggtattctttgggaggtttaattagtaatctaaagcaaaagattatgggaaacgtaattttgatggacaaaagttctggtgaagactcggttttgccaaaatcgccaatggtttcctcatcagatgtggctgttacgaaagtggtgaccttgaagaacgttgcagaaagcgaaaactgtatccattcgagtgtaaaagaagaaattggatctgaagatgcatctcaaagtgttgctgcggataataagatctgtatcacttcgagtataaaagaagaatcttttgtctcggaaatgggatctcaagatgcatctcaaagtgttgctgtagaaaacaagaactgtatctcttctagtataaaagaagaatcttcagtctctgaaatgggatctcaagatgcatctcaaagtgttgcaggaattgaggcttgtgggaagagagaaagcataactgtaagtaatgacagattaggtaatattaataggttagatggcttggagtctgggcaggggaaggtgttgagatcaatacgcactgaaagggtggatccttctgaggaacaaagttctaaagatgtcactttaggtttcttgactgaagaagtatcggaaagtcagacatcatctaggaaaaatatggggaagttgcagcctgcgaaagggctattcgataaagtgaagccacctcaaaatagtctctcgaagttgtttgtaaactcggatccatataaagaggttaagcatcctctgagatttgagactttgagtaacagtaattccagtatgtctactggagaatcctgtagtgatgcaggtgatcaacacagcctatttggtaagatgctgtctgatcctgtccaggaaattaaaagtatccccaacgaaaatgatgagcacaggttgtcggatgctcctcaaaatctcagctctttgacatccgttctattaagggattggattgatgaacagaggagtgaagacctggctgctattagagaaaggaaaagtatattttcgcttgaaagttctagaaacactgttgcacctatggcagtgggtactatgaagaagttgatggactcccttaactttccaactgacaatggcacagatgcagaagccaactcgttgaattctaatagtagagaagagaaatggatatccgaaggcaattctgcaatgcaaaacagtgatcgtttttgtgcgatagaggaagaagaaccccaaggggaaacttttgtaatggaaacccaatcattgtgcagtcaggacactttggacgctaccaccgtgaatcctaaggtaacaaaaaagagtttcttggcattatctgctggagaacactctcctaacaaagtactgctaaggtttttgccagaatcatctatgaagaaacacattgttaaagcgttttcttctcagtttggagccgttttgcatgtacaagaaattccctctattgaagggtgcatttacaaagatgctctcttaacttttgaggttagtattttgaattttgaattctccatctcgagaaacaagtcacactgccttcttgttaaactttcttcttaaaaagtgttttcctgctcacctgctatttgcttccatatttgtagactaacactgcagtcaagaaagctctcaagaaaggccatgtgacggtgatgaattacaatacagttgtcgaggcaacttctcaggaagacatggtagaaaggatttgcattccggatctcattggcgatccagatgtgcctgttgcattggtgaaggaaccagcccgaacagttaagattcatccactgacgcacgattttagttcaaatcagatcaaagaagcgctaaagttctgtaggagcaacatatctaagtttaccttgggttcatcgagaacagatgctttcgtggagtttgaggtgtggttttattgtagcttttcttgttttatcctcaaaatccaatgccagatacagtaaagataaatcttgtacttgtgttgcagacggaagacggcaaagagagagcacttgcggagcattcaatcagcatatgcaacacacaattgtttatctcgaggattgatataccgaggacaatcgtggcaaggatttcaaacttgtcgaaatcagcaatgagagatgtacgagcattgtgtgtaccttatggacagatcagaggggtgtatatcaggggaactggtgttgcggatgtgtttttcgatatctctgagtggccaaacatgctcgccattctcaacaggtagaaccataaaccagaacatccattttctcaacataacaagtgaaagtcttgacccttgttttgtgtgttcttcaaacagcatgaatggtatggagatagatggtaagaagttggtggttcgacctgcaacaacagtaatacctcctgaaatattgagggttttgtggaaagatcctcgagaaaagagatatgtgaaaagtgtaattcagaatctggtgagagagattgagcagcctttagatgcaactcgttgccacacacttataacagaattactactatagcttcatgtactctttaactcattagagcctagagccattgtttttgtaaaacgaatcaaaagagagaattaactatccagacctcaaaattagatatttggcaaaccggagttgaccagaagcagggattacacagacccactatcatctggattccattgcctcaccagtcaccgactcaccgccattggtcctggctcgtcctcctcttcatccttgttccaagtggttatgcttgatctttgcatggcagagatggacggctaaggacaattatgaagtgaccttgacgcttaggagccgatcttcaccgtccattttaacgtgctttgtgtttttatggataaacatcatgcgtaccctaattatactggtagacacaatatcaaattatcaatgaattgtgattctttcaaccatgcatgccaaaatcactttaaaatcgtttgcactgtatatataaatgaatgttgtaataagagatagaagaagcaacaagaaacgttttgccaacttcaaactccatttctcacctaagaaaacgtgacatcttttagttattttacaaattacaatggaccttataacggcagctactgtcattgcagttttcctcgtggttattgtgggttatatcattttgtattgcatcgaaggcactaacaaggacatgaacgagactaatgcgtgaaggcgacgagacatatggcagacgaaatctttttttttatgaaatatttaaataatttttaatttgtgacatttatgtgtttcagtttcactatttataatttctcaatttaatcaatatttttttttaacgtaactacatagcttcatgtacctcaaattattgcttttagtgatattgatgaactaattattatttgcttccatatcgttttcattttatagtgaaatattttcattaaagaagattgtatctcaagtcttagaattataggctagaatcaacgttttgataatacccatcaaagaaaagttaacctacatagtttaaattgtactcgagagaacaatgagggagacagaattaaaaaacttaagtcattctttggtatgcccaaaaaagagtcgaggttgccaaatgatacgtagattatatagttaggggtaaacatttgaagttttgaactatgtcggatgaaatgcaagctcgtgagggtgcgtggaaatagtactacgtcatttctacaagaggaaggaaacttacaaaatgaaggctttatttatttatttggtatgtttcacgaattaatatattatagttagggataacattggactatgtcagattatatgataattaaactttacattaatacatttatcatctttatatacaaactctattagttgtaaatcttaaaatttattataagagatttggttattattttctttcatgtatacattaaaattttaaatttctaataattgaagaattatttgttttcttccaaatctatatatggaaagtacatgaaggagaagtttaaatattatgtgatggaattcaattgaaaacctaaatgtaaaatgaaattatatttgtaaaattatataagaatataagtgaattgccaaaaattagcttaatttcatagttatgttttgatgaaaatttgattctttttacttaaaatttaagaaattaattcaaaagtttaacgtgctttctgttttatggaaaaacatattgcgtacccaattactactgttagacacatgcaatatcaaattatcaataaattgcgattctttcaaaccatacaaaaattcctttaaaatctattgtactgtgtatataaataaatgctgtaagaatagatagaagcaagaaacgttttgccaacttgaaagtccatttctaaccaaaaaaaacgtgacatcttttagttgtttttacaaattacaatggaactatggattatagtgacattattaatttgctttgcagtgttcctcgtggggattgtgtgttctttccttttgtgttgcgccggagtgttttccaaggaacaagacggagactaatgcgagaaggaaacatctatatggcagaaaaaaactcttttatgaaatattaaaataatttttaatttttcacatttataatttctcagtttaaaaatttgttggagttgttgttaactactataaaaactcgttttaaaaattctataataactagttatctaatatctattagcaaaaataaacaacaaaatactatttgaatcaagtggtgtaatgaatttattatggttaagaactttttttttttgaatgggtaaaaaatacctcccaaaactttgaaaactttgtgggaacatcctcaatacaagaaatacgtgagaaatattgagaagcctttagatctagccacatgcaattttggccttgtgtaggagatatactacataaattcatgtatctcaactcatgaagattatacgcaagagccattgttttgataatacccatcgatcgaaagaaaaaaatcctacatacggaattttatttaactcgaaagatcaatgagagatatgaaattacaatacaaagatccttttttggtaggctaagggtcgaggtttccaaatggtacatagattataattaaggataaacatttgactacgtcagatgaaataataaatgttagattattgcatttgtgatattttatacaaaaacattaatttggagctaaagagatatatattaagaagtttttttttaattatttcatttatatatatatatatatatattgtaaataattgaaagtttaaaatttagttttaaacttataaaatttatatacaatatggaaatgaaatctgtatttttgaaactatttaagataaaccatataattactagaaattagcttttatagttttatggatgaaacttttactatgtggggtgatttgatagaaattaattagattattgcattaagaatgatttttgatacaaatagcttaactaatttaaaaaatctatattttaagtgacattttaattaatttaatttatatattcaataaaacaattccaagaattgagagacaataaattttaattttaaaattcataaaaaactatatatggaaaggaaatctgtatttgtaatattatgtaaatatgtattagcttttatagtaaacttttgaagaatatcaattcctttaacaaaattttaataaattaactcaaaactttaatgtgctttgtgtgtttattgcaattgatacacatcatggatactcaattattgctagacataattgcaataaattttgattcttaaaaccatgcatgcagaagcagatgtcctatatataataaatgaatgttataagaagagagatagctaggcaggaatctttggacatataatagacttttgtacattaaatacatttgtgatctttttatacaaactctattagttgtaaatcttaaaatttattataagagattttgttattattttctttcatgtatatattaaaattttaaatttctaatcattgagggattaattttattcttacaaatttatataaatttgggaaagaattttaaattattatgtttatggaattcaattggaaacctaaatgtaaaaatgaaattatatttgtaaacttatttaagaagaaaagtgaatttctaaaaactagcttaattttatagttatgttttgatgaaaatctgattcctttatcgaaaatttaagaaattaattcaaaagtttaatgtgctttgtgttttatggatatacaccatgcgtactcaattactgtaggatacaatatcaaattatcaatttattgtgattctttcaaccatacaaaaattcctataaaaatccaatgtactgaatatataaataaatgttgtaagaagggacagaagcaagaaacgctttaccaacttcaaactccatttctaaccaaaaacttttagttgttttacaaattacaatggaactgattatagtggcattagttatttttgtagtgatactcgtggcgattgtgggttctttctatttttgttgccccggattgtgttgttccaagaaagaagaaggagattaatgcgagaaggagaagtctatatggctgaagaaatctcttttatgaaatatttaaataaattttaatttgtgacatttgttttttaatttctcagtttaataaattgttggagattgtgaactatgaaaaaaaaaaagcaaataaaaaaaactagttttcaaaattctataataactagttatctaatatctactagcaaaaaaaacaaaaataatatatgcattaactggtgtaatgactttagaatggttaagaactttttcttcttttttaaaatggttaaaaaatacttctcgaaactttgaagcctttgtgggaacatcttcattacaaaaaatacgtgagaggtattgagaagcctttacatctagccacatgtaattatggctttgtgtgggagatatactacatagcttcatgtacctcaactcatgaagattataggcaagaaaagttatgatgatacctatcgatcgaaagaaaagttaccctacatacggaatttcattttactcgaaaagagttatgaatgatacgaaattacaaaatagaggtccttctttggtatacccaaaaagagtcaaagttgccaaatgatacatagaacatagttaaggataaacatttgactatgtcggatgaaataataaacgctagattattgcatttgtgatattttaaacaaaaatgatttaatttggagctaaagagatatattttaagaagttttttttaatattattatttcattaataaatatatatatatatattgtaaataattgagagtttaaaatatagttttaaacttaaaatttttatgtacaatatggaaatgaaatctgtatttttgaaactatttaagataaaccatatatttactagaaattagcttttataattttatggttgaaacttttactatgtagggtgatttgataaacattaattagattattgcattcagaatgatttttgatacaaatagcttaattaatttaaacaattctatatttttaagagacattttaattaatttaatttaaatattcaataaaaaaattccaagaattgagagactaaaagtttttattttcaattcataaaaactatttatggaaaggaaatctgtatttgtaaaattatgtaaatatgtattagcttttatagtaaacttttaaagaatatcagattcctttaaaaaaaaattcataaattaactcaaaattttaatgtgcttcgtgtgtttcttgcaattgatacacatcatggatactcaattactgctagacataattgcaataaattttgattctttaaaccatgcatgcagaagaagaagtcatatatatataataaatgaatgttataagaaaagagatagctagggaggaatctttggacatataatagacttttgtacattaaatacatttttgatctttttatacaaactctattagctgtaaatcttaaaatttattataagagattttgttgttattttctttcatgtatacattaagattttaaatttctaatcattgagggattaaattgtttcttacaaatttatataattttgggaaagaattttaaattattatgtgatggaattcaattggaaacctcaatgtaaaaataaaattaaactaatttaagaagaaaggtgaattgctaaaaactagcttgattttatagttatgtttttatgaaaatctgattcctttattgaaaatttaagaaattaattcaaaaatttaatgtgctttgtgttttatggataaacatcatgcgtacccaattactgtaggacacaatatcaaattatcaattcatcgtgattctttcaaccatacaacaattcctataaaaatccaatgtactgtatatataaataaatgtggtaagaagggatagaagcaagaaacgttttaccaacttcaaactccatttttagccgaaaacttttagttgttttacaaattacaatggaactcattatagtggcattagttatttttgtagtgatactcgtggcgattgtgtgttctttctatttttgttgccccggagtgtgttgttccaagaaacaagaaggagattaatgcgagaaggaggcatctatatggctgaagaaatatcttttatgaaaaatttaaatagagttttaattttgtgacttttcagtataataaattgttggaggttgtgaactatgataataaaaaacaaaaaaaaactagtttttaaaattgtataataactaattatctaatatctactagcaaaaagaaacgaaaaatactatatggatcaactggtgtaatgactttagaatggttaagacttaagaatttttgtttttttttaatggttaaaaatacctccggaaactctgaaggctttgtgagaacatcttcaatacaagaaatacatgagatatattgagaagctatgatatgattatgaataactcttggacatgtattcattgttttaggcgtatctgctaaatgacgaagaatcaatgcacgaaacaacttggagaactcctcgaagaagaatcaaatcaaacaaatatcagatgaaggagttattcaatttacaaatcaggtgatctccagtttaccggattcagacatgcgcgcattcaacgaaagattccgattataccagaatgaattaagctacaaaccgaattagtctataatcttgatctattagagatgccccaaaaagtggaataagcccaaaaacaatcaagaaagatctattttcatccacaacaaagactgcataattttgtccatttctctctcttacatacactttagagattgaattgcatctcccaaaatgctttgcatgttgaactattattatggacgtttttttgatgtattttccctttatataatgagtttatctcatgaataataaaataagcctttttgatatttttggaatcttttgagagtgtttattatttcttgtcagtggttgtcaatggtgcgtaatattcattggtttggttaatggtgtgtaatatcaatgcacgatccgactaattgcgtcatatccaaggggtcttgtagagagtgattctcatttcatcctcgaattcgtcttagtgtgtcatatctaagggattcaagttcggtaaattaagagtcttccgcagctcttgtgtgaccattcgctccaccattcttatctttcgtagtttaactttttcatttagaatctaaaaaatatctttacaccgatttagagtgccgactctttgaaagattctcatcactttagatctagccatatgcaattgtggccttgtgtgggagatatactacatagcttcatgtacctcaactcatgaagattatatatgcaagagccatattaaccatcaatcgaaagaaaagctatcttacatacaaaattttattttacttgaaagagccatgagtgatacgaaattagaaaacaaagatcttttttagtatgcccaaaaaaggtcgaggttgccaaatagtcatagatcaaagttaaagataaacatttgactatgttattcgggagcttgtggtctagtggtaaggagacgggcttgggacgctaacacgtttcaagtttaatttacttgctgagtgaaaattcaacacattttcctggacacccgcatggatatgggctcatacttacggccgagttgaatatctggagataaggattatctatgggctgcacctccctcaaagattagtatggaccttccataggttaggatctactcggagttaacaaaaaaaaacacgtttgactatttcagataaaataataaacaatatattactttatttataatcttttataaaaaaatagactaaatttaaagctaaagggatataatacaagaagtttttttctattatttcatttatatatgttgtaaaattttcaataattaaatgtttgaaatttagtttcaaacttagaaaatatatactcatacccaaaaaagaattaaaaatatatatatacaatttggaaatgaaatatgtatttttaaaactatagctctatgaattaaataatttgactgtgggatgatttggtaaacattaattagattatcgcattaatagtgaatttttaatacgatagcttcattaattaaaaagttcaatctaattttttaagagatctttgtaattaacttcatttatgtattcactaaaaattaccaagaattgagagtatataaatttaatttttaaagtgcatttaaaacaaaactatttatggaaaggatctatatctttgtaaaaatatttaaatatatattagcttttctcattttatagttttattagattccttttaattttttttaataaattaactcaaaagtttaatatgcgttgtgtgtttatttgatacacattatgcatacccaattactactagacacaattgcaataaatcgcgtttctttcaaccatgcatgcagaagaagaagttctatatataaataataaatgttataggaagaaagataagcaggaaacattggacatacaatagacttcaatatccatctctaaccgaaaaaagaagagatctcttgaagttattttacaatggaaacctggattgaaatcataataggcattgtcattgcactggtcctcgcggtgattgtgtttggtttccttaagttgctcggcgttaagttctccaagaaaacaacgacaacaaccgatgcgtgaagcaaaacatcttatttgggaagttgttgactataataaaaactagtcctgcaaattatgtagatataatcatataagttataattaagaaataaagtaaattaccaaactatatatttaaaatatatatacattgtacatagtggttactgtgtatgcatactatttttctcaataagatgattagaattacttatggctttcctaaaaaaagaaaaaaccgtatctcccgcatttgccaaaaaaacgactcgcaatcatcttaaaataaaattgaagaaattgcattgaaaccaccaaataagggaaaatcttctggctatccgttgactgccaacttctacatccaataatcatccgccacgtagcttttatatatagaagtttaaatgtttgattggttatattgtaagtgccatttacagccatattatttttgtaaagaccaaattgtttttaatcatgttgtagttttgtttttaaagttacaaccaaaaaaataaaaaatatttttgttttgaccgtaaatctttaattttctatatcctattattttgtgttgtaggttgttctttttctttcttctctaattttttgtcacgattattttcaactaataatctaaaatatagttatatgaataacacagaaagtattttatacatttagataaatgatttatatatttatatagattccatttacctagatgtgcataattcaatttttatttttattatataattgtttttaaataattttactaattatgatatataattttattattttaaaaatataatttataaatacaaaaatacaaatttaaatatttattaatcataatttttagttacaattaataaatttatttataaaatcctatattctttaaatctacaaagtcaaaaagttatagccaagatttacaatcatatttaaatctaaagcttacacacttatagccaatattctacagcaaataatctacatctatagtctaaccaatcatccactaaattattatgtgatggaattcaattggaaatctaaatttaaaaatgaaattatatttgtaaacttatttaagaagaaaggtgaattgctaaaaaatagcttaattttcttgttatgttttgatgaaaatctgtttccttttacttaaattaattcaaaagattaatgtgctttgagttttatggataaacatcatgcgtacccaattattgtaagacacaatatcaaattatcaattaattgtgattctttcaattaattacctataaaatccactttgttgtatatataaataaatgttgtaagaagagatagaaacaggaaacgttttgccaacttcaaactccgtttctaacaaaaaaaaaacgtgatatcttttagttgttttacaaattacaatggacctatggattatagtgatattagttattgttgcagtgttattcgtggcgattgggtgtactatcagttgttgttgccccagagtgtgttccaatgaagaagacggagactaatgcgagaaggacgcatcaagcatctatatggcaaaagaaatctcttttatgaaatatttaaataaattttaatttgtaacttctcaatttaataaattgttggaggttgttaactatgatataaaaaaaaagctaatttttcaaattttataataacttcgtagttatctaatatcaactagcaaaaataaacgaaaaatactatatgaatcaactagtgtaatgactttagaatagttaagaatttttttttttttttttaatagttaagaaatacctcccaaaattctgaatgttttgtatgaacatcctcaatacaagaaatacgcgagagatattaataagcctttggatctaggcacatgcaattgtggccttatgtgggagatatactacataatttcatgtacctcaactaatgaagattataggcaagagccattgttttgatagtacccatcgatcgaaataaaaagtaccctacatacggaatttattttacttgaaagagcaatgagtgatacgaaattacaaaacaaaggtctttctttggtatgcccaaaaagggtagaggttgccaaatggtcatagatgatagttaactataaccatttgaatatgttattcggggctttgcggcctagtggtaaggagacgggcttgggaagctaatacgttccaagttcgatctacctgatgcgcgaaactccaaacacatttttttggataggaaccatctatgggatccatctccctcaaaagttagactggacccctccataggactcgaatctactttgaattaaaaaaaaatgattatgttagatgaaataataaacaatagattattgcatttatgatatcttataaaatagactaaatctataggtaaagagatatattttaagaagtttttttaaaaattatttcatatataaatatggtaaagtttttaataattaagagtttgaaatttagtttcaatcttagaaaatatatactcatacccaaaaaaaacttaaaaatatatatatacaatatggaaatgaaatatgtatttttaaacctatagctttgtgaattaaataatttgactgtgggaggatttggttaacattttgtttttttgaaacattaattagattattgcattaatagtgatttttaaatacaaatagcttaattaattaaaaagtttactctaatttttaagagacctttgtaattaatttcatttatgtattcaataaaactttccaagaatttagagtctataaatttaatttttaaaatgcattttttgtaactatttctggaaaggaaatctgtctttgtaaaataattaaatatatattataataaacttttaaagaaaatcagattcctttaagaaaaatttaagaatttaactcaaaagtttaatgtgctttgtgtgtttattgatacacatcatggatactcaattactgttagacacaattgcaataattgcgattctttaaaccatacatggagaagaagaagtcctatatataataaatgaatgttataagaagagagatagctaggcaggaatctttggacatataatagacttcaaactcaatttctaaccaaaaaacgagatctctttaagttattttacaatggaattgtggatcaacatcttattaggcattggcattgcactggtcctcggggtgattgtgtttagtttccttaagttgctcggcgttaagttctccaaggaaaaaacgacaccaaccgatgtgtgaagcaaaacatcttatttgggaagttgttgactacaataaaaactagtcctgcaaattatgtagatataatcatataatttataattaagaaataaagtaaattacccaactatatatttaagatatatatacattatacatagtggttactgtatatgcaaactattttgctcaataagatgattagagatttacttttggctttccctaaacaaaaaaaccgtatatcccgcgtttgccagaaaaaaaacgactcaaaatcagcttaaaatagaattgaagaaattgcattgaaaccaccaaataagggaaaatcttctggctatcctttgacttccaacttctacatccaataatcatccgccacgtagcttttatgcatatgtaaaaaagaaataggcaagaaaaaaagagagcctttgtgatcgaacaaagaggacaacatttgagatttctttcttcttacgttacctctctcttaaacaaaacaagaaacaagataacaacacaaataagtttgagaaaaaaactttttgatttgaagatagtaacattttgtgtagttttcttaaccaggtatcattttcttcttctccaaacagaaatagatgtgtgtgttttttatcttatcgtttgtttatatattcctctcaaatttgcagaaactcatagctcttggacatctatatgaatctatttctttgttaaatagggttttatctactccacaaacatgtaagttcttttttatttttcttaagattcttatcgcaataggattcacgcaaaaacaatttaattctttggccaatctatgcattaccgaaagttgtatccctaagagaagaagaatctcaaagaaaaaatattaatttatgaaaaaatgtttattttttttccttggtgtgcaagctaggtatgcatctgcaagttgaatatgacctcacctatgaagggtctattaaaaggtttgaggtacattgctcgtatcttcggtgagtttatttgttctcgaaacaaagatcatatatgtctatacaattaccaaaaatcagattcttaaatcttataaaaaaaaattgttgtagaggatgagaaggaaccagagatgcagattggaataccaaccgatgtcaaacatgttgctcatataggatgggaagggccctcagctaccaccccaagctgggtatatccttctctcaatatttttataacatattctacatatcttttgtttgtggattaggtcaaatattttcatgggaatatgcagatgcatgatttcaagcctaccgatcaaacgaagactgagacgaaaggaacatctaacaaaaaacctgggagttccggggagaaacataggaagggaagacgtaaaacatcaacaggaaacaactcacctacagaatctccatcaagggtaggaggatcagtaaggccatcaaaacgcaacacggggaaacaaagagagcagaacacgggttcagggtcagagtcaggttcaggattagagttacctcaacagactgatcagtttgttgtaccaaaacaatcaaagcaaaaaaagtcaaaaggatcagcaacaggaggaggcgaacctcctccatctaatgaaccatcaaacaagaaagaaacagatatatctgtgagagcggtttacccttgtgcgggtcttggaagttctacaggaagatgaaagatgaggaacaaagaaagagagtgttatattttcaagattagactagagtgtggtggtggtggtggtattgtttcttctcatgattgatctacacactttagtcttttctctcccttttgttggaaatgcctttgcattacaagaccaatgttttatatcgcgtcgagaaaagagaaccctttgatgattgtgaaccagggatgtgaaatatatgcttgcttaacactcttaaattattctcaaggaatctttcgattgtgttcttaggattcaattagtaatagacttgagtgtgtttgacatatctattgggcttcgattgtttgttgcgtttacatgttataataggtttttatttcttggttcaaacgaaaccaaaacttaaaagtaaatcatttttttctactgaattttgtttttgatgcttttgatttcatttgatcacttcaactttagttccagggtcttgacgatttaattcaaaaagcaaaaaaatcaataggaaacaaaaactcataaaggactttgacatacagatgggcccattgtttatgaccaatccttatactatatatgggccttattagttaaacctaaggcccaaagtcagattagggttttcagaaagtgtactataaattcttcttctttaaacaacttcgtctagtggaacgacgacggcacaaaagcttcaccggagatcagagacgcgaaaatggtaaattgtttcttctctttcgatgtgattttggaatttgtaaagttcgttgactttgaagaacaacaatacatggttgattgatttattgtattgtttttcagatctatcataaaagttttcaatctaaatgatgtttgtattttgattaaccttaaaagtctcttgattttgtatgtgtgtgagtgattcatttttgattttatgaattttgaaggtgaacattccaaagacaaagaacacttactgtaagaacaaggaatgcaaaaagcatactttgcacaaggttacccaatacaagaagggtaaagacagtcttgctgctcaaggaaagcgtcgttatgaccgtaaacaatctggttatggtggtcagactaagcctgtcttccacaaaaaggtaacattgattatcatgcattgattgttttttcagtttgaattaggtctagttagttgaaatgaggtagttttaaggaaccatttatagtagaattttggaagtgagctgtgaggaaacagacattccaatagtctcagttttggactgagatacatcttgtgaatcttgttaacaggctaagaccacgaagaagattgttttgaggcttcagtgtcaaagctgcaagcacttttcgcagcgtcctatcaaggtgcatagaacatagatcagttcattataccggatttgtaacttggtaatttgcttacattgtgttggtttgttgtttatttcagaggtgcaagcatttcgagatcggtggtgacaagaagggaaagggaacatctctgttttaagttggtttcatcttattttctgcgatttttgtacttgctggatttggaatccatttgttttagctctctcgtataagattgtctcatctttgcttgttaactctatattttgaatcatcaagatatggttttgctgttaatcattgaccttcgatatttttttgccaatccgttctctctaccaacctaagaaaaaatcactaatatctcacattagagggtgcaaaatttggaaggtctatatcattgtccaattttctgagtcatacaaattctttcatatgattcattgaacaagacactcatttacttataaagcgcatttatatgttcacatgatttgtacaaaactcatgagactgcatcaagcagaaagtatttatttatctttacatgtcaaagctttgagaattaagcaatgacgaataccctaagttcacctctgtccccgcgagttatgcgcatggtatcatcaacataggtaacttcgaaatccccagttccagggtttgacgatggtctgaaactgtcgggaagcctcgggatatcaaacggaggaatctgcgacaagtttcccgatgtcttcacagttgttttctcaaatgttatcttgatcttgcaagtgcctgttttccccataaatgtcaaagatacagataagttattttgctcttacacaattcgataaacttaatgagagaaagggaaatgcaaacctaagagttcaaacttgtgtgccaatgtcgcagtggcttctaatggcggaaatggccaaggggctcctaattccacctctgctatgttatcaaaatctttgctaaacacatcaatccgttgaaacacctgttttaatgattcagaaacaagagataatattaaagaagtttgctttctaccgattcaggtatggttctttgccaaatttaaaccaaagaaagctagattctaagctcatcaccattcaaactcaaccaagaataaagatgattgactaagaccgtacacataaacttggcaatatagaaaaaaatgattaaggagtagatgacattgctagattctaagctcctcaccattcaagctcaacaaagactaccaatgatagaccagaccgtacacataaacttgacaatatagaaaaaagtttgctttcgagtataagatgacattaccaaattgtaacctcagaaagctagattcttagctcagccccattcaaactcaagcaagactattgatgatagactagaccatgcacataaactcctcaacaacttacccgaaaaaccgaatcttgacgggtaaaaacagagcaatgattcaagaattacctggccaagagtaacagggatcaaacgtccagtaggtagaccaggacggctaccacctaaagaccgagaagagaacgcactactatacaacagcctccatttcccttgaagcttatcaagatcatcggttaaatcaaccggtcccccagcagtttcaagttctttagcagccacttcagctctttctaaatcatcaacactcgccacaagtcctctgtttaatcccgaaactacactctgcaatttctcacaacacaacacatcacaaatcaaatctgaaaaatcttcccaaaattcactctataatcgaatcttaacagtaatataaaccctaattccaaagaaacgaaaccaatttcttataatttcaccgattggtttgaatcagactcacaagtaatttgagtttgagtaatgcaatttgcttgtcgtctcctcctgatccagatgatgatggtggtgggtcactttctccgccaatggatacttcaacgagagacgaattagcagcgaggtttctcttctccggtacagtgaaacccaaacgagacgattttggagtagttaagggagaaaaggagtatctgatggatggtggaggagaacggtggtcggaaagaagagctggtggtgaaggtagtagtgacgagaaagtagaagaagtcgccattgttgagaaggaaaaaaaaacgaagagagtgagataatttgtagagaagaagaagaagaagaagactttaattattatgtgatttgagaagcaccacgggttattagcgcgtatacgtgtgtgcgtaaacgaaattgcatattactttctgagtaaaatgatgtcgttttgtgccacaaaattttaatttgctttggttgtattattatggaccatatgcagtactttgattttaatctatgtagataatactagattaagacccacatatataaaattaaatattgattttattgatgtaaaacatataaatttcgaccatagacattgcccaattttttttctcctttttccatttaagtatggcccaataaagacccacatcgtatgttttgtcactcggaggcagcatgatccaatacttatatacaggtgtgtttttctcttttagtcatatgacattcatgccttccatttatttggatatcattttagaacaaatttttaggcttttagtagtatataaagtttgaaaataatgtaacttcatatccaatatatatttgtcttttgaatttcttttgcttagttggtatccattctagttgtctatattgagttaagtttttttgtttttttctgaaagaaaaaattaaacattcatcttggagattacgtgaacatttgccgtgttctctttatttggggaaatctcccagttttatggagacatttcatatttaatcaataaggtttggttgctatgttcttcttgtcttaagaaatcgtccaaattttgtggcatttaatggttggaactgcaaaattgtgtggctagaactgcaatttatgataagcttttagcagtttggttcgaaatatatgtttggtgaacaaaagatatttacagtatgagaatagtagctgatattaaagttaagaagagaacttggtactggagctataatggtcaagctaagacgatgtagatataattacaatttggaagaagaacaagttgaaatataagaatatagaattgcgaattgcgaataatgaaaagataactactgcaagagattaagaacagattatggataaccacttgtgtttatattaggcttgcattaaaagctttgatatgcttagttgacgtttttgtgcttagttctgccgttttctgtttgtgtccatgaatccacgtgttaaaccatctgctgtacaaggttttttagtctttcaatttcccaatttgtgttatttgcaacatgtaaatgctaatgacaagctacatgttaatgctggaaaagaaaagtagacgttagttcgaatggatctagatgattctatacgtactattcgatattcgatcttctatttttttcactatactcgaagacattggtgcaaattaaatattctaactagatgttggttgttaatttttctaattatttagtatttgttgcagtgtcccacgattacatgaagttatatagtaatttaataataaatatgataataaagatattgaaaacccctagtttatcactttattggttaaccaaaaattcattaatgattatacataaagaggtctttggttcgagtctcagatactacaatttattatcagatttgcagatttatggagacaagtgtataagaaatcttcaacgatatataattatagccatcattgaaattctccatcaaaagcataaaaaaaacgaaagaaatgccgtctctcgtgaatctaataaaggcgaaatgaactttttgtagcaaaattgtttatataacaaaaacatgataataaagataacttacgcataaaatatcggtagtttttagtatccgcgtatagtttacttaactaaaggaaatatggtattatgactttttaacacaagattttaactgggcagaaagtaacatgaacggaaaaggtctacaaagtggggttatcttgaaaatgccgtatataacctgttatcgctattttactttacattatcgcttaattaattaatgacaacttgtgacatctttaattgcgtccaacaacattttttttgacttttaaacaataagctataatgacattttatttttagaagctatacttacacagtgacacataataattcaactaaacaacccactgtacccgattgaatattttacaagccatgaaggttttaagaagattttgttgctgatgcctcggctagcttgaaaatgttttatggattttacgcaaacacgtcattttgacagtgttttagagatttgtttttgtctacaactaatatataattaagctttggagccattgaaaatatttggtcgataaataataatcacaaagtgtacctcaatcatagaaatggaatgctatggtccatataacttgaaatattgtagtcataaaattacgatatcacctaacggaaaatagtcttaacatttgaacataacatgtgttcagagaagttataaataagtgttcagagaagtgattttttatttctaagttataaataagtgtgaaaaagtaacttatgactaaaaaatattttgtgaactttttaatattattatttttgcaaaacaacgcactatatatgtacctcgtacactctaattagctcatccaccacggtaaaatttatttattattttgcattttttatttggttaagctgaaacatatcattatcaccaagcaattatatatgtaccgataacccatgctgaggaaattttctaaccaaacctttgggatcagaatatatattagtaaataatcatactttaacttagattacactaaaaactagttatcgttttagagttttttttgtctgacgagatctcggatgcttcgattacacctgacttgttagatgggatgcatgaccacattttggctaacatggcgtgcaaacgatgacgtggaggcaactgattggctccactgattcccacaaatttgttgcaaaatcaaaagtagggccagactaattatattatttttttgtggatgtctataatatgaaatttgaatcaatacgtaatttatcgattctttgtctaatcgatgtcaactaaatttaacaaattatctggaagtcactcaacattttccttgataatgctagtttcttcgaatcttaaatgaggcaacgcattgtccattgaaattttaagcatatagtgtatatatgtatttatttttctagcaaattcaaaacggcctgggatcgtttggtttgtaatcaatatatgggttttttttggtcaacaatcaataattagtatttttgagaattcatgaaatactggatgagtaaatgagataatttttatggatgatcactagcacatggttgctaaccagtgaagcacctaaaaaatcactgcaaaaaagtttgtaatcaatttcgttgcagctaagcaacatttatgactaatttgagtaaatattaattgacgatcccatgaatttcacctaattgacgagtccctagatttgttttagagtaaattttacaacttcatatactttacattataattaacaaactaaaaaactcgtaaaccaaataagactttgtctaatggtccaagcatgacctctccaaagatataatatgttttgatatatacgtgataaccgatcagatgttgtatatacatattaatgtgtattaatttcttcatataatatttacaaatttttgtgagaagatatcaagtacacgtatatcgaataagaaaagctagattgtgtaaaacgttacggggcttgtgcattaactcacaagttggctatcacaagtttcaaattgtggtgtttagagcatcgcagttgtcaaacaaaaaaaaaaaaaaaaaaagaaagagtatcacacgtgattgttttccataactatgagaacttttctgactattttcttcttttgtgcctttgttatgtttcttcaatcattacttaattattaattactaatcgattttcgttgcctgtagttttcacatgttgtaatctagaaaactgaaaaagactttccccataatagtctctgctaactacatactagtccctatattttgcaattttaagtgtttttaaccactatcttagagactctaaacatgaggaccctaaaaaataaccatcatcttaaattgtacgtaagaaatatattcaatctacatcagatgataccaataaaattcggcatataagtagaatttgaaagaaacaacaacgtgggtagatatgcaccatttacaacaacaaaaaagaaaaatcaattttggtccaactttttcatatacatttaaattgtcaattatcatcataattagtaatacgacaaactgtcgtataaactagaaaaatacatacatctactatctaaaacgacagataaaaatacgtaatcatcaaaaagagttaaaaacaagttttggggttctcttagcaattttgttttatatgtctatttttatgtaacgcgacagctgtaacgttgtgtctatatatatactaacagagtttgtgcttcgaaatcttaagaactttcccagttttgttttttaatcatatcaaagcaaactgtgtgatggataagtacaaagtcgccggaaaatttggtctcccggacatcacggtggcagagatggaatctttagctagcttttgtgaagctgtcttgccttcagtgcagccaccgccggaagagctttccggtgaaggtgataaccatcggaacaaagaggctctccggtcattttactcaacttctgggtctaaaactcctgtccttcgccaggttcacacactttttctttatattcatcaaatgatctgtttttttaacaaaatgctaaagttttgacactttcaaacaaaaaaacacaaatcaagaacgtgtgatatttgaagatttgttttgatttgttcgattagttaaaaggattcgtattgatcgagttccaataaaatccttgtggttctcttttgacttctatagaccttttaaatgacaaaaatatctagctctttttgtttttttaacgtgaatattattagtctaggtttcggtctaaaattaattgcggttattaaaaagaccttaaggttttgagtaaaaagtgaaagatttgttaatggatgcagagcattgagctggtcacgaaacgagggacaatagaagcttatattgctactaggcttatattgttcttgcttgctactcggcttgggacgcttctcatttgtggaaccgagtgtttggtctcaagatggccttttgtcgagaaatttagtgagctctcgttggagaagagagaaagagtacttcagaaacaattcaagaattggattctgactccaattagagctgcttttgtctacatcaaagttgcattcctcttctgtttcttctcccgggtatgtctcaaattctctctgttttctccaaaccttatctcaaccacatagattatgttgttctgtccggataaaacagtctagtacaaatccaaataatcgaaaacagaatcgcatggtttaaattcatttactttctatataatccaaaaattgattacaaatagagccaaaaaaaactagaaaacgtatcagttttattgttttctaaattaatgatgatctctaaggaaaaaatcatccaaattcatatatactaaaattagaaaatcttaaacctgaaaccgtacgtaacgtattcatatgagatttgtttataactaaaatttactattttactatacataaacaatttgatcccattattaaaaactttgatcttaaatgagtaccaagcgatttaactagatcattttctgatttggttacaataaaccgatccaaaattttgagaatcgtgaactaaaccaaaatccggattcagagcctatattatatatgttaactctgtcgtaaaaacagagctacttatagaaaatgttcaagaatttatggatatgtcgtttcttttgtgtaggtgaatccaaatggcgaaaacccggcatgggaagccatagggtatcgtgttaaccccgatgagaacaaaccttctgaaactcataacgaaagaccacttgagaaagggatagtggagacgatggaagaaacagagcagactcttcttgaatcacttgctcataaaggcctagaagcggttcttgacacggagcatgatgcgatcagaataaaatgtgatgttgtggtcgtcgggtctggttcaggaggaggcgtagcagcttctgttctagcgaaatctggtttaaaagtggttgttcttgaaaaaggaagctactttacgccttctgaacatcgtcctttcgaaggtcctggcttggataaactctacgagaatggagggattctcccgagtgttgatgggagttttatggtgttggctggagcaactgtaggtggtggatctgctgtgaactggtctgcgtgtatcaaaaccccgaagtcggttcttcaagaatggtcagaggatcaaaatatacctcttttcggtactaaagaatatctaacggctatggaagttgtgtggaagaggatgggtgtcacggagaaatgtgaactggagagttttcagaatcagattctgagaaaaggttgcgaaaatctcgggttcaatgttgaaaacgtgccaagaaactcctcggagagtcattactgtggatcttgcgggtatggatgtagacaaggagacaagaaaggaagtgaccggacttggcttgtcgatgcggtggggcacggtgccgtgattcttactggatgtaaagcggagagattcatactcgaaaagaacggtagtaacaaaggaggcaagcaaatgaaatgtttgggagtgatggctaaatctttaaacggaaacatagcaaagatgttaaagattgaagctaaagtaacggtttcagcagggggtgctcttttaacacctccgttgatgatatctagcgggttgagaaaccgaaacatcggtaaaaaccttcacttacaccctgttttaatggcgtggggttacttcccggacaaggaatcttctaacatcagtttcaagggaaattcatatgaaggcgggatcataacatcagtgagcaaagtgttatcagaagattctgaagtcagagcaatcatagagacaccgcaactaggaccaggttcgttctccgttttaactccttggacctctgggcttgacatgaagaaaagaatggctagatactcaagaaccgcgagtctcataaccatagttagagaccgcgggtcaggagaagttaaaaccgaaggcagaataaactacaccgtggacaaaaccgacagagataatctcaaagctgggcttagagagtcgctaaggatactaatagcagctggagcagaggaagtgggaactcacagaagcgacgggcagagactaatatgcaaaggtgtcaatgagaattcgatccaagagtttttagactcggtgagtacagaggaaggagcaaagggaatgactgagaaatggaacgtttatagctcagctcatcagatgggaagctgtagaattggagaaaatgaaaaagaaggtgcaatagatttgaatggagagagttgggaagcagagaagttgtttgtgtgcgatgcaagtgcgttgcctagtgctgttggtgttaaccctatgatcacagtcatgtctacggcttattgtatctccacaagaatcgctaagtccatgaccactggtttatctcattgaactaaaataacgtatactttctattcatcctaatcaaatttatgtgtaaccaacatgataattcatagttaaagactcttctattgatcatgtctactaataaaatccatgttttggaaacgttatatttattcatctaattagagtgttataaaatattggactaatcaagttgcagtgaacttggaacataagagcacacaagtggtcggagattttggtttggagattctccaagatccacttcttcaaggatccatcctctccaacgatgtaagctgcattgcacatcaactacttctttttgcctttatcaaaaaccactgcaactttcttctcctcatcaatgaagaaacttgcatcactaaacgaaaacatagagtaacggccggtgagttctctcatatccactgataagaagaacttgctgctccatgacaccgtgttgggctcaatcttagttgtaacccagatctccatctgtaatgtatccatacgctgaaataacaccgcaagctgctcatctctaacattagataataacagagaactcttgaagataccactcaaagggcggcgaaggcaaaccgcggcccaaatgtctcccttgtgaaatcaaaacagagtaagaaactatggtctccttgtcttgggatttctgaatatgcctcttcagcaagccaatatgtatttcctttgagagaggcaccagacacaaaacggttatagtaacctatgttccagtctcgagattgaccctccatgagtcagagttaaagtcgtagattttgaactcagcagaagtggaggagacataatcaaacatcataccaaaactcaagattttgtgggatttggtactgctattgtatccgagagcatacgaatatgcatctaatctctgaggattatttgtagtctcgatccaccgggtttgtccactatacgggttacaaaccacaagcctagggttgtctttcatgatgcataacaataaaccgtcgcagtgaaagacgtgacggacgtaaatttgatctgaagcgtcggggaaaagaagttcacgttcacgctttatacacaattcaacgttgttctgaagatttatgcgcatcaaataaaccctaaaatccatcatcatgaccaccttatactctcttttctttgcagctacttttgcttgacaaacaaggtgcttctttgcaaagctcctacatctagataaagtgttccactttttgcaagtaaatcggagtcttcttagagatgtcatcggaaccctagaaagcacctcctccgccatattccttggaagatccgataaatctcttggaagattggacatcttcgtattcaacgagcaaactatagttaggttaaccttaaaaagaaaaacactttccttttcttctgtgaagttttacattttctttcgcctctgtaaaatgatatataagtaaaaagatactgaaaaaataagtaaaataacttgaggagatagtgacattctttattagaaaagaaagaagacttattgaacatagaacgcaaatcaaaatttacataaaccaatatatgaaattaaaattgtcttcttcgttttgcactttggagcgtttaacagttgtagaatccattagtctcccataattaatatgtttaaggataaatggttaggcaatttcgggagtttcccaaaggtttttctccgatatgactacatcgatgcaaaatccgaaatgcttcctctaaatacttgaaacttggttcgatccttaaaccctccaaatctttgtttaaccgtctgagtccctgtcaaggaacggtaacggtacggtcttcactgccctaaattggccgacattgtttaagtgctcattctccactctgtaaataccgaaagaaagattcatgttcaataacatccaaaatcaagttttaataaacctaggtgaagtttttttatttacctgtaaaagttccagtggcctcgacgaatgacttcaagtgacgccaagaagaaatctagcaaatgagactgaacaggactgaccctgaatctcataattgtctcgatccaagcaactcgcaacaccaaattcaacgcctgaacaactcaacatttagtcgaagatcataaattgtgaaacacgctatagttagttatgtaattggcttacaatggagaggtagtagaagttcttgttccggagaaccaaattgtctcttagccatggatttttcgatttagggtttagaagaccccaatccttgacaaagtcccagtataattggtaaatagttgccacaacggagcttacgagcaccattgttaaccacaagtcgttgttttctctcgcgtaggttatgcggactccggctgcaaccatcgctgacacgtattttcccatgttgattaggtgatcagggtttgattcgtcccaccatctccttacacactgtaaattaatgttcatagtgtcttagaagaaaggttttaagggacttgacaaaaaaaaaaaaaaaacagagaaaccctaagtgagcttacttgcatggcacgccagaagtagggtaagaaagaaatcaagtaagcaaattctctatagtatcttccgtttttgcaggtattgtattcgtgagttttgaagctttgagccaagaagtaacacccggttgtctcaaggtgtctcagcaatggaatctgaatagaacacgattaatgggttaattatcgactaaattagatgtcgtcaccatctattgaagttgcataacttagttttacctggctagtaagttgatcgcccatgaagaaatcaaccatcaaaacctaaatttaccgtacaagaaaaaaaaatcatgtttctgctatttcttgtgctgaaagtaaccaaataactccaattgttaccttgtagaacggtgagcaaacaatcttccgcaagatgcggatgaagcagaaccttgttggacggtagaatgtgttaaatgggcatatcaagacgcatatgaagatctgtagcatgcacaccgaaaaagaaattagcggtttcaaattgtgattgtgatagcgattgcgattgaaacgcgccatatgataattaatgaactaagtaatttgatttaccaggaggaggatgcctggaatggtgtctacttgactagctgagaaaccggaggctcggaggatgaggtggatgaccatagctgccacaactgaggtcatgaacgtggttcccatcagaaacgcgtctcggtaacgcaacgctgtgtttggtgcaaactcaaaaataaaggtgtagtttatcctcgtgttcttccacatgtatagattgcatccatacatgaacatgtgtagactcagcaacgcaaaaacgctgcgtttttaaaaaaaatcatcaaaatgtaagcgataaatggttaagtctcattggatggtgacagttttgttgaattgatcattaattcgtataattattcattacctgaaaacaggataaacagtctccagataagagacttgatcactagaagtgaagattccagaaagatgggctagtattatgtaaataacaaacaatgagatgaagcaacccgtaaataaccctgcatagatacacaatctcaatttgttaaaactctgatgaactgtttttttgaatggtatataaaggtataaagatagagaaaatgaaataagtaccaacaaagaaagtgaccatgtgagaatctttggtctggtggggtttcaagaatttcatggcctttttcctgtcattgttggcgaagtgctttgtgaatatggactccacttcgtccataagtcttaccaccttttttaattttaatcaaacaatcattttcaaacaatctttcaataaattattcatagcataagacctccttttattttaccttatcagagctgataaattgcgatctctttacgactttgagatacgttgatgatgcattctgaccagcaacctgatgattcatatatatatcaaagattcatcattaaccactatgattatctttttcattggtttatcaccgaaagtacaatctataaccaatttaccttatcgaatttcttcattatttttgtgaaagctatcatattcaacgagctgccataataaagccaacaaaagaattaaaaatgataagatcatcactaaataaataaatgatattgagtcattaatgaatatacctgtaagtctttaacaagccaagacctctatagagttcaacaaaggcacttcgtatcttcttctcggcgctttgaatatttttccagttggtgaaatctgatcttgggttgttaacgagctcttcccaaagaacagacatggcggtggcgatggatcttgcgataccaccttcggctccggccacagcgtcgggaatgtcgacgcggagagacatttttggtttgcctccttttgttttgctcctcgttgcagagtttatgaaactcacaccgttcctctctaaggcctctatgatttcatctgttcttgatgtttcactttgtatctcacttagttctcctggagaccctgaacaataagaaaaaataaattacaaataattatatattttgtgactattaacacaggtctaaagagaagaagaaaataaaaatttttgtcgacctagccatctattgtcggtccatttttattttcttactcacaaacattttgttcgtttgttagtagaatcgatttgtgttcttgtcggccattgaagatatgcatgtctacataataaaatctcaaaactctaaaattctttctttcacatatatgcagcttcgagttttgcatccacatgcaaaagatttgtatgcttaacaaatcttgtcattcagtagtagaatttctattgtgttataacaaaacatttgaatttttacttaaattatttcaaaaacgctaaattgtgcaatgatataaaaatattaaataacctacttttctttttactagccgcactacgtaaacggcctctaggacatgcacttttgtgatttctaatgggtgcaggccgcgtcatatctcaaatatactaatggttagcttttaataagagtcttaactcttaagtcaaaatgcagaatttactaaagtaccctaaatctgacctaacttgtagtaaaagcattaataagaagaagactaacctgcagagaaatcagagtttcgaacagaagatgagaaggagcgatgtgaatttgagccagacaagtttctcttcttccgatcacttaagatctgtttgagttctgcaagagtctccaactgtttcttcagaatctctcctctttccaaaaactctgtttctttgggcttgtgaaactgattcactttgtttagttcttcatccaatctagcgaaaaacactttaacctaaagtaacaataacaaaagcattcaaatacagatcaaacatttataaactcttaatggaagaaaaaagtagtctaaatttgaccatcttcattaggatttaggatgtggtcgtgttgtgcaatttaggctagcaataaaaccactatctctatgtgctatgttatttaattttctgcttttgaagcttaagaaaaaggaattcgtaatatagtaatagtgatgatgatattaataaagtcaaataaatgcaccaaataataggtccttatttcaagcttatacagtataagcaaaaagagtattaatatagctagttatatagaatcccaataataaataaaatttaagtttcagcttttatagaaaaataatatagggatgtaattatgtacctcgtcttcttcggaaaacaactgaacaagttcagtttggtaaatctcatcgacgtcatccccagtttctgagctacctcttcttctccttacctgttaattctcaaaaaaataaaataacatcatattaaatttcgttttattatttcaacaatttcattaaattcaacaaaccatgtaaacatcatatttatttattttgatatttttcttatacgtgtcattgaattgtatgttttcagggggtggtgacttgtgagtttgttatgtctttatataattttttccgtcacgatggtttcgtgagatatcacaatcttcacaaccgtttccgcatcttggctttcgtgagactatgaagaaaaacaaaccttgttttggaattagtgataccaaaatctaagatgtagagtaatagagtgtagtaagtaagcatttattttccgcaaaattatatattttgcagatttcagggttagttaatttataggatttttcttaattttggaaagcggtaggttactaggttaagatatgagctatagggtctaaatcatgtgtataatgattgttttcctgaacagaaatacttagatatgtatatattacatatttaatacacacacaaaaattaccaacttactctacaagaattaacatattagaactctaccaaatcatgtcaaatatgtaaaatttacatatctcgttaataaatattttgaaaagcaaatcaatattgtaagaaagtagaaaaacaagaaaaaggcagatttctcatgtagtactagacaaagcagaaataactggtaattctgacgcgtaagcaattacaaagacgtaagcatacacgaaactcaatacaaaacaatcatgggaccaaaaaagacgctaatttaaattaagttaacaacaaaatcactacattatcacaaataatctaaattctttatccgacaaactcaaaaacatacggtctcaccaattgtaatcttttagtccctaatggtatcatgttcaaactccgtaaaatgcatttagacataaagagctaggttacaaagttacacggaattttagactaatcattcaaaccgacaaaagaatcaagcatgtttttcttaagacaaaactaaaagtagttgattaattacctggagaatctctggtttttctgagttggaaaatagtttatcggagaaggtcctggccaatttgcgaaccgggtcgaaaagagatcgaccaaaatcggagtgatgaccaatggggtaatgagaagccggttttggtttacgagaggttttgattttcttgatttgtttctttagtaaacaatagttaacaaaggcctctttccactccggtataagttgtgcctctagctccttcgagaacttcaccatcgtcgcatataatttcttccgttttgattaattgctaatagtgacttggaagaaattataatgtgaggaaggagaaagacagagagagaggctaatgttacaagaggcattaagagggaaagaagaaagtttgtatatatagagagaaagacgtgtagagaaggtgaatttagtttcttctttttttttggtcactaactattttaatggaaataaatgatttttaacacacatgggaaggtgaatttaactttttgatgcgatttgttataagtaaagtaactcaaatgggaaaatggaaacttttgtttttttaatattaaatttcttggccattatgcttagcttaataacactcacttatattggtagatttgaatataacgcactcgttagtattggtgtgtgagtagtgcaactcgtcacgaatcccacacacaaacacacttctattgcattcaacaaggataatattaaaatttctcttgcagacattcttttccaaaaatagtatattttaaatccattttacaaataggctttatatataccatgatccgtgatgtaatattacgtgtgactagtagtccttacaaaaaaaaagtttaacgctttgtaattgttatgttaagcgagaccatatatatatatttttgtcaagttcgagaccatatttttagtttcggtattattgtatacatttaatcactaaaattgtaccatatatattttttatttgctcaaaaaatctttttttattaaagattaatatgagtttcgattgaatatattcttaacaaatatgaaagtattcctattacattcaaaaccatacagaagtttcgtaataattaataacacttttttgcgatttctttaaaattttttttaataaatttcaatttataaaagataaacatcttcacttttccatcaaatatatgttgtcaatctattttttgacaataaaaacaacagttataactaagtgaagttaaatatttctataatttgtaaataaactatttaaagtttaataaaaaataaatttaatttaatttaaatagaaaatatatttaatttcaataactgatttgaaagcaaactgttttcatctgcttaccctatatatggacagtttgcaaagaaaaaaagtgatgcaaactgatatagatttgtatcaatttcaatgaactaatgatgtcaaataaataaataacagattattttaattatatattttgtatcattaattatcagtaactaattcaaattaatatcatgtttctgatacaatttaattgatgcaacattttgttttagtgcaaattgatgattgatttttctattttcacatgttagcgtcatatagttgttagttcgttaccaaaagcatatctattcaatatgatatatagaaatgactaatatgacaactctgatgcaactagcggaacttatagacaagaaaaatgttggagtcggagctaagaaggctgatggaactaaagtctagaagaacatattcgtagtgctggttagaactcaaaatgtaaaaaaggggagaaaatgtttaaaaatgattttgaaaacaagcaagtaacaagaacaaaaaacgtttcaacggtactatctttctggtggatatctatttttccaaaatatgtcagaaatcggtcaaaactttccaaagaaatttgatctgtcgggaatttagtcgggattggctatatatacttggacaaagaatcatcaagatttggagaaaaaaacaaaatggaaaatatattaggagtttctgtacttgttttagaattgggaaaatgaaacaattcttttaatacgtgtatttttttagttatggtggaatataagttgaagtgactgaatctgaaacaaattgcatcttttttttccttattattaaaaaacacatttggatatagagaaaataagaaaaaacaaaattgagaactttctctttttttttttgttttttttaacaaaattgataactctttttctgaatctcatagtgtatggtctttctcactcgtaaggaaaagttgatataggaataatagaggctaaaactgaaagaattctgaacagtagcaagtgaatgtaaatttagaaacctattgtcacttatacgttaaaacttaaaacgtttaattttaaagaaaattagttgaaaacataactttaacttactttaactacatttttaaagttatgtaagtatttctatgaaaaaataagtaaaccgagtgtcgtgagccaatagctgtgagacggtacaactcgtggaagcatatgtggaacataaaaatagacgaacttgatctttgcttctttgttgaatcaattcatatcgtaacaggatagttcataagaactagagattgcaagaaccactagctacatttttttgtgtgtggattaataactatcattaacaaacaaataattagcaaccaattttcaatgagaacaaaaacggataaagaaaaatgactacaaaaaaaacaaatgatggcccttggagtttctcttaggatggcaattgtttctgatcatgcatatatcaccactttagtggtaatgccaaatataaactacgaaaaaaaggtttttcttttgttttctttttcccaaaacacaaagcatcttgctttgtatgaggaatcatctgaagagaatattccttaaatgggatcaaatgtccttgaccctcttgaatcgaaatctccaaaaggggtgaacagatttctttaaaaaaaatcaattagatatatatcaaaaaatttgaaagactcttcgatcatttatgttctgtatattttcaagaatcttttatttttggtggtttctcttcactccatcctaatattatttttgattagcatataatcttcgtatacataaattcttggtatacagaaaaattaattattgtaattgttatctatttggaaaattggggttattttactcacaaaaatgcaagtttcttcacaaaccaaaattgtaattttaggatgtgagttttactactagccatacaccatcatttgtgttcgactttgatactacttgatcacctccatatgtgttttttcacatcttccagctcattgtcaactcatgagtctcatcctcatcttatttttttgggaacagaaattgttaattgttatgtcgatatatatataattattcactcacacgataccaacatttgtttcctataagatatataagctggatacaaaatatctcccaatcgattaccttgatagtttaattccgtaccaccaactttaattgcttagaaactcatttttgaaatagcgttgataactctttttttttaagaaagcagtaaattatgtagtagccctgaatgctaattagagatattactgtcaaatggtatgtatatgagtattatgaaatgatatatagatataaaattataaactaaaagaatatatagcgtcataggcgcataaattctcctctcattattgcatatccaagtagtgttaattactcgctcatcttccacgagccacagcttgtccaaattctacggtttcccaacattcacaaataaaggtgcgagaagttatataggtcgcatttatgaaattttatatgatgtatttggttcataagaagaaaatgaatgttgttcaacaaaaaaaaaaaaaagaagaagaagaaaatgaattacaaacatcaaaccctgcctatttgggttgaacctattaaattagtttacgattttgagaaatggtaactagcatgttcttaaaatcatattaagtaaaaagtatgatacaaatcatgttaagtaaatatagcaaataaaaggactaaaatgttttgattgtcatgtgacgtggttttgtttgcactaattgtttctagattatatatgagtttctgtagaaccctgcttttaaaagtatattacatatatatccactgtccaatgatgaatttaggttcttagttatcaatgttaagaatctctttataagtccgtgtgttgcaatggttaaggcggataaattcgtttgtggactggactgttttttttatttatcatttataaatataattcatagtggtctggactcaaaaaataaataaaagataaccgttgcgaccaatcacatattacttttacatataaatagagttggtccgcatcggtttgttgtccatccttaaggtttagcccgttttattttaaaggcggacaacaaactggtgcagaacaactttatttgtatgtaaaagtggttcatggttggtccgcattgttttttttttttagtctacaataatacggatacaatttgtgaatgataaataaaaaacggtttataaaatcattcattcatatcttaaaaatagagcagactaaattactaacggatttgtacaatagaaaacatggcttcacaaactaagatttcttatgaaacatttcatataaaatcattcacgtttttttcttctgagatgcaaaaaaagtttgagtttcgttatttataaactaaaagacttaataatcgtataaaagtttgagtttcgttatttataaacatttcatataaaataaggtttctaattaataatttgaattttttgttggagtacccaatcgtgatgggactagttagtaactttatcgcaagatttgctaatggaagttcatacctattgattcaactaatcaaaacaattcaactaaacccactactataccttttttgcacgtataagtagctcctacgtatacgtgccacaattatttttaggtgaagataatatggaaacttgatagaagatctccaatttggaaaattggaaataacagccacagcgtataagaatgtatgaatacttaatattttaagcaagaatcaatagggtctaaaactttgatagttgctactaactttcaaatggaaaagtggtgggagcagccacggaagcattaagagtatatcataaaatggaaattggaatcaatgtggaatgacaaaattagtgaattaattaggcgtactgataagatttatttattaagcttctttgtgttagttctcaagcgctttaatgttgaaccaaggtattcaaacatctctcatgtatcccagtttcgttctctattagtcttgcactcttgctctctgaattggttccaactttgaaagctattctctacatacgtgatacgtggttgaacgctgatgaaattgactcgaactatgagaagcacaaatattttccaagatcgaccaaaaatccccaaatccacgttttagtaatgtaataattttagtaaaacaacgtcgcttgataatcgtatagtgggttagacttagtatgaacaatatagtaatctaccgaagtacgtataaaccaaaacatcacttatcaatcactaactcatcttcatcacctaacccaagattcaacaatgtaatctacccacgaccacgaatcatgatcacaaagtcaaaacaaattaacaaacaataaatataaagactataaagaagtcaattaaagtaatatttatgacaataattctttggttatttaatgaaagtgaagaaaacttcatcaatatagaagataaaaaatatcataaaaatcgaacttaagtttaacaagatacataattggttcgaactggttcaaccaagtcgagttgaagaaaatttgctaaagttttggtggagatccgtcaatcatttgatggatgtctaactgatcagtaatcactaaaattccagaaaatttgtattctgcttgagtctaatcgacaagaatagagatttggccaatttagagatcacttgatctttcggatgatcttctcgggactgaccaattacttgggttccaacttccaaaggaaaggagttttgttctaagctgatgggtgaccgaccgtctacttcatttcttccctaattctcgattcatttcttcatgcaacaagatagtttattgtcattaaaccgctcattatatatatttgaaccactacttgaaatgactttaaaccattgtcaaatgactcagttaaccgatcttgagttcatatagatatgtcatggatgtatcgtcccaacaacaataaataagtgtatatatgcattaccatctaagcaactgatttgacttacacggcttcacaagtaatttagccacatttttagaagttctaaccaactcatcaattccttaacatgagatacttaattatatgattttggcggaacatgacttaatgcagtatcaatgcctatgcttgcatgtaaagaaaatgaattataaattacattgaatcccaacattatgatgcggctgtattacaaaagttgtgattcctcgtatgctcttagaatatatgaacctttgttttcttcactatcagatccagtgtgcttttggaatctcgaatccctcgttagtcggtacttataaatttataatcaataaacacttatcatattgctgatatgcgaaatattataaagatatcagtatattaattatcacaaattgtgcacatatatataggtaaaaccatggccaagtcgtaagcaaaataaagaaaattaggtattgtggtctagttgtcctacacatggcactgaaaaaataatgcatctactgagattttgatgatgcaaaattaacaagccattttggggaaaatataaaaaggggttttgtactctttccttttattttcttgtattatgaatcgcattaatgtgcttaaatgacgttgtaatagtccactccataaatttttatttgtttatgtatgtttgattctagtccactagatgttttttttttcaaatcctaaatctgagtcaccaatatccgtagtggatttgtaggtactgtcgagaatcttgtatcacagcttcgagtcaaatagatggagtatgtactttatactgaagtagttttcgaaagacaacaaatgtaaaagtttaactagttcaactttagtgtgtagaactgatcataattcaacacatttttttcatctttcgaatgatcaaaattttctacttgcaacacctttttagttattaaaaatatcatgtaaaatgatattaaaaatattaataataatagacgaaaatttaagttaaatatcagtttttatataaaaaaaaaaaaaaaagatcataatgaaaagtgtaagagatataatatcatatagcccttcaaatttgcattagaaaacaagggaagtcaaaaacattgttttagcggattcaaagaataatgagctgaattggccaccaaatgtgttcatacacttgcaattgattctcctaagttatactttcaagaaagatacgaaaggaaaataaaggcataactgtcagaattcaaaagcagaagacaagtattccaactatttctcagctctctcttgaagagagtctcttctgatgccaaagtgaattatttggtataaaaaatcatcagtatttgcatatcccaccactctccttgtcccattatatcaatatatatcctctattgctaaaagttccagaaaattgatacatttgcgatttgatttaaacgggtgatcaattatcttgaggttctatattattgttttatatattaatatatttatttacagaatattaatattttatctatctttttatgaatacaaatttacactagtttttatttaccaagttaaattttctttcttattcatctaacgaaaatttacttttcgtaacatttgaaatttaccgagattagtactcagtttttcgatgagctgactaattgacaagtttagtcgaaaaaggatcagtttgatgagtgataacattcggtaagcaccttacttaaaatttcctcttttattagctatgctaaatgattggattgttttctttagagatgagccaaaagggacacttcatctaccaaaaccattaagtctttggagatcatgctgagccaaaagcgaagacacttcatatattttttgcctacggaatagagtcttgaatcaagccataaacccatcccttttcagtttttacgttttgtttccattttattttactgtagataacatatttgttgactaataattttaacattcaaaataaataaattaaaataaaagagaaaaataaattcacaaaaaattgaaaatttcgcaacctatcttttcccctttttgaactctggcagaccaccaaacttccacaaagagctgacacgattcgttgcacttcttagcatatattaataaatcagagcccacaattttagtcgtctaaatttacaagtggcctacgtacagatttggcaattcaattccgtacgagatttataagtataatatattaagggatatcaaataataatatatacatatataaaatacgtatgtgcggtagttatcctatacgttactattcggaaccataatatctatatgtcggtggtcacacaaacgactgaatatcctaacgtaaaattagttttctaagaaatcaaatttaaataaggctaaaactttcatttatagttcgtaatttgaacttcaaagacataaagtattgacatttaattaagtcgaaaaacaaactctcgaacgttataatgacataatcataatgtagattttagttctaccaatcccaaatgtttgagccagtgatcaactcaatgtgacctttgtcttttcaagttcatggaaccattgaataaagtattcgcatatataaaaagatgtttagatataccccccaatcttaatgtgaaggctaataaaaagtgttatgaattgaaaattgaaaagatgggaatgtctaaagatcaattggctaatggctatttactgacttgctttcattcctccagcagaaatggcattcataatatgaactataaaatatcaaattggacatttatggatcgccaaaagcatctccaaaaactgactcacaaatccactattattctttcataggagttcctcaacatttcttttctttgtacccgaggttgaccatttgataaattagacaagtagtttaaaattaccatttataacctatcgttatccaaaatgacgatgtaaagacatatcaaaacttttggatgcttgaactatctgaaacacaactctgtaataaaaatgattgaattatatttttcattttttactgaccatgtctttattattattcatccggccctcacatataaaattattttctaaatttttgtgtcatccgattaaatttccataaatgaatagagtttatatataagggaaatgggaatggacaaatacaacaaggagtcaaaagactgtttttttttaaagtgcatggatggaggctgatggccttattgcatagaggattcaatgtgcatatcatgcatatgaaaagtgttcgtataatatataatttaaaatatcataagcatgaaagattttgattaaatttagaaaattaaagccgccaagaaaaaaaaagttatttgttttcttgtgttcaagaaatagaaaatgtgaaagtctgtttgactctttgacaaaatatattggtttcattcatagaagacaaccccaaaaaaaagtaacacgtaggtaaacggctttaaagaaagatgagatttatagtctaatgtttttattagtattattatgttactaataatttcatatgatggttattatttcggtttttcatatttagatgaacaatatactatgacgacggtgataacaatgattatgaacaccatggtggtggaaatttaggtgttgacgatgaataatagtgattaggatccctatcatcaacagttcatgatattttacatataattgaaacgaaaagaaaaacatcaatttggctgtgaatgttctaagtcatatattttggccaatgcaatatcataggtgagaaaaaatatttaaaagtaagatcaacgaagattattggttacacctttatatcatctagtgattatgaaagcgcttatcaattatatagtggtgataatttggttagtgtatctgtagtggaaccattctataacaaaatcattttcacataaatttgtacttctcattaaggttgtctcaaattcgtcaaatatggtacatcaacaagtatttcttcagctgaatgcgaagatgtgcatcaatgtatgtttaagattattattatttttaattgaaaagagagatatttaaaaagaaaagttaaagaatgtttttctatctttgcttattaaattttataacttttatttttcctcttttgatctttgcttattaaattttaatttcaatgttccccacttggtttttagaggtcgctattactttcttcccaccgcttttgctttggacctttggttcataattaaattcttttaatatattaattggaatacaaatttagttttttcgtagctaattgcaagtaaatctgtttattttcatcatgtgcaagtaaatctgtttcaatcttgataaaaaaaacaatgcaaacatatccacaacgtttggtcataataaaaacaaaattgaagttacatatatagagttgctgttgctcaaaaaaaaaaaaaaaacaaacaaacatatatagagttgctatgaaacatatcagtcatgtgtactacaagttcgtccacattagattcttcatttacttaccacacacgtaagcaatgaaccacacacatataattatgatagccacaattttcttatgagcaatgatgcatggggttcaaaattaagcatagggcatgtaaaattgtacgttaatgatgtctgaaaaaactattactagctgatataacacgataaacacaacaaagtctacaattatttatcaaatcttttgcgtgacacacaaacaagactatcattaacaaaaaactaaaatgccgaaaataaaaatgaaagcttctgtctaatggcaatgacgatgatgatgatgatgatgatgatgatgatgatgatgatgatgatgatgaaccattgtatgtagttcacatctggatccatttagcaagctgggtcgggttaaccacaccagggacatggtttccatctgttttgaacacactcgccacttcagagtaactctggcgagcctttttcacttctctgctctgtaatggtgatggcgagactagcggcccaacttcggcccatcctgaatacagcttccggcccaacatagtaccgcacgtgaggtactcgtgtgccatgtagccagccaataaccagttcggtgtggcggcttctcttagatcactctccgtgtctttacgttttctcgacgcgccctcatgcgcgtgatggttttgattcatttctttgccttctttatcttatgccacgtggatgacaggttgtaaacaaggaccagggttataatggtcaatgtcaaacgtaagggctacaaacgtcaatgtatgtttaatttgaggcgaaaaccgtcaaaagcgtcaaacgcatgagtgtcgagaaaaaaaaaagttttaaaattaaaataaaataaaataagaaaaaaaaagcgatcggaggcagaataaagacgtcgccgggttaatctgagtgtatcggcgcggtaaatagagagagcagagacagagataagatttttaaaatcgggtattgagaacggaggcggagatcggagagaagattacgtcgccggagatcggcggaggagtaaaaagcggaggacggagagaaaaagggataaaataaagagagagatatgaaggggatgcgaaaattctcaaatttggatgcgaaaattctcaaatttggttagattaaattttttgattattcggattctttcgaaaaaaaacatatcaaaatgttacgaggcctttaatgggccttacattggatttaatgggctttagacatcaattttgttagaacagagcccttaacaatgttcgagcttcttcttccttgattttcattctatagatgctctctataatttgttttctcaaatttgactctctttctctcagtgaattttgtaggcagagttaccttacagacacatatccgtaaaaaaatccagaaactcgtagacataaaaacaaggtcgcggttcacaatctaaatagttgtgatgggttcatttcaatatcacaaactctataagtggtatcagattccatgactattgaaagaaatatcaaaaaatcaaaattacttaaaatcttatggctctagagagaacgaacatattactatgaaaagtttgtacaaccctaaactatcacacatacaaaagttgtagatgaaaggaaaacctctagatttgtttcttttgaaatcaaatcattttctcaaataatatacacgaaaaacaaaaattcaaaaacctagagtagcgacattattcatatatagagttttgccccacattaactatagtatatatgtttgttcttttgtgtgttttttctctttctttcttttttggtaattttttctattttcttacaccctaattctttcacgtcgtcgcatcgatcgagtgtggacgaagcaaatcgggatgtggatttattttaagtagacaccaatctctttcaattatttattcattactccaacctcctattaattactccaaagtccaaacccctactttgatatttgttttagcaccgtcatttaattcaatttggtcgaccctactaaaagaaaaatatttgaatatgcaagtttagagttttgacttttaagcctaaccaatctaatttgttaaacagcaatatgctttaaggactttgatattttcatcaagaaaaatacgttcgattttcatcttaatttgattgattttatcgttctggaagaacaacaacaagataactacattttggcttttcccttactctatggtctctttttgttgattctaaattgcaaacaaattttaatgtttcttggagaagcagatatgttctttaaactaattacgctccaactcaaaaatttgtcaaagtgaaaagagtagcagtgacaatgtgacattcgtgtttgggaatggcatgtagcaatatcttattggaggatgagtacgtacaagtggtctgtctttattcaatactattattgtatttaggacataataggttggataatgaatgacggcttttttgttcaaactgcaataaattcttcatctaactcgcacatggtttggtatggaagctccaatggttttttgttttaaaaatcataaattagatttagatgaatattaataaagtatgatttttaattagaaatttatacgattatatcatgtatcaattttatatatcgatctaaaattttacacatgtaagagaaatattttcttttattagttttacaaagctacgtgtcaattttttgttttcgttataattaattatgctttgttatttattaattaaattaaatattaactatgatataaatttgatctcatatacacattattttaatataacaatttagcacttatccattaagatggaatgtgcatgactaaaatttagtttattattataaaacagatagtcaaattatattgttaaataatatgcgtaaaattggatcggtcatatgattcaagagtatgtgcttagaaaccaactgtggttcgatctaatgaggttactatgaagtatttactcccaatatttaaaaattgtatcaagaatgattggaaaggcaactggtcagaaaccagagactctaacagtggacaactttagtgcattacggctatgatatttttttctaaaggtgacatatcttaatacatatatgaatacatttcatcttgatgtgtcaagaagattacttctatggttcatttatggatgttgttgttttagcttgatctggatatgcaaaatactttaataatgcttacctatacgaagttattggaatttcatgctttgccttaatgatttttacttgatgttatcttaatctgagtctaacctgcaactacaaagcttaagaactttaagtgtgtttgatatatatgcttgatctggatttatatgtgtaaaattgaaaattggtctaaaaaatattataaaataaatataaaaaataagtttggattactatttaaaattcaaataccatcaataagatgaaatattatagcaaaataaaatgtgtacactacaagagaacaaagcctttttcgacggtaaataaacggtcgcaaattttcgacggttttgtaatgatattctgacggatttctgactatcgtcgaaatatcgtcgaaattttttcccgtcaaaatttccaaccaaattaaatccgaccaaatatttcgacgattttccgaccaaaatatatccgttttgacccctcgaatattcgtcagaatatgctgcacttttctgaaggaattccaacaaaatacactcgatcaagtagccgccggttaaatagttacccggtcaaatagccgtgcgtttagtttttaaaaaaaaatatatatattcaaaagtccatcggaaatccgtcactgaactcgtcggacattcgtcgaaaactcgtcaggaacattgataattctcatctttatattcttctaccatcattcacaaatttgattcacaagtcatgtgaccaatcaaaatttgccacatagattttttctaatttaaataattaacataaaatctgtaaaggaaatttgagatcgttatacaaaaatgtgcaatcaaattttgacatatggcaagtttatcagaaaagaaaggaaattaacgaagatgaaaaaaattcaaaggtaaaataacaaatcatattttgccacatcatttgacaccagaatattttgttcttctccacgatctcctatcttcaccgtttctactccacgattttcatctaactgcttcatctgcatctttaaaagattcgaaattgttttttctctcccttgacgaactcactatcttcttctcacttgtgctgactctctttctcaaatccaaaaactcattcaatcactattggagttcgctatgtatacaacatctaagaagagacattggcatttagcataagtgcctaaataattctttattttttcttcttcgaggtaacaacttcttcaatctgtagctttactttaaaagtgtaattcatatacttctttaacaactaggcttggtacatttgggttttttttattggtcaaaggcttggtacatttggttaacaattgagatttcttatttggtggcagaatagagatgaacgatgttgggcagagaagctgctggttggaacttggttcaacgaaatcttcaatttagaatgaggaacaaacgttctatacggttatcactaaatgtgaattatatgttgcattagatattgcaagaaaagtaacttgaagtttattatttttaaaattgtaacaagttgtgtgacttttttttagaagaataaaaaacatgtatttcttcaacatgattaattttttgttatattactcatattttaatcaaaagttcaatcaacagtttcagtttactagctatttttaccttttacaacttctggattttaaatcacgttttatcgtcatactaattgaaaatatgaaaaattttaagtgtatcccgtcggaaatacttcgtcgggaatccatcgagaataacgtcatcgggaaaccgtcgaagaagataccgaccgattttcaacaacgttttgatgcaacgcctgacaacaatattcgttagaaaatagtcggaaactatttccgacgaggatccgacgatcattttcgactagtttccaaccggtttcgcagcaaattttatcgtcagaaaagcgtagagaaattgtcgaaaaatacctcgtcggaaacccgtcgataatttgtaacacgtttgcgacgacattcagatttccgacgagatagaatcgaccaatcaatatcgtcgaaaattcgtcgaatacgtttgtttccaatgttattccgacgatttcgtccgtcggaaataccctatcttcttgtagtggtaagattgaaatttggtttttataaaaattactaaattaaatagaaaaatgtgttgattatgatttagaattcaaatatcataaataaaattaatatttattcttatacccgcttatttaggcaaaatttatctagtaattatatatatatatattagatttatatttatacgaagaaacatattagtgataaaaataccgaagaaaaccaatgacgacattaaagtaaacagaattaccacagaccttaatgcatatttttgtacttaatttatagcacacatttattaaactaattagagattctaaacttatgaaaccattatgttacatatacaatacgttaattactataacacttggctaactaagaactagagattctaaccttttaatttgaaaccaatatgtgacatatataacgttttatacgttcattactataattgtcaaacatcagtaatcaattagagtccggcgttctatccgaaaaattattcttaattttagtaattgttagatgcattctgaattttataatgtcctgaagatattttacctatttcaacttcaaaatatgaaaaagtttttttttatatattataaacaaaaagaactgacgacgtataactaatgagttgtttttgttttctttgaacttaacttaagagttgtttatttctcaaagttataacttataaagaagagatagcattaactaatagttaccagatcgacagaccgttaatgtgtcagatagataaggtaatttgggtaaaacggttaaaagcctacttggtagatttgagtaaaatactaaacagagtttcttcttatttctatgtatttaatttatgattagtaagatatgttactagaaaacatgtggagatgatatcgcaaaaggatttgggaattgaatgcagtgagaagtagagtaggagttagtggttgaagtaagttaatgcaaagattaaagtagataattaagtgttgctatataatagaccgtaatgttggttatgtttgatcatcgggcagtgcactctgcaaattaacaaacatacttcaaaaaaatatggggcgtctcgttagtggtgctactcttttggctttgttatgtttccatgtttttgtggtgaatgttgtagcgagagatgtgagctcgggaagagatgaggatgagaagacgttagttggaggaggaaagggtggtggctttggcggtggatttggaggaggagccggtggtggagttggaggaggagccggtggtggctttggaggaggagcaggcggtgggtttggaggaggtggtggtggaggtggaggtggaggtggtggtggtggaggaggctttggtggtggaggaggttttggtggtggacatggtggaggtgttggtggtggagttggcggtggacatggcggaggagtcggtggtgggtttggaaaaggtggagggatcggaggtggaattggaaaaggtggaggagttggcggtggcatcggtaaaggcggcggcattggtggtggaataggcaaaggtggaggagttggcggcggtatcggtaaaggtggaggtatcggtggcgggatcggcaagggcggaggtatcggtggcgggatcggcaagggtggaggtatcggtggcgggatcggcaagggtggaggtattggtggtgggatcggcaaaggtggaggagttggcggtggttttggtaaaggcggaggtgttggcggtggaattggcaaaggcggaggagttggcggtggtttcggcaaaggcggaggagttggtggtggaattggcaaaggtggaggtattggcggtggcattggcaaaggtggtggaattggtgggggcattggcaaaggcggaggcattggtgggggaataggtaaaggcggtggaattggtggcggcattggcaaaggcggagggattggtggtggaataggcaaaggcggtggaattggtggcggcattggcaaaggcgggggcattggcggcggaattggcaaaggcggaggcattggtggtggaggtggatttggtaagggtggaggcattggtggtggtattggtaaaggtgggggtattggcggaggaggtggatttggtaagggtggaggcattggaggcggtattggcaaaggcggaggcattgggggcggtttcggcaaaggtggaggcattggtggtggcattggaggtggaggaggctttggtggaggaggtggatttggaaaaggtggaggaatcggtggtggaataggcaaaggaggaggtttcggcggaggaggtggatttgggaaaggtggaggtattggtggaggaggtggatttggtaagggcggaggatttggcggtggaggcttcggaggtggtggcggaggtggaggcggaggaggtggcggaatcggacaccactaaacaaaaacacatgaagaagttgcattgagtgcatgtctcacgtcacgtacaacatggtttacaagtttgagagtgttgttaccaaatatagtactagttttatctttttatgtactttgtctctatttgaattactagctatgagttttgttagacgtacgcactctaataatattcattttatcatgtaaaacgctaggactgtatttggttgtaagtcaatgttcttaaaaaaatattgatgaagcaatgttacaaatatatagcaacatgaaatgcaaaatttgttaagaaatggaaataaacagatacaaaaagagtataagagtttcacggataaatgttacattcgatataaatggtgttggttgatccatatgtgttaggtgcatgtctaatctaattgtctttgtccatgattacctaaccgtcacttgatggattcattaaactgtaaacctaattgctacatttcatatggtgactcctatgagcaaccgaaaacacatggtcatgtctctaatcgaaaaagcggctcggtttttctttactagattcttgacacatttcatatcaacgggttgtgtaacgtgagtcccactcctctgttctggttttttttttttgctaaagtctcctctgttctgtttttgtcattagttgctttgaattgttacgtttactattatttagatcctaacagaatttttgaaggaggaaacatggtcactttcgaaggaaaggattcgagatgtcacttgaaatctgaactagagattcacagtcctcagttttactggaaggttagcctagaacaccgatgttagaacttaggatagaacttaaaagatcactctttgaatcagtggaaactgtttttttctgaagctcaagaagtggattcttgatgatgctttatcacacaggttatgacacaggttgatttaggacttgctgatgcttatatcaatggagatttttcatttgtcaataaggaaacaggacttttgaatctgatcatggtattgttacatacacatattaaagcatgtggatctatgtttaaaaacttttgatcgacatttgatcatgaaaacttgcagattctcattgctagcaaagaattgaactcaaatcttgctgagaaaaggtaaagtttcaaacatgcaactaagttacttcatttgtcccattgcacttgtttttatttatttttcaggggtcggtggacaccaatttttttgactactggtttatcatctgcaaagcatttcttaaagcatctctataggcagaacaatttaactcaagctcgaaggaacatttcgcgacactatgaccttgtaagttgtcttttggtcccatctttctgtctcaagatgaacatttttttatgttttgaatatcatgagtaaacatgcagagtaatgaactttttactatattcttggatgataccatgtcttattcctctggggtattcaaggtgacaatgaaacttcctcacttttttttttttttttttactttctgctactcctattttaatcttttgccatattacatgtttatagtcggatgatgaagagttgaagattgcacaaatgagaaagatatatcttctaattgagaagacggcatatttgtcttgcaggtaacgcttgcgtgtatatatctccaatctaatgtttgcacaaccattgatcgttgttaacgcttaacaataataatattttatatcgatacctgaagagcgttacagtgagtacaaactaagttcagatttcataaaagaatacatattccctggtggatcttcctgctttagccagagttacatcagccatggcctcttcttctaggctatggtaaattaagtctcttattagctccaaatgtaacttctctgctttcctttccccgagtcccgacctatttaacactggaaaaaacacagcattgaaaacgttgagaacattgggattcattactaccaaacgttaagattgtggaggaagaatttcttcgagagacaaaagtaagatcaatataaaaaacatttcctctgttttctctttggactttatatgtggcccttttatgtgtgtttgtgctcatgtcccaaaaaaaaactattacttgtgcagacaaatcacggatcttggattcgacgatagattcgtaaggacatgtgaatattatttcgactattgtgcagctggcttcaagactcgtaccgtaggagactaccaggtaacacacacacacacacacacacacacacacacacacacacacacacacacatactcgagcattaacaaatgcttcttgatgtgaataaccatatgcatttattcaacattgcagatagttttctcacgtccagggaacgtaattgcactcggtgatgattcattctacagctctcctttaactcagaaaaaacaacttcaaatgaatcattttgattcttaactactactcccatttcttgtgtttccccttaatgtttgtggatacgtgaaaaagttgtcttatgcgaacattaatttatgtctccaatgaacatttcttctctctcttttgagtttgtgatttgtttaactaatgagcttttttctgcatgatccttgcatgtgcccatcataagcccatgaagcatccgagaacattatatatttttttcttgaaatgtgtgaacatttgatatttcatgtattcaaattaaaatagaacatgtgatgtgacagctagagaaaagcagacaccaacccaaacattggtttttacgtatggattgctatataagtacagaacgcaatgtggcttgtttatgcaatactcgcttactgttcagatccaaatccattgtgtcccaactcccaagtcagagaggtaacattgctgactacatttctcttcccttttttttttctttctttctcttcaatattgtattatggatgtctttgcacactctccataactccattctcctattacactcccttttctcgttaaggaccttaacgtatgtgcttcatcagtagctctagggatc

SEQ ID NO: 455 - DNA, 20724 bp, Arabidopsis thaliana
taacagatacgaatatcaaggattttcaggatatcctgatccgatttttaactattggttccggatccatgcttctggatttccggatttcggatatccgtccaaacaccaaaatctccgtaggggtccgaatccgtaaaaataacaatttatttttaattaaaatagtaataataatgataaaatttaatttcatataatataattttagaaaaataaaatctgaaaataaaaaaataaacaaaataaacaaaatctgttctaaataattattaaattttaaatatcaatacattttaaaaattattaatataattaacttttaatacaattaatgatttttgattcataaattcattattcggatccaaccaccccggagattcttgtttctccatcataattggatccaggatatagtcctaggcctcagtagctccgtgtttttagatatgtcaaatctaaagcaattagttctcttttcatggtttttttcttgtctgatccttagctaaatatccatgaagatatactaaaggcaatgatcaattttatgattttaaatcaccttctcttcattccacattttcttttggtacatgtctccattccccattgaatatgtaaataactcacggttttgttatctttaggccgggatggtaatagcacaaagtttgctatggaaagaaatcactctactgaaaaaaatacaacatatggtcctttccttaaccgaatcaggggctaggcttttcgttactagattcttggaacaattcatatccatcggttgtgtaacgtgaggctcactttatctcctcgattcagataatataatgttacaccattgttacactgatacttaccgctatataaactaaacaggatactagaagaaggaggaacgatgttcatattcggggaaaaagattctacttgccctttgaaatctatcctcaagattcacagtcctcagttttactggaaggtaatttatgcataagacaataagagaagtttgaaaagcctttctatagctcttgattcttgattctcttctcttaggttatgacacaagcagatttaggactcgcagatgcttatatcagtggagatttttctttcgtcgataaagactcaggacttttgaatttgattatggtacatgttacatactctacttgtgcatatatggatacttacttcttcgattgttcgagttatttctaatgttaatttgcagattctcatcgctaacagagaccagcgctcaccaaaatcaaaccttgttaagaaaaggtagaagcttaacaactttctccatgaagactttataggcttagcatgcaaactttctcccttacgctttcactttatcttttgtaatcttacaggggatggtggaccccggtgtttctaactgccggtttagcatccgtaaaatattatctaaagcatgtcttaaaacagaacactctaactcaagctcgaaagaacatttctagtcactatgaccttgtatgtatcttcaaaatccacctctctttaaatatctatgaacattttcttagtcttttgttgtttattatcggtttctcttttcacagagcaacgagtttttcggtctcttcatggatgataccatgatgtactcctctgcaatattcaaggtgaccattaaaaaacttcaaaggattttttctctttttcagtttcttttactttattatgaccctgacatcaacttttcgccatttttcatgtttatagtcagaaaatgaggatcctagaactgcacagatgagaaaaatatctcttttaattgaaaaggtaaggtctacaggagacattttcttgatttataacaagaagtcaagagtacacgtattttttatttgttctttaatgatcaattgtgggaaatttcaggcgaggatagagaagaaccatgaggtcttagagatgggatgcggatggggaacttttgccatagaagttgtgaaaagaactggatgcaaatacactggcattactctttctattgaacagcttaaatatgcaaaagcaaaagtgaaagaagctggacttcaggttcttgtctaataaacttttctaataccatgaatattgtgtgccttatgatgaacaatattccttttgaatcaccagggtcggattacgtttatgctctgcgattatcgccaactatctgatgctcgcaaatatgacagaattatagcttggtaaaactctttttttgtccatctttgttaaattaccttgtaatctgtttatgacataacatttctggatgtttcagtgagatgatagaagcggttggccacgagtttatggataagtttttcagttgttgtgaagatgcgcttgcagaaaacggcatttttgtcctacaggtaacacttgcttcttcctcacggttccctcatcattatattgcaaaatcattgatcgttttaatggttaactgtacaacagttcacagcgatacccgaggctctttacgacgagagcagactaacttcaggtttcataacggaatacatattccctggtggatgtcttccttctttagccagagttacttcagccatggcctcttcctctaggctatggtaaaatcttttctttatcaaattttagcttcaaatgcaattctctgctttctccttctccgacggcctacctagtatctaacaccgggtcaaatacagcattgaaaacgttgagaacattgggatccattactaccacacgttgagatgttggaggaagaactttttggagagacaaaagtaagatgaaaatattaaaaacctttcctctgttttgcttttcaggaatctgtatgttttttcatatgtccaataaaactaactattatctgcgcagacaaatcatcgatcttggattcgacgataaattcataaggacatgggaatattatttcgactattgtgcagctggtttcaagactcttacccttagaagctaccaggtaaaacacacactcgagcacattaatagaaacataagcatgtcgttttcctcaagtctcattttagacttgctttgaataacttatatgcattcatgtaacattgcagatagttttctcacgcccagggaacgtcgctgcgttcggtgatgatgatccattccgcagttccactagaaaaaacaacattatatagatgaaacaaaagattatcttagacgctcgaaaatgttctgctttcatgattgattatgcattctgtataaacagcttttctctgtccagaccattataaagcaaaagattatacataacctgaaatgtgtgtgaacatttattcaagctgttatggtgcaatggttcacttccattgaaaaaaactttactgctgtccaagattgagtactatgatgtaactcaagatctctgtgaaagggctaacacatggacaaaacggtcaatactacacataattacatgagacacatggatgcaaatacactggtattagtattacactatctattgaacaacttagatgttttaaataagtatataaccatgcctttttccgcaaatctcattatagacttgaattgaataacttatatcatgcatttctgcaacattgtagatagctttctcacgtccaaggaacatagtttttattcggtgaagatgtgtgacaggactaaaatcacagtccatttctttctctaccgcactatttcaataaatatctaaacccattttcggtttgttcatccggtcaagctttgtaaaattcaaccttggccagatgttggaccacacaaaccttgtgtacacatgtgtcatttgaagaatataatcaatagtttatcatctaccttatctcatctttctccctctctcctcattcttgctcgtcatcaatcatcatcatccgaaacctcagatctctaaggtacttatttattctcaaatcactttttaggttgtattttacctaggtttgttattattttctccgagaatatagaaaactctggataggattattattattttctctatcctatggtttcaagatgatccattccacagctttgtgttaactaaaaaaactagcaatgttagatgaatcatttccaatctggagtactactcccatttcttgtgttaatttccccgagaaacacattagactattattttcttgaaaatgtgtgaattcacaacaagatatttttttattttaactaaattaaaaatagaacatgtgaaaaacaagagataatcagatagcgaccccaacatcagttttcacgtatggatttgatatataacagaacacaatgtggcttgtttatgctataactcgcttattcttcaatcactctccaatttcttcatattaggcttttgtttatcaaatttattcccgttttttggaaaatatataaataatcatcagaagaaaaaagacaaagaaaaacctacttttggtaaattcagtccagccaactttcactttccaagtctattaattgtgtgccaagtacaaggtttttttattagaatataattttacattttttcaggaaaaaaaaaaaaacactgctgactacatttatcttcttttttttttttcattttctttcaaatatttattcattggtgtctcggttcttatattagggtctttgcattctccatcctcctatcagtactccctcttctctttagggtatgagtttcatcaatagctcagcatctgaaaaacaactactctaatttggatccatcacataaaaacaactactctaatttggatccatcacatccgcaaatatccataataatataaaattacagaaataaaatgtgtcatataatctttttcaaactaatataaataaatatgttagacatttattaaggacattctcaaatatatcacactttttattattatgatattatatatctaaatattatacatatttgaaaacaaattaatatatgaaagctgatccggaccaaatcttaaattacgatatttggctcctaatttccagaacttcacatatcatttttatcagaacagatcggatatggatatcatgacttttaattcgaataattttataagaactataataaattttaatattgttttagtttgtatatattatgtttgtttaagatgttcttaattagggtaaactcttgacacatagaatctaaagcaatataattagttatcttttcatggtttttaattgtctgatccatgaagacagactaaaaggcaatgatcactccacattgaatatgtaaataactcttcttctctttttgttatctttaggccgggatggtaattgcacgaggtttgttagggatacaaacaactcttgtgaaaaatatgcaacatatggtattttccctaaccgaagcaggggctcgacttttcgttaccagattctttagacaattcatatcgatcggttgtgtaacgtgagactcactttatttcctcgattcaaataatataatgttacacattaatacttatgaactgaacaggatactagaaggagacacgatattcatatttggggaaaatgaatctacttgtcctttgaaatctatcctcaagattcacagtcctcagttttactggaaggtaacatatatacaaagacaaaaagaaaagttaaaatagactttctatagctcaaatagaacttgattttttttctcttaggttatgacactagcagatttaggacttgcagatgcttatatcaatggagatttttctttcgtcgataaagactcaggacttttgaatctgattatggtacataatatatacttgtagaagcataggtacttacttcttcgattgttcgagttatttctaatggtttttatctacagattctcattgcaaacagagacctgaactcacgaaaatcaaaccttgccaagaaaaggtagaaccttacaactttctccataaagagttttacgcttgggatgcaaactttatttcctaagctatcacttgtgtttttttaccttacaggggatggtggacaccagtgtttctaactgccagcttagcatctgcaacatattatctaaagcatgtctgtagacagaacactttaactcaagctcgaaggaacgtttctagtcattatgaccttgtacgtgcttgagaattaattttcttgtttataatcggatttctgttaatagagcaacgagtttttcggtctcttcatggatgataccatgatgtactcctctgcagtattcaaggtgaccattaaaaacttccagagtatttttctctttttcagtttctcttactttattatgatcctgacatcaacctttcgccatttttcatgtttatatagtcagaaaatgagaatcttagaactgcacagatgagaaaaatacatcttttaatcgaaaaggtaagatctataggagatcattttctatatttttaacaagaaccactgttttttctttgttttttagtgatcaaaatttggaaatttcaggcgaggataaagaagaaccatatgaggttttagagataggatgcggatggggaactttagccatagaagttgtgaaaagaactggatgcaaatacactggctttactctatctattgaacaacttaaatatgtagaagagaaagttaaagaagctggacttcaggtttgcataatccatttctgtttatgatctccaaggctctgactaacattttaacttcttaatcataggagcggattacgtttaagctctgcgattatcgccaactatgtgatactcaaaaatatgacagaattatatcttggtaatatatctctcttgtatataatatttattatgtcttatgagtctatgacataacattttggatgtttcagtgagatgatagaacatgttggccacaaattcatggagacatttttcagtcactgtgaagctgcgcttgcagaagacggcatttttgtcctccaggtaacacctgcatgtatcttcaatctcatgtttgcacaacaattgatagttgttaatgtttaacaattactaacagttcacagcaatacctgaggagctttacgacgagagcagactaacttcaggtttcataacggaatacatattccctggtggatgtcttccttctttagccagagttacttcagccatggcctcttcctctaggctatggtaaagtcttttctttatcaaagtttagcttcaaatgcaattcctctgttttctcttcctccaatctatctatctaacaccggagaaatacagcattgaaaacgttgagaacattgggattcattactatcctacgttgagatactggaggaagaacttattggagagacaaaagtaagatgtcataataaaaacttttcctctgttgtgcttttcaggatttagtatgtttgttcatacgtccaacaaaactaactattatctgcgcagacaaatcattgatcttggattcgacgagaaattcttaaggacatgggaatattatttcgactactgtgcagctgggttcaagactcttacccttagaaactaccaggtaacacacacacactcgagcacattaaccagaaacataaccatgctttagacttgatttgaatacactatatgcatttctgcaacattgcagatagttttctcacgtccagggaacgtagctgcattcggtaatgatgatccattccacagctccgctttaactcaagaaatgggactaatacttcagactggaaatgtttcgtctaacgttgttttttctgtgtgtttcccgttaagtttcataatttgcaagagactacctagacacttgaaacagttctgctttcatgattatgcattctgttccaacaatctttcactgtccagaccatatatctgaaatgtttgtgaacctttactcaagctgttattgtgcaatggctattgttcaagatcaagtactatgatgtaactcaagatctctgcgacagtattacatctcgggtacatagcagtgcctgaaactttattcaatcgatattaagcatgaatcggaactcgattacgatgttaaagataaacatagaaaggttttataagttttgtttattcactgttattcaacctgaaacagcttttaatctagatgctgaagttgcatatattacagataaacaaacacataggtattacaacgttaccacttacaataaggccttcatggatacgtaaaggctttcttatcattcgcttgtacctcccttgagatttagccttgagaccatattctccgtcctctgcaacaaaatgatcccaaatcattcaaacattctgattatattaacaagcatcataaaatgaaagactaacctgttcggaatgcgaaagatactttccatcaagcgtcacaaccacgcgattgttaccatccactcctttgattttgtcgacagagcaatagaaatctatcgccgacatgctaaacaaacaaagacacacacacacacacacacacaaagtaacagactcagctttaaaggacataaaaaatatgcacataacaagaagtcaagaactaacaaagatcggtatactatacatacagtagatcactctggcccttactaaaccaccaccaagcgactacgaaaagcaacagccaaattctttcccatacagaagccaaaaagggaccaaaaccaactcgaataaagatcgacacttgaagcttatcctttaacaaattcctacttattcaatcaacccttcacagaacccaaaatccaagagtagttcaagctcagctataaagtgttaaacgagtaaagttccattctttacaaggttctctatatgatcataacacacataccaataaatcaagaaactttcaattcaatcatctcaacatatgaacaaaatgaatcacacaagtatgctactaacaatgaccctttaaagcaacgatcacaactcaaactttacatacttaaagaacatagaaacttacatgccatctccaaaatcttcattgataatctcctttatactctcaccaaaatgcatcactgcttcattcaacctaaatcaaaatcaaacccagacatcaaaactaagccacccaaaaatgtaaactttccagagcaaacctgtagatagtgggttcttggatgagattaggatcataggatctccacggaggagacatcatatctccgattagttcatcggtcagagctggtaaagcttccttaagctttgggactgtgtccggtttgagctgagcttgacgacggagaagctgagctacgtatacgttggttagacctgtctccgcggctaactggctaaaagtcttgccggaagctgatttcacggcgagaagctgatttgtaacactctgtttcttcgccgcttccattttttctgaccaatcaatcacttttgtctcttcctcactcttttaatggaaaaatcgctatgacgtaattttatctttaaatgggctgagtatctctactcttataatgggtctttaaatgggcttttaaatgggttttagttcagtataattcaaaaatatatgaaaggctcatgtcaacgaatttgttgtggtgactctcatcacaatatagtatacgaatccactcagacagacagacagacagacagagagacagttatcttatataattatattcattcaataatcaaacataatatatatatgtaaccgagagaaacgtgatatcttatataatgaagatagatcatagatgtaatatatataaatcaaaagtcaatcaatatgtgttgtcttttaatcataatatattcataaccattatgtgcagcatgtgcaaatactatataaaacgtaaccacataatatagatctctgttatatgtcgttttaattattaatcagttatgcaaattattgttaacaaaccagatagagttatttcgagatacatgaaatttgagtaaggcctattgtggctgttgggtttggaacgaaatttttgtttttcggacattccttgttaataaatccgtggtaacattcttttctaaagatgatacatactaaaaaaaatcttataagaacccatgaattgtcacaaactggctgatatttctcaagtgtaaagccgactagtcattcaaaattcgaaactatatgtgttaaagtcaccaagcttatcaataattgtcatgaactatgaacaaaatcgaattatatgtgttaaagtcaaattatatctgaagttcttgtattaatcctttgagatatgtagtccaaaagattatctaaaatgatatatatcaatatatgcatagtttagagtgcattaatatatggttggagtaaactaaatgtatatagtaagcgccggcctcattttaaaaatcgcgtatgttctgcactaatcatttttttatttataattacgacaaaagaaaaagaaaaaaataacaataaatcatcaggtttcttgtctcattagataatatatttatggactaatcacagctcacgtaatcaaatttataagcaagttgcaatattctatgaataattaccaattcacccaatagataacctcaaacctctaaggagaaatccaacatatctttggtttatattaattttaatattcttgaaataggccctcgaatctttccttttctttttatagttttgaatttcagtttggtgttctgtgcccaactacagacgtgtgtgtgaaagattctaggggcttaacacaaacggtacgatacatttataaaaagggaaaaaacccaaaaaaaatctcaactaatttttatttggacgtttaatatctaattatttttatttgaaaggtaaatacacgaagtaataaaaccgtgcaatttaatacacaaacaagtaattgttgttattttcatactcacgatctcacaacaaaaataaaatttcaattttacccttaccatctcaattaactattaatttttataatatgatattaaattttataattttgaataaaaaataattttattaatattttagtttatgttaataaatttaatttttattcaaaatcataaaaattaatatcatattatcaaaaaaataatagttaattgagatggtaagggtaaaattggaattttatttttgttgtgagatcgtgaatataaaaataacagcaattaattgtttgtgtattaaattgtacgattttattatttcgtgtatttaccttccaaccaaaaacaattgggtattaaacgtctaaataaaaattaattgaggttttttgggggttttttccctttataaaaataacatagttctttcattctctttttatagaataacactgttctttcttacaacttttgatttacatttttctgtcttttttttctgtcaaaccatagatttccattcattaactttaaagaagggaagttcatacaaattaaagctaagagaatacaagaaaataaaaataaaaatttcatgagttttctaaagaactgtgtacttttaaaagagtttacaagatttaaaaaatctgttgagatcttggcaaattcaaccttgaagacggacttatcgaaatcctcgacttatcgaaatcctcgaccaacgtgtagtcataaacggttctcgcaaacaaagcaaatgaacctttgaaaagatgctctacaggggaggcggacgggtcaaacagttggaataagatatggtaaccatctatcggagaaagggtcataatatcgctccttccacactatcagaggtttgcaaattattcaaacaattgatgttcacatgaatgaacccgataattagcgaatggagagatagagttgaaaaaagctccgctaacccctactctgtagtgacggggtcataatgccagtctttttcactctattggttgtgatagagaatttcagatagggttcatactaaacttaactgttgatctcgacaaaggtaactattagacaaacctaaagaaacggatactctattagcgtgaagttcacgatcagcaaaatcagagctaaagggtgctaaaggaaaataccttgacagaaaattatcgatacttaacacgggcagcaaaactccaagacactttccaagtgagccttaacccaaagcgattcgagatcaaactttcacaattacttttttctcttaaccattattttttaaacaccaagaacatgtcatcaatcagactcaaaaatgctaaacaagattaggataactatggtggaattgtggaagaaacaaactgaacataaaatagtaatggtggttgatataaacaataggcccgatgaaaactacaatagatggaaaataaagggaatatttcattaataaccggactttcggcaaaaatccaactagtccccatttttttgtgtaattttttcttcaatctcttaaaaatacagatcaatcgcacgattattattttttattttgtaggattagcgtatatatttttgggaccctatatttttcttttgtagacaacccttaaaaaaaaaaaagaaaacgcaaacgtcgggtgttttaaaacgagccacatagctttaacttgtgggctatatatatagctttgcacacataagaacgaaacataatgtggcttggcttatctctcagcacaagtgtttcctcttaaactcatccaatagtcctttacgccttcaaatccttcttcattctcccattcacaattccttcatttttaatttttgattcatcctccattttttttttctgaaaaacaagaaaagttcaaaaaaaaaccaaaaaaccaatctcggttttcgtcattgtattcatctttaatggtagaccgtagacacgtattttgaaggtagattttaaataactctgtataatgagaatttcttactttgcgtaattttattgagaatctaatccgatgaatttggtcaatgcaacttatttatctacaatgcagggaattacaaaattttaatactatctcttaccaaaaaattagaaaatagagagaagaaaaatgaaagtggcagttataggaagtggtataagtggattaggaagtgcttacgtacttgcgaatcaaggagttaaagaagttgtgttgtacgagaaagaagagtcattaggaggccatgccaagacggtgcgtttcgatggcgttgacttggatcttggtttcatggtctttaatcgtgtacgtattcctttcactttcgctcattttttcatagtttataatgaagttatatatatatatatatatctggaattttattttatgttttcgtgaaaaaatgtgatgatagttgaagctttttgccttatcctgtccactttggtccacaaatggaccataccttatgttgtgtttttggtttcaatgtatatcataaacttttttatttttgccaaatttatgatttactttgctatctaaagttttgaataaacggaacttttttttctttttttttattgtgtgcacctgaatacacggaacttggattatttttttatctgtccaaatctagaaattggaaaaaattagatttgacataggaattttagtttggtgtttctttcaagtcgaacgtatttttgatgttacagaaaaatgtcaaaacgtattgttttagaaataactgttgtcgtacgatcagaccctacatggtattcaaatagagaccaactatgaattttgattgacatattgttcttttatggttcttgtacgactgtgagattatttccagttcatcagtaaaattttatggtataatagatttatgaattgttggattgtgcacaaaaaatttatattacacaaatattagtcttaaaatgttatgggaatcaatgtaacaacacattcaaaaacttcatattaaagattgcttatgtatagttctagcttgaccttttggatattgatcatacaatatatatgttgataggttacatatccaaacatgatagagttcttcgagaaccttggagtagagatggaggtttcagacatgtctttcgcagtgagccttgacaatggcaaaggttgtgaatggggaagccgcaacggtgtctcgggcttatttgctcaaaagaagaacgttttaaatccgtatttctggcaaatgatcagagaaattgttagatttaaagaagacgtcttaaattacattgagaagcttgagggtaaccccgatatcgatcgaaaggaaaccttaggagaatttctcaatacacgtggatactctgagttgtttcagcaagcttacttagtgagactgttttctttaactgatcctacaaaatgtttattcgaagttttcttggacaagaagttacctcgatacatatgtctgtgaaataggtaccgatatgcggttcgatatggtcatgcccatcagatggtgtcttaagcttctctgcttactctgttctttcgttttgttgcaaccaccaccttcttcaggttcattaatcctctcttatctttctcctttctatcggtgtttctaagcttatttttgtctctttttcagatctttgggaggccacagtggctaactgttgcaggacgttctcagacttacgtcgcaaaggttccaaactaaaacaatgatatgtacatctggttgtgttgtgtaaggcatatatgcatttgaccctgacttatggttaactacggatcaggttagggcagaattggagagactaggatgcaagatcagaacaagctgcgacgtaaaatctgtttcgacatccgaaaatggttgtgtaactgttacaagtggagatgggtctgaagaagtattcgataggtgcatattggctatgcacgccccagatgctctgagattgcttggtgaagaagttacatttgacgaatctagggttcttggtgctttccaatacgtttacaggtttgaaatgcacaactttatttatcttctttaataaaaaaggtgaagtgattcattaaattgttatgatcgattgcagcgatatatatctccatcatgacattgatttgatgccacggaacaaagcagcgtggagtgcgtggaatttcttgggaagtacggaaaagaaagtatgtgtaacatactggctcaatatacttcaggtatacaaaacaatctacatgcttttaaataccggtttcgcaacaaatcaatgactttaagctaaaccttgatgatatctactggtgtagaaccttggcgagaacagtgaaccattctttgtaacacttaacccagacgagaccccaaagaaagcattgctcaaatggaccactggtcaccctgtaccatcagttgcagcttcgatagcttcacaagagcttcaccagattcaaggcaaacgtaacatatggttctgtggtgcatatcagggtaaatcttagattttaataacctaaaacaaatcacttccctcttgtccttgtctaatcttcagctaaatttttctttcaggctatggtttccatgaagacgggctaaaggcaatgatcaaattctatatataatcaaagcctctctgtatgacacattgcattttgtaataactcacaattaattttgttaaccatcctcttcaggccggtatggcggctgcacgaggtttgttagggaaagaaacagctcttctgaacaatccgcgacatatggtcccttccttgacagaaacaggagctcggcttttcgttactagattcttgggacaatttatatcaaccggttctgtaacgtgagtctcactctactttctcaacttatatcatattatgttagattattacttaccgctatggacttaacagaatactagaagaaggaggaacaatgttcacattcggagggaaggattctacttgtcctctgaaatctatcctcaagattcacagtcctcaattttactggaaggtacaaatatataaatatgacaatgaaaattttgaatagtctttttattattccatgatttttgaaatttgattcttgattcttgatttttgtctcttaggttatgacacaagcggatttaggacttgcagatgcttatatcaatggagatttttctttcgttgataaagaatcaggacttttaaatctgattatggtacataatatatacatgtagaagcatagatacttgagtttttcgtcttttcgagttatttctaaagtttctctgcttaattaataagtcttttatgcagattctcattgctaacagagatacaaaatcaaatcttactaagaaaaggtaaaagctctgaattaggatttaggattggcatgtaagctttgtctcctaagcttttcaattctcgcaggggatggtggacaccgatgtttttaactgcgggtttagcatctgcaaagtattttctaaagcatgtctctaggcagaacactctaacacaagctcgtagaaacatttctcgtcactatgaccttgtatgttgcctgaacctccacctctcttatgttttccacgtttcctttgtgtgtttgagttcataaccaaattctgtgtttggttaattcacagagcaacgagcttttcggtttgttcttggatgataccatgacttactcctcggcagtattcaaggtgaccaagaaaatgtttttagggaattttctcttttttttggtttctctgacttgactgtgattctgacttcaaccattcacaatgatcatagtcggatgatgaggatctgagaactgcacagatgagaaaaatatctcttctgattgataaggtaaagcattttcttgatttagaacaacagcttgtgatttttttgtttctcttctcgaataaccgaagagggacatttcaggcgagaatagagaaggaccatgaggttttagagataggatgtggatggggaactttggccatagaagttgtgagaagaactggatgcaaatacaccggcattacgctatctattgagcagcttaaatatgctgaagaaaaagtgaaagaagctggacttcaggtttgcataatccatttcttgatttgctttctttatctccaaggctatgtatgaataactatagaacttctgaatgataggaccggattacttttgagctccgcgattatcgccaactatctgatgctcacaaatatgacagaattatatcttggtaaagaaaaaacactcattctccatctgtaaatataactctgtaatttatctatcttatgagataacatttttgaacatttcagcgagatgctagaagcggtcggacatgagtttatggagatgtttttcagtcgatgtgaagccgcacttgctgaagacggcctaatggtcttgcaggtaatttatagctcttgctcatttctctctgagacattatcaaataatttcataatcatttgagcctttttatgatgttttgactgtaacagttcatatcgacacccgaagagcgttacaatgagtacagactaagttcagatttcattaaagaatacatattccctggtgcatgcgttccttctttagccaaagtcacttcagccatgtcctcttcttctaggctatggtaaaaaatgtttatatatatactttttccgcaatctctttgttaaatcaatctaacacttaagttaatacagcattgaacatgttgagaacattgggattcattactaccaaacattgagattgtggaggaagaacttcttggagagacagaagtaagataaaagatatttaaaacatttcctctgtttttgtcctgtttactcacatttctatcaaaactattattatttgtgcagacaaatcatggctcttggatttgatgataaattcgtaaggacatgggaatattattttgattattgcgcagctggattcaagactcgtactcttggagactaccaggtaataacattggcatagaccataaaaaataaggcatgcttctttagtttcttgcaatcaaatgtgaggttttgacaactttgagtaaaaaacattgcagttggtgttctcgcgtccagggaacgtagctgcatttgcggattcataccgaggatttccttctgcttattgtgtctcttgagagcaacaacatttggttgcttatgtttttcgatctatacaatatttgatgacctgaaatactagtattgattactgatttgtttggtgtaccaatttgtgaaagtttgttgaataaaagtgagctttactttggaaaaataaccagttactcgtgaagctttttgattaattcgtacaacactccatgcacaatcttgtattagttcagaccaaattgctaaacctttttgatcaatgcaaactttaaaattgccaaaagctataattcaactaaagtataatattttttgtgacttgatatttgttgacagcagtgatcaacaacaaaccacataatagtagtaattaaaaatttaattatatcataataaaaattgtgaaaagatatttattttttttattaaacgaaatgttcatatatttttttcttcttaatttcataattatcctttgtacctgactcgagtttctgattagaagaagaattatcaaattcttgtctttttggccacccatgtgatttctctgtgtcgttactgaaatttactagtcagattcgactgggagggtcctaattctgaatcttcaagaacgtgttttggttttgatatgactctttaagactttggatttgggacgttactaggtttgaaactaaactagaaatgtatcttaagagattgtaaatatccatcagaagatgtgtgatttgacttgcttgtgtgctgcagagctgagtatgacccggaacatgatctcttggaaaaggagtttatgatgaaaggtagatggtatcagagataagatttagaggtaacagatttttatctgtttgtaatcttatgaaatcaaagtttcatttgtttttgtggaaccttctgtgtcctggatttttgtgtacctactatataacatgttatgattgatttactggttgctagatttttggttactagttgctagcctttgaatttgtagtactatttcacaagcttggattagtccacaaaagaagtataactttagataataaaatatatctgacgttataatttgttcattcgaattcttctctaggacagacataatatcaattaatcatgttctagttttcgcaccaggaaattgtaaattataaatctacgaatcttgtcatataccacataaaaaactttacattgtatataaaaagtgactttttgtatctatttattttgtcaacggcaacatatttattgtggaaaagagtttccaaatattttcttttgcaatttagctctctacatcaaggaaatgtaaagttaatactccaatctcaaaagtcacccgcatatataacctttgaatttgtataaattttacaaatcgtatgtttctatatatagtttatgaaaactacgtcgtttgtccatcttccccgtttgtccgtagatgtggtctcgactcaccatctacttgcatgtggcaagttgctttaccgcgcatgttttggagtcttcgaactgccgtcgaactatcttatctactgtttgttcttatcaatgttttcaatgtcgtaatattccttgctttggatgaactcttaatctttgtaatccttttgattttttgaatggaaaacaaagtctttgccaaaaaaaaagaaaaaatcatgagggggacgaaacgaaatctgtcaaggaagaggtccagatggagaacgaactgtttgtgaatgcaggagttccgcatctgatgctgatgatgtcactatatccttcgatgtggatggctacaaaaacaaagacggggatggctgaattctctggcgatccagattttgcaaagagagcagtgaagtttttgtgttttggttactaaagtattaattgcaaaacaaactcgatatcgctgatatatattctaaactgtataattaacaaaaactgttgtagcgaaattggttatgtatgttttgactattctaatggtcatgagtctaattttctacttcaacattgttttgtttttttttcttttaaaaaatatattttaaatgatgtagttttgataacgtatacacatatttatatggtttgcaatttgagattgcggtagtaatttacatttatttgatgtaaagagttaaattataaaaaaaaaaaaatttggaggatcaaaagttaaaaccctaaagaaaactagaaatagttggaggggttggatccaaatcttaatgtgatttgcaataatcatttgagaaattaagcgacgtggtcaaatgttacctgttcgatgaatgctgggtcttcaatcagtccacgtcttaaaatttgcacatgggttctttttataatagaaaaatcagcttccaaattttattattcttcactaggctcctagaatctttcccttctttttttatagttttcaattttcagtttggtgttctgaaaccatgcaactaacaagtgtgtgtaaaaatataa

SEQ ID NO: 456 - DNA, 90349 bp, Arabidopsis thaliana
gatcaaaagaaaaaataataagccagaaatgtggttaaaaatgagtttcacaggaaaaatatgattaaaatggtataattttgctacatgcttatgataatgaaatatacaagtagacagaacttaagttgtacgtaaaaatatttgaccgaaaaagtaaagttgtagattttcgtcaagtctataacaaggatatagaattagagacaaaaaggaataaaatccattacagttgaatcatatgcatttccattttctaaattggaaactacattttattaaaatcttgactggtaaaaatattgactaaatttttagaatatacattttaaaaatgggaaaaatcttttataaccaaaacgtaaaataatttttgatatcaataagataggtaatattggtttaatcaatttatcatatatatatgagctggatatgaaatttaaattttaaacggacaaatctagtatatttgaacataataataaaagtaattttaagtatggtaaattttatcaaattatatatagataatttactttttaatcaataaataaattgctaatcctgataaaaaaatgtaaatttttataaaaataacatagttcgtacttcctctttttatcgaataacactgttatttcttcttttaacaataacaataaaatgccataaatcagactcaaaatgataaacaagtttagaataactaactatggtgtaattgtggaagataaacaaactgaacataaaatagtattggtggtagattaaacaataggcccaatggaagtttttcattaataatccaacaagtcgccagtttttttgcacttttaccttcaattttttttattaaaaagggcagggtttttcgatattgtaggattaatgtgtattgttttaaacatagagggtaaaatagcaaaatccagtaaacaaaaataagaaaacgcaaacgtcgggtgttttgaaacgagccaaacacagctttaacttgtgggctatatatatagctttgcacacataagaacaaaacataatgtggcttggcttatctcctcagcacaagtgtttcctctttactcttcaaatccttcttcattctcccattcacaattccttcatttttcatttttaacttatcctccatttttttttctgaaaacacacaaaaaaatatattcggttttagaattccaagaaatccgggaatgagcatatctctctagctagactcattccagcaaactctgaatcaatttcccattttcagatccaaatccattgtgttaaaaagaggtaaaatcactctacatttctcttattgttttttttaacaaatttgttcattggtctttgtgcttattagattgtcgaagaagataaaatagatttcgaaataaattcacaaccagaattttgaggtttattagaaagtagaagaagaaaggtcactgtagattgagtctaccattgttcatttgttctcatcttgacatcttcaatgtagcatctagagactccaaattaaataaataaaatattcaatattttggttttatgaaaaggtagaagaagaaaggtcactaataaattcgagtctactattgtactatctttttttttttttttcattgtactcatctttaatggtagacacgtattctgagagtagaatttaaatatctataatgaaaaaaattctttcttttcgtaatttattgagaatctaatccgatgtatttggtcaatgcaacttatttatctacattgcagggattaacaaaattgaatagttcttaacaaacaattagaagaaaaaaaaagaggagaaacaaaatgaaagtggcagtgataggaagtggaataagtggattaggaagtgcttacgtacttgcgaatcaaggagttaaagaagttgtgttatacgagaaagaagagtcattaggaggtcatgctaaaacggtgcgtttcgatggcgttgacttggatcttggtttcatggtctttaatcgtgtacgtattcctttcactttcgctcatttttctttttcattgaaataaatagcttataataagttaatacatttctggaattttctttttttccgtgaaaaaatgtgatgataattgaagctttttgcctttatatgtctactggtccacaaatggaccatgccttgtgttgtgttttggtttcaactttcaatgtagattataagctttttttatttgttgccaaacttatgttttactttgctttctagaatttttggatacacagaacttggattatttttttattaatctgtccaaatctagctattggaattcttttcctttgacctatgagttttagtttggtgtttttaattaagtcaaactttatttttgattttcgaaataactgttgtcgtacgatcagaccctacatggtattcaaatagagaccaactatgaattttgactgatatgatgtttatttatcgttcttgtactactgtgaaattatgattcgttttatatatgacataaaaatgatagaacaactcattatcatcttgtgactattcaaactttcaaaatatatttttatctattcgtagcagtttcattaacaaactatttccagttcattagtaaaattttatggtaaagtagttttatgaattgttggattgtgcacaaatgatttatattacacaaatattagtcttaaaatgttatgagaatcaatgtaagaaacatactcaaaaacttcatattacagattgcttatgtatagttagttctagcttgaccttttggatacgataaataatttgataggttacatatccaaacatgatggagttcttcgagaatcttggagtagagatggaggtttcagacatgtctttcgcagtgagccttgacaatgggaaaggttgtgaatggggaagccgcaacggtgtctcgggcttatttgctcagaagaagaacgttttaaatccgtatttctggcaaatgatcagagaaattgttagatttaaagaagacgtcttaaagtacattgaggagcttgagggtaaccccgatattgatcgaaaggaaacattaggagaatttctcaattcacgtggatactctgagttgtttcagcaagcttacttggtgaggctgttttctttaattgatcctacaaaatgttattcaaagttttcttggacgagaagtaacctcgatatatatgtctgtggaataggtaccgatatgcggttcgatatggtcatgcccatcagacggtgtcttaagcttctctgcatactctgttctttcgttttgctgcaaccaccatcttcttcaggttaatttatgctctctcatttttctcctttttaatatttcttagtattccttagcttaatttggtcggttcttttttcagatctttgggaggccacagtggctaactgttgcaggacgttctcagacttatgtcgcaaaggttccaaaataaaccagtgatatgtacatatggttgtgttgtgtaaggcatatatgcatttgaccctgacttattgttacctacggatcaggttaggacagaattggagagactaggatgcaggatcagaacaagctgcgacgtaaaatctgtttcgacatccgaaaatggttgtgtaactgttacaagtggagatgggtctaaagaagtattcgataggtgcatattggctatgcacgccccagatgctctgagattgcttggtgaagaagtaacgtttgacgaatctagggttcttggtgctttccaatacgtttacaggttcgaaattcaaaactttatatatcatcctcaattaaaaaaatgaagtgattcattaaatttttgtcatcaattgcagcgatatatatctccatcacgacattgatttgatgccaaggaaccaagcagcgtggagtgcgtggaatttcttgggaagtacggaaaagaaagtatgtgtaacatactggctcaatatacttcaggtatacaaaaacaatctacatgcttttaaataccggtttcgcaacaaatcaatgactttaagctaaaccttgatgatatctactggtgtagaaccttggcgagaacagtgaaccattctttgtaacacttaacccagacgagaccccaaagaaaacgttgctcaaatggaccactggtcaccctgtaccttcagttgctgcttggacagcttcacaagagcttcacaagattcaaggcaaacgtaacatatggttctgtggtgcatatcagggtaaatcctagattttaataacctaaaacaaatcaattccctcttgtccttgtctaataatctctagctaaattttctttcaggctatggtttccatgaagatggactaaaggcaatgatcaaattctatacaatcaaagctctttctctttactccacattacattttgtaatataattcactttgttaattgtctaattcaggctggtatggctgctgcacgaggtttgttaggcaaagaaactgctcttctgaacaatccgcgacatatggtcccttccttgacagaaacaggagctcggcttttcgttacaagattcttgggacaattcatatcaaccggttctgtaacgtgaggctcaccctaccttctcaacttagattatattatgttagattattacttaccgctatggacttaacagaatactagaagaaggaggaacaatgttcacattcggagggaaggattctacttgtcctctaaaatctatcctcaagattcacagtcctcaattttactggaaggtacatatatataaatatgacaatgaatagttggaatagtcttttattattccatgatctttgaactttgattcttgattcttgattttcaggttatgacacaagcggatttaggacttgcagatgcttatatcaatggagatttttctttcgttgataaagaatcaggacttttaaatctgattatggtacataatatatacatgtagaagcatagatacttgagtttttcgtcttttcgagtttgtttaattaatgaaactttctgcagattctcattgctaacagagatacaaaatcaaatcttagtaagaaaaggtaaaagctttgaatttttctgcattaaggattggcatgcaagctttgtctcctaagcttttcaattctcgcaggggatggtggacaccgatgtttttaactgcgggtttagcatctgcaaagtattttctaaagcatgtctctaggcagaacactctaacacaagctcgtagaaacatttctcgtcactatgaccttgtatgtagcttgaggccctgagcctccatctctcttatatctctgtttcctttttgtttgagttcataatcaaattctctgtttggttaattcacagagcaacgagcttttcggtttcttcttggatgataccatgacttactcctctgcagtattcaaggtgaccatgaaatgtttttagggaatttttttttttttttttggtttctctgacttgactatgattctgacttcaaccattcacaatgatcatagtcggatgatgaggatctgagaactgcacagatgagaaaaatctcgcttctgattgataaggtaaagcattttcttgatttagaacaacaacttgtggttttttatctcttcttgaataaccgaagagggacatttcaggcgagaatagagaaggaccacgaggttttagagataggatgtggatggggaactttggccatagaagttgtgagaagaactggatgcaaatacaccgggattacgctatctattgaacagcttaaatatgctgaagaaaaagtgaaagaagctggacttcaggtttacataatccatttcttgatctgctttcttatctccaaggctatgtatgactaactatataacttctgaatgataggactggattacttttgagctccgcgattatcgccaactatctgatgctcagaaatatgacagaattatatcttggtaaagaaaactctcattttccctctgttaatatggctctgtagttaatctatcttataagatgacatttttgaacattttagcgagatgctagaagcggtcggacatgagttcatggagatgtttttcagtcgatgtgaagccgcacttgcagaaaatggcctaatagtcttgcaggtaatatatagctcttccttatttctcttccgagacattatcaaaacatttcataatcatttgagcctttttatgatgttttgactgtaacagttcatatcgatacccgaagagcgttacaatgagtacagactaagttcagatttcattaaagaatacatattccctggtggatgccttccttctttagccagagtcactacagccatgtcctcttcttctaggctatggtaaaaatgtttgtgtataaccttttccgcaatctctttgttaaatcaatctaacacttaagttaatacagcatcgaacatgttgagaacattgggattcattactaccaaacattgagattgtggaggaagaacttcttggcgagacagaagtaagataaaaaaaatatttaaagcatttcctctgtttttgttctgtttactcatattttcaacataactattattggtgcagacaaatcatggctcttggatttgatgacaaattcgtaaggacgtgggaatattattttgattattgcgcagctggattcaagactcttactcttggaaactaccaggtaataacattgacatagaccattaaaaataacgcatgattctttagtttcatgcaatcaaatgtgaggttttgacaactttgagtacaatacattgcagttggtgttctcgcgtccagggaacgtagctgcatttgcggattcatacagaggattcccttctgcttattgtgtcacctgagaggcatccacaacgtttgattgcttatatttttcgatctatacaatgtttgattgacctgaaatactagtattgattattgatttgtttggtgtgccaatttgtgaaagtttgttgaataaaagagagatttactttggaaaaaaataagcagtactcgtggagctttatgaccaattcatacactccatgcacaatcttgtatgcgaaacctttttgatattctatctgccaaaggattcactgtcaagtatttatctactccaatctttacaatagtagcattagttaactataaaattgccaaaagctatagctcacctaaagtatacagataatatatttgtgacttgatatttgttgacagcagtgatcaacaacaaaccatatatatagtagtaattaataatgaggagaagctcctctattaatttttgatgttctttaaaatactccttgatgaccaaaaaagagaatcaagggtattttatgattttcaaaagatttgtttttgcaaaaaattattgaccggagtaattattctgaaacaaaaaaaaatatatattttttctgccaaaagaaaaatattttaaaatattttttttgagattttctaattaaaaattcttcatagtagagaacatataataaaataaagttttgtttaaaaaaaaatagattttaagaatatagactcaaataaatgcgtcaataaatgtcaagaagtggcaaaaatgtaggtaacttacaaattttaaatcactaacagaaatctcaaaaaaataaaaacaataaacaaacaaaatccgttctaaaactttcttcttcttctctctttcccttcgtatcttcttcttcttcttcaacctctcgatctcactgatttttctcttcaacaactcgatcttcccttcctatttttcaattggggtcttgcaaacgaatatctgctttgaaattgaacgaaattatttagttttggtggtttttcttcgacttcaccaatctgttgaactcaaggagaatatatgagataacatcagtcttcatttctgtgagtttctataatggatcagctcgttaacttcatcattcgacctccaaggttaatccttctctttccaaaattaagaatttgggtttttttgtgtttccaaaattctcaatcgttatgtgtttgttagattcaatcgttttaaaaattgggtttttatcgttgatgactagaattttgttgtttatgtaagccagagaattttgtggaccgcttgcaaatttgtcttcttcctaatttcataattattctctgtacttgacttgagtttctgattagaagaagaattatcaattcttctctttttggccacccatgtgatctctctgtgtcgttactgaaacttactattcagattcgactgggagggtcctaattctgaatcttcatcttttggttttgatatgactctgtaagacttaagattgggaagttactaggtttgaagataaactagaaatgtatctacgtgattatatatatccatcagaagatgattgttaatctcagatttgacttgcttgtgtgctgcagagctgagtatgacccggaacatgatctcttggaaaagaagtttatgatgaaaggtagatggtatcagagaaaagatttagaggtaaatgccttgtctcttctgaattcttctgtatctacgatagtaataaatgggggttgtaacaatagaggtcctaccgttttttgttcttgtaaagtcgatgtatttattgaagtaagatgagagtatatagtttttgaaacttgtgatggtaataataagcatacgaaagtaatagaaaacttggttagtaagtgaaaactgttttcattagccattttgttttcttcctggcttgagtgttatttcggtgtgttgttggcaggttaaaaacagtaggggagatgttctccagtgtagtcattatatgccagttgaacgccctgaaggaaagcctttaccctgtgtaatatactgccacggaaacaggtactggaacgtttgttaaagattttttgagctagttaatacctattaattatcaggaatatgattgagttgtactactcatgggcctttggtttacttttggccctcttgattcttcgcattgcttaatggccctgcaattttatcttatagtggatgtagagcggatggtagtgaagccgcaattgtgttgctgccttcgaacatcacagtttttacccttgacttttcgggatcgggtctctcaggcggggaacatgtcaccttaggctggaacgaagtatgtgctcctttaatcattcttgtttatctcttctactcttcaaaatatattgttactttgtaaacatgtttgttcaaatttattccatttttatttatttaaaacccgtgtaaaccaatatgattgtgctattgtctatagaagtaccctattgtcatcttgatgaagacatatttcatttgatttgaaggctatagaaactctagttcatgtttagactgacaagtggagaaatcatggaattcatgttgggttttagtattggtctttgaccatgttaactgtgtattattcttcacccataaagtcactgtttacataattctgagttattgagtggtttttcttcttactaatgttaaacctgatgtgagtgcttgcagaaggatgatctgaaggctgtggttgagtttttgcggcaggatggaaacatatccttgattgggctatgggggcggtcaatgggtgctgttactaggtttggcccagtctataatttgttaatttactaagagcttatcgtttttctgctttgcatgaagtttcagttgatggtatgagactgtcactgtgtcaatggaacttaattataccggaagtttacatttgttgtgaagcttcattagttttagagggtagaataggtgctgtgatagtttctggtgattagtcatagctatcacatgtcacaagggaagaattataagagactaatgtttgagataagcaatttatcatggcaatcacttgtactgccttaaactatgatagctttgtgttgaatcgtccttttttttgttacagcttgatgtatggagtcgaggatccttcgattgcaggaatgattctagacagccccttctccgatttagttgatctgatgatggaacttgttgatacatataagtttcgtctgccaaagtttactgtaagtaaatgtatattttggtgggagttgttctttatactgcaaggcttccacatgtattcagctctctctactgtatattcaggtaaaatttgctatacagtttatgcggagagctattcagaaaaaagcaaagtttgatataatggaattgaacaccattaaggtcggtcctctacctgtttgtcctttttatctacttgagtgcataaatggtctaatatatacaaacagcatcatcattgcttttcataatcatcctgctagttggtaaagtatttaacagtttaattgtttatcttccatgattcaggtggcaaaggctagttttgttccggttttatttggacatgccttagatgatgactttatccgccctcatcattcagatcgtatatatgaagcttacgtagtaagtttccaattcttgatagccatccttcttcttacacatgttcatcttcggctagcttcagtataaacacctggcttatgtttatgatggtagggtgacaaaaatatcatcaaatttccgggagaccacaactccccaaggcctccattctattttgattcgatcaatatctttttccataacgttcttcaacccccagaggtggtggggccgacattttatgacccattggatgattactttgcaaatgtaatgcgactgtggcacatctgaacgtttagatttttgtttctgcctaagaaacgtcaataacgatgtctattttatgttcagggcagttggggaactatgaatgacacaaatattccacaatcctctgtacagaaaagtgagtaatacttgtttttctcttaagcttctggtaggttttatttgagcttaaaggcgacatgttctgtcaatattcaggtttagccgcaggtagcatctctgaggcaattaatgaagtccgcaagaaacgacccatgagtcgcacagatgtaagtagttctccactaatctgggtctttttaatacttatgcatagctttggatgttttgtttaccattattagtctgataccctagcaatggttcaagcaatcaaatgcttccgactcttccaagattcataatgcctgtagtgcaaaactttaggacgccatatttgtctgtttgtagagccttacagaaagagtataaagcttgctaaacttgttacctctaaaatatacttgaaggttctggtttgtaatcttgagctttctccatcgcattttatatgccttttattactttcttcaggttccttcaaatgtcacactcacatctaacggttctccatcagaaactaaggtataagatcagtttctcttcctttccttatttcctttctttgttgtgtttatgattggttaccatgtcaagtgtatggttgtttgatcatatagtggttcattcgatcaatgatggttgagacacaagtgccatggtgatcagcttataatcgtgtaaatataaatgaatgacataaaagagaagaaagagtggaattcatgatgtggcataatgattttgtttcaggaaaaagagaatcctgatggccgtggcagttcatcgtctcctgatatgataagctttgatttgtcagacggcaatcaataccctcctcaccttaggatggctttagatgatgatcaatatgttgagtatcagatggaggacatggctgatttcccatctaatgcagaggaagaagaaagagtaagacccaaaaacagttattatgtctatgttctcttacattctcataatcttattactttattcagatgcttatgaaagcggtgatggaatcgttgaaagacttggaagtgcaaagtcaacagaaaaaagaacctcctgagacgagaattcatggcggctctgcttttttaaatgcagttcaatgcatttcatccagggaagaatcaacttcaactcgagcaaatcaatcagagactgattctgcttccagtccagtaacacgtagccaggatcaactaccgtcatcttctgagtccaatcctcctagtgagacctcgagttctctggcgagaaccgtaacctcttctgttcccggctctttaagccagaaggaaagcgagactggtgacgtgccaggtacaaaggccaccgtgacagtggaacgtagtagtagtgcaccggggaaagtcttagacgggttaatacgcaggtgggatcttaactttttcaaaaacaacaaataagtccagttatgagtttggtcttttaactgggtcaagtcagtgctatacatattggttcaaaaattagaagggtttctcatgataggttaattcgttgttggctttggttattcaaatgtttacatatgattttattcaaatgtcgtcttctcttgttggctttgaacaatttgtgcagatatgcattgtgttcgtttgtgttcgttcaagtgctctttatcatctttgttacaaaaatatgttgatttcaataattcctaaaagttcacttaataatgtcttttcttggacacaatctttacattgatctcgtccacaacaacaatcttcttcctataataatcggaaaattgaactataggtttcagacagtggcagcagtcagctttgtccacttccggaaaattgtcataagcaaaagagatgcggactggcaaaacatcccacatatcagaccgatccataaaccctgttttcatcaaaaacaatatcaaaataatgaatcaaacacagtttagcaacaacaaaaatcttttaaaagtttcataagagagtctaacattcaccttggcatgaagcttcaacttgaaaccacaaaggactgaaataggcattccgattaagtagaatgttcccaaatttataaccgtggctaaccgctgccatccgcatcctctcgcaactcctgtaaaatacattaaagaaatgagtttcttcgcgcttgatagttcaagaaagaagaagattttcttggatctttatacctgataaaacaccttggattgaatcaagtgttatagatgcagcaaggaaaaaccttagtgatgcaaatccctctttaatcacatggctattgctgaataaaccaacccaggcatcatgacctacaagtatagcaatgactacaccgagagctagaactaaagacaacttaacggagaccgaagtcgccttctttgcgccttttacatttcctgctccaagttcgttggacacacgcgtactgcaaagttttcgatttttaattttaatacacaattatgagaggaatgcaaaagtattttgaaaagattgatgagtttagctaaccttgtagctgcactaagtccgcatgttaacatgtaacttattgattccgtgttgacgctgaattattttaacattacacacaatgagcaactttgttgatgtaaattaattaactataatagtgatattaaaaaacttaccatatagctaccaaagaagtggtgatttccggatttcgcatcaatcctgctaagaacactagaatctcgaacgcccaatattccaaactgttgcaacaatatagtttcttaaacttcaataagcatatagagttgagtgtatcacaaatacacaatgatgacactaacacaaaccactaagctacacattttggtcaataaagtattatgaaactgacttaccataccatagcagcagaagggatgcttaatgtcaagtttagtactacatgatgaaatgattccatcgaaaatccggtccatgtttccttaaacttgtccgaacaaatcacataaaacccgagagaaacgaaagctatccacaatgaaatagatgtagctattggagcaccgatgaatccaagcccagctaaatgcaccagagcatatgtagtaccgatattaatcaccaagggaagaaacgagaataaaactagcggagtaacgatgcattgtgtttggcaaaatctcaaaatgttttgtaagaacccgtaagcgagtaaaccgggagctaggtacttcatgtagagtgcagcttgttttgagatgctaggatcttgtctaagaagtaagaaaaccgattccgtgaagaaccataagatggtgatgagaatggtgaagactaatgaaacaatgcaagatgattgtagatgaatccccaacattctatagctttttgcaccaaagccttgtccacacaatgtctcaagtgctccacttaaccctgtctgaaaattaacaagacattaaatgtctttatagaaacaaatacccatataatgcatagaaacgttctggttaaggaaaacaatttagacaaaacgcataagcccatccacttgtcccttttagatctccttaaatagcaaaacaaaaatgaaacaatattaaccaaatttagagaaatgcatggataaagttgaatccaaatttgagtgtataacctttttatatatataatatattagcctatctttagtaacttatgcatgtagtaagcaaaagaaaatgttggatgcaaatgaaggttggaggataaggagataatagtaccatgaaggcaaaaccggtgacggtagcccaagaattggctagggtagcaccggcgagctcgagttggccgagttgagaagcgaacatcacagaggttaaagggatacaataatagaaaagattggtgaatatcattggtagagagtaaatgatttgagtctttgcttcttcaacgtcaataagtttttgaacaaaagttgatgatttgtctcttcctccttcaccatcatggtcatctttggacgtgggatcagccattgtatcttcaaggaatttggatctggcgaagagtaggagaagctagacaaatttttatttgtaaaggtgaagaactatataaggagtaagtggagagctttttaattggatatgttcaaagggcctgtctctgtcagaggagaagccaaccaatttcgactctccatgcacaaacacgagggaaaaaaagaaaagtaagtataaaataagaaaggtacgcaaaaatagtttatgaaaatattaaacacagaactaaaatattaagacacagagacacatttatgaatttaatattaacactcatgaatcatgactcaccaagtagacaaagccagaattagtgcttggattaggaatcaagtgttatgtacatatatttgatatatatatcatctttagtttctttttataaaatcttgtaagtatatacatcttattcttatgtatattaggtattttaacaaaaaaaaaaatgtatattaggaatcaagtggatatatatacatatttaggacttagcttctgattatgatgtgtgcaagtgtggtggtccttctgccggctcaatattatttagaggttttgggaggatttttctttaggccgccctatagacattacaatggctgatcccacgtccaaagatgaccataatggctgatcctaccattaccaaattttatttataattgtttaaattctattttttttttaccggattggtttacagtaatgatatggttgtgccattatccaaataaaaaaaaaaccgacattataatggaagagtttttttcgaaaaaaaagaaagaaaacaatataatggaagaacaaaaaaaactcctagagttcaagagttggggccggctgcggaaccattgtagctcccaccaagtaagccaaccctactaccatcaagtagtaaagagttagtttccggccatcaaaaaattcaaaataaacggctaacattttagagaatattagtctggttaaattgtcttctgacgctgatggttgatgtaattgttaatagtgtgctgcactgctgctactaatctttgacttgctaagactcaagagcaggtagaagctaaattctagataactcacgttgcgtgtaaggaatggtggggaagatcttcccttcctatgagagtctaagaactccaattcttttgactaaagaatctagcaagattctcccataatcaacatcattgatgtattcattattaatcctagctagtttaatcttcaaaactttgataacaagactgaactaaagaagcaaaaaagcaaaggtaaatggaggcataaacataatttaagagaagagatgtatcaagatgagaaaatcttcactagtttgatgaaaatatgacatcttcattaacgaaatgtagaacaaggctcttgagtctctatacaaattagagaaaactcaaacttatattaaaaatcctcaaaaacaagtttaaaccatgctggcacttcaaaatttgtgggatgacattgcctatgtcgatgtggaggccaatctgatacttgcatgattcttcaactttcccgctttgatctacctctgcccgatgtaagaatcgacgtgtgatttgccattttcttgcatgggaccatcacaaggtcgatgtgggtcagggtgaacgatgtgagatctaggagtctcataaacttgtgttctcccttaaacgtcttttagcttgatccattccgctacatgctatgttgcttctcccctttattctcaaatgtaatccaaattttaatcttttgtaaggggagaattataaattatgaatttaaactatatattgtatatctatctattgaaacccataattacaaaaaaaaactaaaaaaagttttctagtgccgaaattcgatcccggaaacttttcaaatccggaaagccatcaatcaattaaaccggagaaacaacaatcgagataaattaaatccttgtgttacagcggatcttttgataagcaatgaatttacactgtatatatatttacacaaataacaacagataaattaaaaaagtttccgctgccaggattcaaacctagaaagcgatcaatcgattaaactagagaaacagcaatcaagatgaattaaacccttgtactacaacggatgtttttgataagcaatgaatttacactgtatatatttttacacaaataattacatatttctttttaaaaaagttttcttatgccacagatcgaatatgagagacgaattcttttgataggcaatgaatttggtttgtggatttcaaatttaggaaagttatcaatcaagatgaatttaaccattgtgctatagtgaaactattgttaaactaggaatttacactatattagggaaagactaacatgaccgaataaatgaaacacaaaagacgactaacattaacgaataaatgaaacacaaaaaaacgagtttaattaggaattgaagttcagttcaaaattagaaagatttgtatcacgaaagttcaacatagcaaaacaatagatgagatcgaaccatgtgacataacgaggtttaattaagcacaatcctagattctattccttagcccaccaaataacaactacttaagtttcatgacactgttttatgttaaacttctatggaaacagtgtcaagtaaatcaattgatggcattcgtagattctattcaagtcaatcacctaattatgttaaactctatctgaaaataagattatgtaataggcttactaatcatcctagcatcgcctcatggctaaataatggaaaacttattagatttgtgttaagtaaattcataacggccataacctcctttaggacatggaaaagcctaaatgaactgtatgatcaaacttaatcttgtggagaatgatcacacatcataaagatgagagaagatttgagtagtatataaaagacattggataattcattaattaccaattggttttgagttggaatcccatgaaacttaacatgataggagagtccaaacacacgttgtctgactaatctggccagaaagttgtctgagcattctactaattgatggtttaaatgaagattcaatcctatcgagatagatagaaaatcattatttcgaagagacgagatagattctatcaaaattaatggccagaaaagctattattttgagaaaacgtgtggacaaagatctcatatttaagctagctcattgccagaaagcaaacaggataatatggagacaccagaccagacgtgtgtaactaagcaagagaaataagtttacatagaaagcatcaaaatttctgattttagcacaatatgccaaaaaaatcgccaaaaatagtaaaacgacgaggaattaaagaaatagaaaatgagaaaagtttcttgctgacgataacgaaactagtctagtaaattgaagaacgcaactaagaagaagttggtttcaaagatagcttagaatgatgctgtaatattcaagccatgaccaactttgtgaaccagattatttcccttacactccaaaagaataaaaagaaaactaagaaagataaatcttaactaagcgtttggaaaatgatcatgagttccaaatatatatcttgataactgattccatatctgcttaagaaaataaatgtgcctccgtagaaaaatggaacgtaactagagttttcagaccgtagcaacattcagctttgtccacttccggaatattgtcataagcaaaagagatgatgattggcaaaatattccacatatcaaaccaatccacaaaccctgtcgccatcaaaataatgaatcaaacataacataatcaaacaaaatttactaatcttattatagaatcaagcaataccttggcataaaacttcaacttgaaaccacaaaaggcggcaatcggcattccaattaagtagaatgtcgccaaatttataaccgtgactaaacgctgccatccgcatcctcttgcaactcctgtaaataaatttaacaatgatttttaccaccctagatgagtaaaaaaaaaaaatatatattggatcttttacctgataaaactccttggattgaatcaagagttatagaggcagcaagaaaaaacctcaatgatgcaaactcctctttaatcacatagctatcgctaaataacccaacccaaccatcatgacctacgagtaaaacaattacaacgccgagagcaagaactaaagacaactttacggacacagaggtcgccttctttgcgccttttacatttcctgctccaagttcattggacacacgcgtactgcaatatttattttcgatttttacatttccgaaacaatatttttcagcaagatggaatacaaagtattttgaaactatctagtaaaatgagcaaaccttgcagctgcactaagtccgtatgttaacatgtagctaatcgcctccgtgttgacgctgaatttatttaacataacacacattgagaaatttgatataatagataaaaaaaacattaactaccaaaaaagtgatattaaaaatatatattttttaccatatagcgaccaaagaagtattgatttccgggtttggcatcactcctgccaagaacacaagaatctcgaatgcccaatattccaaactgttgcaacaatatagtctcttaagcttcaacaagcctaatgatatttttttttctttttgtcaacatgtactatttggttttgaccccgggtatgattacattgactaatataaaccactaggctagatataacggtcaagaaacatatatacttaccataccatagcagcagaagggaggcttaatgtcaagtttattacgatataacggaatgattccaacgaaaatccagtccatgtttccttaaacttttctgaacacatcacataagttccaagcgaaaggaaagctatccacaatgaaatagatgtagctattggagcaccaatgaatccaagcccagctacataaacaagaacatatgcggtagcaatgtttatcaccaagggaacaaacgagaagatgactagtggagcaatgatcgattgtgtttggcaaaatctcaaaatattttgtaaaaacccgtaagctagtaaaccgggagcttggtacttcatatagagtgcagcttgttttgaaatgctaggatcttgtctgagaagtccaaaaatcgattctgtgaagaaccagaagatggtgatgaggatgctgaaaactaatgaaacgatgcaagatgattgtagatgaactcccaacatcctgtatctttttgcaccaaagccttgtccacataatgtctcaagtgatccacttaaccctacctgaaaacaaagagacattaatgtatgtcataaacaagcacttatacatatataccgttggccaaatgttcttgaagatgtcgttaataaaaatttagacaactcctaaaatcatctactagtcatttatgtcgaataaatcattttaaacaatcttgattcttgaattcgagttcgagtctattattgagatggaaataagtgggttttagtaacttttgcaagtagacatcaaaacaagattttaaattacaaaagctaaagaaataaggaaataatggtaccatgaaggcaaaaccggagacggtggcccaagaattggcaagggtggcaccggcgagctcgagttgaccgaggtgagaagcaaacatcacagaagttataggaatacagtagtagaaaacattggtgagtatcattggcaaagagtaaatcatttgagcttttgcttcttccacgtcgatcactttttgaaccaaagttgatgatcttgatctccttcctctttcatcttctccacctacatggtcatccaacaacggagaactcgttgccggatcagccattggattttcttgttgaaggactttgggtttggttaagacttgaagaggagaattgtgatttggcaaggtgaggaattaaataagagatgtacgcagaaacaggatattaaataccaacacaagaggcctctctgccatttactgccacattataatgcaatataaatacattttttaattatgccaaaaaagattcaatttattacatcctcagactaattatttttggatcagaatcaataatcttaaaacaaaatgatgacttaaaaagtcaaccaattaaatttgcaatgtactataatcaggcagctcatgagtcatgaccacccgattaccacctcaggaaactttgaacattggacttaacttatcgttaaaattgtgaataacaaaacttcatcaattaagaaatatttctatattacaacaattcacctgtttcaagacatgcataggattggtattaaaatacaaaagtaaaactaatgaaaatttgtatttgagtttttttttttttttacaagttttcattagttgtatagtcacatttagagagagtatcgtaaagacgtcgtcacctagttaccaaatctataggagaacttttagatttaagaacgttttccatactcaaactcagagttcagatatggtaccctctgagcaaatatttatgtttgtatctgattcgtgaaatcgaggactctgatgccataagattgaagaagtttccatctcacaaacatgcctcgtttatttcattgatctgattctgtttttttggaagagagtttgtttacaatttttatctgattctacagctcatctccagtactaggatccaattctagtcagattcatggttactcatcttcttgtttttttctgaaccatggttacttatcaactagaaccaacaaagacagataattatctgaaatatcaatacaagaatccatatttagaaaaaaaaattatttttaatcatcaaattaataattaaacagaagctggtgaaactaacaactatctgttaaacattagttgagaattgctaattttgtcaaggttttatgatttactaagaggtcgatttttcaaaaaacaaaaaaaatcgtaatgcagatgaattttaaagtagagctaattcattagtcatagagaaaaatcaatttagaaagatttatatagctgaatttggggatgtctttatttcaatatcaacaacataaataggcttaaggtccaaaggaacattaagatatttctagaacgtcttaagtttaactcaaactgatgtttctcagactgaaacgaaacagagaacactagccacaaacatgacaaagcaacataaattaaagaagatactactagttacatttattatttaaagagtactagacatgattttgggtctccgctggttatgtgcaaaccaaagcttagaccgtttcaagttctcacttgagatagtcgatgagccaagcgagcatgtccttgtgagcttccattgcagcttcaacttctgatggatcattttcattgtatctaacagtccaaccgtgtttgcatcttgggaatatcttcacaaaactcttcacctgaaacatatcactttgctcacaattatctacttgaagaagatatctacttccaaaaacacatcaactactagttgtgtttttgtaagtaatgaaaatattaccttgcataaagacatagagctaagcaaagtacctgaggtttagaagctaaaatatcttcgaactgcctcacaagttctggaggagacacttgatcgatttcagctcctaatacagcaattggaaggttgacctctgcttcaatcatatagtgagagtcataatcacaacaaatgagagagaactatcaagtaaggagtggccatatcaaagatctaaatacccttgatatcatccaccgtaacgcgagcaggatgtaacaaaacagtagcgtcaacaagcttttccttagctagttccaccgcaacttttgctaaagaataagaaacaaaaagtcttgtgttaactaatatacatggttgacttattatacagatcatggaaaacattttcataaaactgtggtgatgatgggaacaagaaaaccgaactcaccaccccaacagaaccctgctgctcctatactagttatgcctttgttcttcaaggcctccactattggctttgactcctcaaaccctttctcctacaaaatccatagtctggtttcagatacattgacacagaacagtacaaaaacactgacttaatcttagctttgcaatcaacaataagtagtgatagcattttggcactaataataagggattattgggatacttggactatttcatgctgggaaacaaagactcatttatgtttttgagaaaaattgaggattgaacatttaataaggaaaagaaactaactagttcatgatctttcatccaaataggaaacggacgatcctggttctcgggattataaggatctccatggaagaaatcaggaaccaccgcgtagaatccagcttctgcaaccttgtcagcaagtttcctatcaagggaagaacaatatccatgacaagttacagcaagaatgaaacatctttcgagtgactataaaaggtgatataaactataactcattataacaaagaatctgaagtaaaagactgtctaacaatcaacaaaagacaagctgattcagtagggattctctgttacagcacctcaggtttggagtttcatatcctgcagaagaaaacgttttagattctcaaatcaaaccaacaaattcagaaagaacatcaaacgtaattgggacaggtaaaaaggtttttttaccgaaaacatgagggacaagaagaacagcaagctttgaatgagtggaaccacagacgtaggtgtcaaggttaccgagtttctcgacatgacccgacccgctagttggatccagatcaggcgggttctcggtgcactgatgacctgacattcttgttttcgccgaaccaaaaaacaagacgactcctctctcgcgctttgggacctctgttttaaaaagtaaagccaccaaaccacctttgacctttcacaccagttatctacactacgtgtgcgtatctactcttccacctaaaaaaactcacgtgcgttaaataaaaactaacttttgcaatgttaatttttcttagaataaatttgctaaatggggtaataccttaccttgaatgattgaatgattctatgcacttatgcagagtaaaaaacaaaacccaacaatcaaagattattctaattcaattatcaattttatcataacaaacaaaaactcttttgacaaattatttatgtggcttcctctaattatctttaacttttttttgtttaattcacaatttatgtggtcagatattttttcttccttccacaaggtgttgccttgaaaatcacgtcggaagatcacgaggaatcgttttgcgtgcgccacccaaacagacaaaacaaaaacacttcttttgttggttccttgtcggtttccaagggtttttgtttagggttttcattttctttttccttatctatctaatcctctgtttctctccacatcaaaaaaaacctcaaaattaagagacgaattcgagataatgggttcgcttaaggaaggtcaaggaagagacatggaagaaggtgaatcagaagagccgcttttgatggctcagaaccagagattcactatgttccccattaggtacaaatctatttgggagatgtataagaaggctgaagccagtttctggactggttagtcctctttctttccttgaaattttcttatgttctctgttcttcttgagtttgaactattctcggagttgtggtggatacagttttgattaagaaagtttgtgactttgtaaatgtaaagcttcttcttttcgttgtttaggattttaatgtaatatagatgttccattttgattgtggtttgtggaaaagaagatgtttttctacttgtaattctgattctggttcagagaatgtttcatgtgtgtgatagttctgtttctgtcttatattatcatcaattgtgtgttttgacttctttgaattaattgtagctgaagaggttgatctttccactgatgtgcaacagtgggaggccttgacggattcagagaaacactttatcagccatattctggcgtttttcgcagcgtcagatggtattgttttggagaatttggctgctagattcttgaatgatgtccaagttccagaggtgaggattttcactttgcggaatattgaaaaaactgtggctttaaatgattttttagtactgttgtctgacttgatatgctgtggcaatgtaatatcttgaagtcgacacttgctgtttgatttgagatagtcaattctctggatgtttcaggctcgtgctttctatgggtttcaaatagccatggagaacattcattcaggtaaggcttttgctagtggaaatattcattagggaaagatgaaaacgatcctcttaatggataatatgttgctgtttaccttccatgtagtcatagtgagaagaagaaaacaaaaaagtttaactttggtcatggtgaatgaacataaatatctgtagaccaaggtataagacttgtaaccagtaccctagaggagtttgatagggtttggttgtttaaagatttaacggaatatccttagataggaatatgacctgggtcattatcttgtaagaaactgatttatgacatattttcttatgacaaatatcagagatgtacagcttacttctggagacattcataaaggactcgaaggagaaggatagattgttcaatgctatcgagaccattccttgtatatccaagaaggcaaaatggtgtttagattggattcaaaggtaactaattgttgttgtgtttaattttctggttgaagaaacaatttcatgtgattaattgtaaaagataatcctaatttgttatctgtctgtaaaccaaccattctctgcagtcctatgtcgtttgctgtgaggctggtcgcttttgcatgtgtcgaaggaatcttcttctcaggaaggtatgacgtctttgaaatcataggcattgagaacttatcctatataagctctggtgtataagaatttcatgtggtttggtcagcttctgtgccatcttctggctaaagaagaggggtcttatgccgggtttgaccttctcaaacgagcttatatcgagagacgaggggctccactgtgactttgcgtgtctcttgtacaggtaagaataggtctgtatggtaacagcaagccatactgtgtttattgagccatctctattatccattcactccttatcatacattgtgcagtttgctgcagaagcagcttccattggagaaagtttatcaaattgttcacgaggcagtggaaattgagacagagtttgtctgcaaggctcttccatgtgatctgatcggaatgaactcaaacctcatgagtcaatacatacaatttgtcgctgaccgtcttctggtaaaattgttttccctctagtttctggcattttgaaacatgaattagctttttattcgaacctatggtttttgtcttggtttctgtaggttaccttgggatgtgaaaggacatacaaagcagaaaatccatttgactggatggagttcatatctctgcagtaagtagtcgatatatatcgctgagtttctctcatctctaggatcacaatgctaagataacatatcaagaacagtagtgtatcttcattgactaagttggttttggtacttttatgacaaatttgcagaggaaagacaaacttctttgagaagagagtgggagagtatcagaaggcatcagttatgtcgaacctccaaaatggaaatcagaactacgaattcacgactgaagaggacttttgaatgaatccgccatcgaatctggaagggctcatcaaagtttagattctttatgagtcactctcattctttttagcccaaatccattagtagtagtctagtaagactagtagtagtagcaatggatgttatttgtgttctctatttcaccatcacttgtcccttctccattgtgtaataatattactatcttagttaatcaaatctataaaaaaaaaaaacattaatggaacaaaaacattacaaaaagtaaaagtttaggacttataaatatctgaattaaagaatgataaatagtcgacagcaagttatgactttaaacgcaagaagccaaatacgtgtctagttaaaacatgtgacatgagaaaacgtgataatggttatttaacattaccaccaccaacaactcttaggctgctactaaacactctagcttaatttaattattgaactacttgaagtcttgaactagagaagcggtgcaacatgttaattcgttggagaaacatgaaatgatgttatattatatggtgcgacttagctgtacttttgagtaactccacaatctcattgacatgttttttctagaactcccacttgaccaccttttttcaaacaaaaaggcattgtttatgatcgttttatcacattatatagaagcaaaaaagccgattaacttcgatgtattagagtgacacaaaaaaaaaggttataggataaattttagacgatgaggaaaagtacaaaataaaatgatggaattgttttaccaaaaaaaaaatgatggaattgatgttgaagaagagaaggtgtgcaatctaaatcagagaccacaaacgccgtcgttttcaaacaactggataggaaaaacaaaagatataagccactagagtgaatagtgtttgtttgtgtgttctcaccaaccaagatatgatgattcttttacttgaacaagacatcaaccaaacacacaccttaattaacagaataaaaagggactttttgttttgggtctgatctcttctccacttattgtttcacgaacggttttagagatttgactaattaaatacaaatcgaattatattatgttttgttattctccaacatgttatttatgattagttaactgtcgtttctagatctaaatcttgattagcaactttctagaagttttgatcattaaatgaaagaatgatttaagatgtagattgtttgttggacttggaaaaatatactatttcttctgcaacaattctcattctatataatatatttatagtgaaaactttaacaacaagcataagcatgccttagacgtaaataaaataaaatcaccgactcagatctataaactgaaaaatgattgtttgttgaacagtgaaccaacaaggaattaacatcgtttagttcttgtttttctaacggaggaaaaaaaaactcttgacaattttttatattgccactgatgtttgagttaaactcgattaactttggaggtgaacataatttttcgtaagagtttcccgcaagctcgtctcagtaaaaaaaaaaaaactcaaatctaattttacgagttcaaatgatcacacataacaatttattgaaaataaataaatccataatctctacgactttacttcatgactattggaacgtcaaaaccctatcacaacaaacgggttaaacttccaactattggtatataaagataagaaatttcacaaaagttagattacatggtacatcacaattcaagatgtgcagtagcatcatctccacctactcctaaccactatctttttcactcacttttttcctctcaatattatcctattttgcattgatttgtttacacttggttaggaaaaatggaaagaacatttgccatcagtttctgccacttaaaacccaaaaagttaaattaatcgaattcggttattttcgaattctagagtcagaaccgaaccgaaccgcgacatctatatcagttaatttggaatagttttcaaccgaaaacccgattaaaccgatccgaataaccaaactcctatgactcctcaagaaaatgatttgttttgtgaatagttgattccagctaatgtggtgaaagacaatcatcttacgtttggtgattgtatcaactacattgatgaagaagggaacttagtaggacaaagagggaataagcagatgataggatttgcttcaaaggatgcatggcgacataatttgcagaaggattagacataataacatgaagatactgtcaagtatgagctccttcatgaacttaagtacgttcataattccacttgatccacaactttgggctattggtataaaaagctaactttatctagattacatgctacatctcaattcaagatgtccatttattaaagcaaaggcatgactttatcttcgactagaaactggtgatggaccatcctcaacctccactagcatcatctccacctactcctaaccactaacccaattatccttttcaccttttcctctcaacactatcctatttttaggtgatttagggaaaagagaaatactacactttgatgtaattttttttttaattgaattgagctttgaatactatggttaatatggatgaaagaaaacacacgttcctactaatttctttttctaaatgatgacgttttctcaagttacttatcgtagtctaatcggttattgacaaaaatgatctagacgtttgaaaatcattggccaacctcttcactagatagaatttttatttctaaccattacctacctgatacacacaccaagttctgaatctagagatgatcttgtctcatttgtttatagactaaagagtatataaaagctggattcatgtgggtcatccatcattaatcgtgttcttcaattcaccaacttcgtaggttccgcatcttttgtactttctttctatttttaatcttgcaatatcaaaaataaatatatacaccttttaaaaaaattctgaatatgcatatggtaatggtatcatcagaaaacattgaatattgaatcgtctatctaccaatctcttcaagttgtgaattttatttatcaaaaaaaaaaaaaaaatcaactgaaacgtcaatgttatgttttgcttcaatctaaagaaagttgtaccaaaaataaagtacttttttaccaagaaatttcggattgtagccaaaatatgtcttgttttattttttttgttcaccaaaaatatgttaaactagttttttgactttttcccccatgcgttgttgttgttattcggacgaccaatatttaatacagtattcaagtgtagctaagctactgattccagataaagtaaaaaaatgtctttgataccaacttcactttgaccaattatcgaactctttaatttcataatatatagctttgacaaatatcccatcagaattcataaatcgccacatgaatcttataattgtcaactatgtgcagtccaatattaatatcatggaaaactagattactagcatttaatttcttaattgtatttaggttatagacttaacatggtttttcttctagagcattttcactacatttttttctttctatgttattattttatgttttacttattgttacatccatttacaacgatgttggataaaatatttttaactgttcagtccgtaaatgactagctaaatttttacggatatatttttacataaaaaaagaaattatttttacgatttaccaatttaactcttctttctctctaagttttcatttattaaaaatgatagtttttttaagaaagttatttgtatttatttatttaaaattggatgcaaaaaattacaaaacttggaagaaatattgttaacccatctttatcagtatagaatttctgattactccctgcgttgaaaataagaagatccatagaacgtggtaatgtttttttttttttttttctggcaagaaatggtaatgttaatcaattagactcatgactaaagctggaaaatttgactaaaatggtattatcttgcattattacctaaaagctcttcttgcattactctttcatgcaaaattgcctccaaaagtcatacttcgaaatcatggctttgtaactcacccttgccaccatctatctaaacttattattgtttaaaacaaaattgattttcaaagaaaaaaaaaatataaactcccaccggtcaataacttttaattttcacttcaattattcataaaataaatatatacaccttgattctttcttaataactggagttattttgaatttaaattacttttgaaatacaaaagaaagtaagataattttgccatttaaaatgtctacaacaattatgttaacacttaacatacatttttagaaccaaatggtaatggtccactagttaaaagatttcttatgaatgtctttttatgcagagttcgaattttctcacaacgattttaaccattttcgtcactcgcaaaatttttagtggataacaaaaaaaaaaaaaagttgaaatttaatggaaatttaggagatttgtccaatttttaattttcccgattaatttaaaaaatctactttacgccttttattgacaaagatgcatattaactatatatatatatatatatatatatatatatatatatatatattataaactaaattttgtagaacccatcagaagaaatttgtacttttaactttaaaatcaattaaaaaatttcaattcaaataaaaaaaaatccaaaattgtttataaattcaagaaatataacacacaagttgacataaacagtggagagatttgtgaaatgtgaactcttttgacgtctttctcatatttcgtctcgggacaattcacacgcactgaatcatctctctcacgaggactattcagccatttgcaaacgcacacacaaacgcacacgcgtttatttttttttcgccaaatcaaatctgaagagttcctgtatcttttaaccgctcttcttcttcttcagagagcttcgttgattgaacggaaaaaatggtggttcctggacggagaaccgtctgggattgtgtgattgagctgacaaagatggctcaagagaactgtgtcgatcctcgtctttgggcttctcagttatcatcgaatttgaaattcttcgccgtggagttaccgtcgacggagcttgcggaggttattgtttcgtacatttgttgggataataacgttcctattgtttggaagtttcttgaaagagctatggctttgaagcttgtttctcctctcgttgttcttgctcttctcgctgacaggtctggattcatcgctcatggattgtttccttagggttctatgtgttgatgatttatttcgtaatttggattgtgagttggtgaattatagtttggaaaatctctacgattttgtgatggatcttagatttggttttatcttattgtagttctatgttttctgattgttgcagagttgttccaacccggtctacgcaacaagcagcttatagaatttacttggagctgctcaagagaaatatgttcaccattaaagatcatattagtggacctcactaccagaagtgagtttttttttgttgatacttcttacttactgtttcattcaaatgcttggctctgtaggaaaaatgttagtaaatgtatgtttccattaacattgtactcagaagtagaattagagaatacaaaatactgttttggcttacttggtatttatcttccttcttctttgtacagggtcatgatttcagtatccaatattcttcgtctttcagagttatttgatctggacacaagcaaacctggtgtgcttttagtagagtttgtttttaagatggtgtcacaattgctagatgcagcgttaagtgatgaaggtttgctagagctaagccaagactcgagctcccagtggctagttaagtctcaagatatggaaattgatgctcctgagagatataatgaaaagactggatcactagagaagttacagagtttgaataccatcatggctattgagttgatagcggaattcctcagaaatacagtgattgcgagattgctatacttggtatcttccaacaggtatgcatcatagttaacgagagtaaagttttttcagtggcatcatagttatgttgttctttgcattggcagatattttgcttaatcatgacctgaatttgacaagtaatgtctctgtagtaaagtgtttttcttttaatccatttgctatccatttcttttcagggcttcgaagtggcatgaatttgtccagaaagtgcagcttcttggagaaaattcatcggctttaaaacactcaaaggttctaaattctggggatctattacaattgatttcgaatagacgatttgggtattcttatgatagcaaagtaacttcagcacggaaatccaatgcaattgtggattttggatctctctcttcctatgctggcttatgccatggagcaagtctctcttcactttggcttcctcttgatctagtatttgaagatgcaatggatggatatcaagtaaacccaactagtgcgattgaaatcattaccggtaatttgtagactccatcttctttcacttgtggctttgaccaaagaaaagatatctcaaatatataacgaaatgacttgggagtattaaattttcaggtctagctaaaacacttaaagaaattaatgggagcacttggcatgacactttcttggggctttggatagcagctctccgacttgttcaaagggttagattactctcttactgatctttctgtttgtgatttcaccactactttggtacccagaaaagtgcaattgctattgcttgcaagttttacttacaccgtgtgcttttgtaattggttctgttatttggttataattcccaagacttttgttacctgcagtttcagaggactttcttacacactttctcttgactgaagctgtactatttgattgttactctgtcatccatgataagtttagattttccgtatctaatggctgttctgattttctcgtttttctttattactaggaaagggatcctattgagggacctattcctcgactggacacaaggctgtgcatgtcattatgtattgtgcctcttgtggtcgcaaaccttattgaagaggggaaatacgaatctgtcatggaaaagctgcgagatgaccttgttacaagtttgcaggtcctcggtgatttccctggattgctggctcctcccaaatgcgttgtttctgctgccaacaaggctgccacaaaggcaatcttgtttttgtctggtggcaatgttggaaagtcatgttttgatgtcataaacatgaaggacatgcctgtcaactgctgtaagtttaataaaatttcgctctattgaattgaagttaaaccaatttgtttgtcttcgtattcttcattattgtcgcttgattgtcttcatttgttgattttatgggcctctttcgtgcctaacatactttatgtacatgccgtagctggaaacatgcgccacctgatagtcgaggcttgtattgcaagaaacatactggatatgtcggcttattcgtggcctggctatgttaatggccgaatcaaccaaatacctcagagtctgccgaatgaagtaccctgctggtcatcatttgtgaaaggggctccactaaatgccgcaatggtgaatacattagtttcagttcctgcttcaaggtagaatgagttattatcttctttttgtttctttttgctctattagctccacactacttcatccacatagtcttccctccaaatcatacagtcagtggtaatttaaaattactatacaaaattaagctacggagtttcaaagtcgtaacctaaggaaaccattgccacaatgagaatagtggttgcattctagtttgacttaagttctgcttcttcttcagttattcctttttgtttcttagccaggtaatgctctttttttaatttaccgagagtaaagcaactgaaatacctcatggatttgatggaagcttagcagagctcgagaaactatttgaggttgcagtcaaaggatcggatgacgagaagatatctgctgctacagttctttgcggggcatctctcacacggggttggaacatacaggttggcattaaatccactaatcagaatctccaccagtgagaattttcggttgaacagacatgtttgatttatctatctttcttcgatgtacaggaacacactgttgaatatcttacaagattactatccccacccgttccagcagattattccagggctgaaaatcatttgattggttatgcctgcatgttgaatgttgttattgttgggataggatctgttgacagcattcaaattttctctttacatggcatggtatgtaaattgtacttccaagtttactagacttaatagtgaatttgctgaaagatgtaatgtacgattttgatggctactttttaggttccgcaacttgcttgctcactaatgccaatttgtgaagagtttggatcttacaccccgagtgtatcatggactcttccttctggagaagcaatatcagcatattctgttttctcaaatgcattcactcttcttttaaagctatggagattcaatcatcctcctattgagcatggtgtgggagatgttcccacagttggctcccaactcactcctgaacatcttctttcagtgcgtaattcttatcttgtttcgtcggagatccttgatagagaccgaaacagaaagagactttcagaagttgcaagggcagcatcttgccagcccgtgtttgtggactcgttccccaagctgaaagtctggtataggcagcaccaaagatgcatagcagccacattatctggacttacacatggatctcccgttcatcagacagttgaagcacttctcaacatgacgttcggaaaggtcagaggcagtcagactttaaatccagtaaattcgggcacaagcagttcatcaggagctgcaagtgaagatagcaatattagacctgagtttcctgcttgggatatcctcaaagccgttccatatgttgtcgatgctgctttaaccgcttgtactcatggaaggctttcgcctcgtcagttagctacaggtttgttttgttttgctggatcagattcctaattgtgttgtcatgtgcgataacatccgtctatatgacctttggcaactctgaatgccaatgagagatgtttgactgtgttgatcagttgttatatcagatgcatttcttacagtaaagtgaatttatttacagaataacaagtgtttttctttcagggctgaaagacttagcagattttctcccggcatcattagcaacgatagtaagctatttctcagctgaggtgagtagaggtgtttggaagccagtattcatgaacggcgtggattggccaagtccagctacaaatctatccactgttgaggaatatataacgaaaattcttgcaacaacaggcgtcgatatccctagccttgctccaggtaaaactattcaacgtgtttaaaatgccagtctgtttgtttggcttaccatctctgtagtctgtaccatcctctctttataataagctttttacctgtcctgatttgatgtgttaaagttaaagttgtcttttgaacttatggttgacttcttgctgtggtattgcaggagggagttctccggcaacgcttcctttacctctagccgcatttgttagtctaaccattacttacaaaattgacaaagcctcagagcggtttctcaacctggctggcccagctctggagtgcttggctgcaggctgcccttggccttgcatgcccattgtagcttcattatggacccaaaaggcgaaacgttggtttgacttccttgttttctctgcctctcgcaccgtcttccttcacaaccaagacgctgtgattcagctcctcagaaactgcttcagtgccactctgggtttgaatgctgcccccatgtcaaatgatggtggcgttggagctcttcttggccatggattcggctctcatttctatggagggatctctcctgtagcaccagggattctttatctccgtatgtatcgtgctctcagagatactgtctccgtatcggaagagattctctctctgctgatacattcggtggaggatatagcccagaacaggctctcaaaggagaagctggaaaagctgaagacagtgaagaacggatcaagatacggccaaagttctctagcaacagcaatgactcaagtgaagcttgctgcttcgctgagtgcctcgttggtatggctaaccggtggcttaggtgtggtccacgttctcatcaaagaaacgatcccatcttggtttctatcaactgacaaatcagaccgagaacaaggaccatcggatctagttgcagagctaagaggtcatgcccttgcctactttgtggtcctatgtggagcacttacttggggcgtggattcaagatcatctgcatccaaacgccgccgccaagcaatcttgggaagccacttggagttcatcgcgagtgccttagatgggaaaatatcagtgggatgtgaaacagcaacttggcgaacatatatttccggtttggtgagtctaatggtgagctgtttgccgctctgggtgacagagatcgatacagaagtgttaaagagtctaagcaatggactaagaaaatggggaaaagacgagctagcgattgtattactctccttgggaggtctcaaaacaatggattacgcagctgatttcatcattcatttgcgttcatagcttcttaaaaagttttgatcttctccagatttcagatagttgtttgatagatgtttttcttctagtgtttgcttccttgttgtgacttgtgttctctagctccagtgttgtgtgatgaaatcaatcacgcatatgtatagagagaaacagaaaaaaaaaaaaaaaaaaaaaaaaaaaaaatcttgtatagaaaatattagtgtactattctagaccgttagatggattagtgttctatttggaaccgttagatgactctccgttgattagttggtcacaagtcacaacaacatgttaaaagaaaacgaatgattgagtttggtttctttgtatcatctctctgtttttccgaagaactaacacatgtcgggacctcagtgctgtgaaaacccgccaactcttaacccggtttccgggtcgggtcatgtcgagaagctgggtgggcttgatgcctacgtctccggctctgccgagtccaagctctgcgtcctcctcatttctgatatttttggtaaaatactcttctttctttgctttgatctgttttgactttctttgttttagttgaaatatgatcggagtaattagggtttttgtttttctctttttggatccgttttgttgatttgatcattgcatcattgttgactctgactttaggtacgtttttgttcttcaggttttgaagctccaaacttaaggtactactactaattcttccctcttcatcgattcaaccattaaaaatggaatctttaacttgggtttgtttctttgaaggaattagatagtatttagtagccacatatgaggtctagttagaattttcatttgagcctgcaaatagttttgttggttttggattatgtacaagatgaagcatacctatcatgtgtctttaagttgacttgtcttttctgaactcatttgataagatctaaatgtttaatttgaatcattgctttgattgcattgcattatctcaagtttatcttgtacaactatggaggaatgtttatggagtgttaagtcttaattttatgtcttaagggcgcttgcggacaaggttgcagcttctggattctatgttgtggttcctgattactttggtggagatccttataatccctctaaccaggacagacccatccctgtctggatcaaagaccatggctgtgttcgttcctcctcctctcctccttataataactgtcctatacattctcaacttctatttgaagttttgttaacaagtttgactcaatgtatgtgttattgttctgttattttgatagattccatctgaatcagttcatatcctcttttgtttttcaggataagggctttgaaaacacgaaaccagtacttgaaaccataaagaacaaaggcataactgccattggagccgcagggatgtgttggggtggtgagtttttgttagaaatctatgcctaagagatgtgacgctctctttttgtctaatggatagtacttttctctcttgtgttattcatcttcagcaaaagtagtggtggaactgtctaaagaagagcttattcaagcagctgtgttgcttcatccttcttttgtcaatgttgatgatatcaaaggttagtgactttgctacttccatcttgattcctcacatagaaccaaggaacattagttgtcatgccttgcctaatgcgttgtaacatttagagtcacctataggattgcgtaactgatctcgccatgattagatactatcattattactgtaaagaatactaattcacatttgcaaacataaaaaacactgtgattggtccggtttctttactttcaccggtctttgatgatccttatcaatttcacgggtttattgcaggtgggaaggctccaattgctatattaggagctgaaattgatcaaatgtccccaccagcactcttgaagcaatttgaggagattctatcttccaaacccgaggtaagctgctttatcaccgcaactcaacagtgtaatttaatcacctttatctaactttaaaacggatcctgtaggtgaatagttacgtgaagatacacccgaaagtgtcacacggatggacagttagatacaacatcgatgaaccagaggcggttaaagcagcagaagaagctcacaaggagatgcttgattggtttgtgacctacatcaaatgatttgagaaagaaagaaaggtattgtctattacttcatatatgcaaagaataaaaattaaagagagacaaagcaaaactcttggttggtgtttcaatttctactttctatagtcttttgaagcattctctgagattctgtgataccttttgttaatcattgttttatgatttttatatgttgacgatacgttacccttctcatcatcttcttgtggtaagcaaaaaaagttaccaaaacaaactttgattgaaatcaatgtcttcttcgactaaagaagtaaaaaagatattgtacatatatacagaaataatcaattcttcttcttcttgatgaatttgatagtcaaaacgcaaaattattgattgttgagacttgagaccttgagtaatttttttttttttgggtcaaatgagagtaatttataagagtcaaaatcattacatgaaaatgatttaagagagtttgtccacacacaaaaacctaaaaaaaagaaaactagtaattgacaaaattatacgataaatttattgtataagaaattgatccatatattatttatattgttgcttaaaaatcgtgcaaaaatgtggacagaaaaaaaaaacttgccaaaacaagaagatattgctcaagaaagtcactaggttctttagagaaatcaaataaaatctcaattcataatcaatgtagatttctcataattaaatttgtattacaaacttacaattatcaaaaacaaaatctgtaattacacaaaaaaaaaaaaggaaaatagaaacaaaaaaaaatccgcagaatatctccaaaaatcaattctactaacacaaaaacaataatactaataaatctatttttctattttcaaggaaaaggaaacaaacctttatagctcctctctatcgtctcgtctctataaataaacgagaagctcacaaattccacaaaaatccactctaactatgaaacaattagggttttgaaatttacctaaatctctccgtaatcatcgatcaaaacgatgctcgagtgtcaatcaatgatggagaaattatcaccgttcgtagacgtcgcctctctggaaatcgagtctctgcgaagaatcaaacgcccgaaacgcttctctgaagaagaatcagaagaaaccgagaatacgacgaattcatcaaacgcggtattcggattccctaacttaccagaagaaccgaatcgcgatatggatcaaagcgttttgtgcagaatctgcgttcgattaccagatgggagaagaatacagagaagtttcttaaagagtgaatctgttcagcttctttggtcgttttgttattcgcagattggtgatgaatcttctgagagaaagcggcgttttaaattgattcaagggtttcctggggattataagaatctttattttggatctaatactacttttgaacaatctgggcttgctaattccttggtttctgttacttggctctgaagaatcttctttcgatctgtaattagaaaaataatttctttcttctaccaagtttatgtttactcaatttctcgaatttgtacttggaaattgcaaatttcatttggttttcttgaatcgttgttagatatttccgatcaaatcgtttttagataacactgtttcaaagtcaatgtcgtcatcatcatacaagaagaacgtatagtttttggtttatctttttgttgcttcttaagtcactctttctcgcatagtttttgaggtgacgaagttacgtatacggtgacgtagcaaaccaagcccataagcccaaattctaaacaagcctaagacaagtgagcaaggagtgggtaaaccaaaccataccaaaatgaaaccgacaaactcgtcgatatgtgccaggaccgggcttagagggtgtgctgagggtacatttgtacattgtccattactttttagtcagatttcttaaagcaattagggtcctatttctaaacaagcctaagacagcatcaagtgagcaaggaagtacttcatgttcatgcacaatttctaggaatgggaaagaccgtaccaaaatggaaaccgagaaactcgtcgagaccggctttgattagatagtctatcgaagtaaaatatcgaacttcgatggactatattgaagtagatttgtgctctactgccctcgaaaaaaacattaaagtagattactactacgtcataataacaaacagtctttaacaacaacatcatcatcactcgatacatctctgcctctgtacagttttgctgacatattcacaacaccgttgcctcagtttcagccaagtacactacttcttactaatccagggggcctaatagcaggaaaccaagcctacaaagcacaaatcccaaacacaaatttttgagtataatataaggactgagctaataagttaaaacatttctgatttttctgatagaaaggaaattttactatttggccctctttgaacacatccttccctctcctcctcctccttcccccaaaaaacctggagaaccatgcagttgcaatttcctctttaacccatttcaaagattcgtttttttttttttgtaaatctctttctcctttggcgaattcgtattccttcttttccaatgtaagttcttcttccttgataatcgaattcttcttttgatcttaaaccaatcactactccgtcgttgtaatcgtaattctcgattcaccgttgttcggttataagatcattcatcagaatcggattccattatttcggtgacctggattttgattttgattttgattcttgctgctatgatcacgatcttgatatgtaaactctcttcttcttttttctgattcgatgaaatcaggagttctagagacagaggatcaccttcttcttcttcgtcatcttcttcgttaccaggaatagaaaagtataatgaaaaggtgaagaatcagatacaagctcttgttcgtgttattaaagttgctcgtacctatagagacgacaatgtcccttcccttattgaacaggttactactactactaatactcataggttttttctaccaaccaaatgaccaatgattcattatcaaagatcaaaccttttgttgaatttgactttttcagggtctttatcttggatctgttgcagcagctagtaataagaatgttttgaaatcttacaatgttacacatattttgactgttgctagttcgttgagaccagctcatcctgatgactttgtttacaaggttgttcgaggtataaacttattaaaggtttcactttgttatctagttgaagagagaatatgtttttgattttgggatggaattgcttgtttgattgtttttctatgtgatagtcgtggataaggaagatacaaatctagaaatgtacttcgatgagtgtgttgatttcattgatgaagccaagagacaaggcggtagtgttcttgttcattgctttgttggcaaatcacggaggtcagttttgtttgcttccttcaatatctagcggttttcgccttgtttgctggatagtattcaaaactaagtacatatttagcctggatggtttgtcccttttacttgcagtgtcactatagttgttgcttacctcatgaagaaacacggtatgactttagctcaagcattgcaacatgttaaaagcaaaagacccgtggcaagtcctaatgctggtttcatcagacaattacaagacctcgagaagtctatgcaaggtatgccttactataatatcttgaggtctagactattaggttgagatctctgtggtgaatctaagttggagatactttgtctgtctgattcagtagtgagtgaccagtttttttccttttgaggatgaaaagcaagtggttgtggaggagaagacagttccatgtaaatatctcttacatgcatcttccttcttctctataaaacagggaagcaagttacgattgcacaatgtcaggcgtgaagatcattgatcgtaccattgggagaaacttgtaaatctcacacgaagcatcaatcaaaatgttttgttgtttcttctccttaacaactcgaataataacatggaaacgaatttggaatatgttcatgttctctattcgttttgtatagtttcatcatcatggatataaaagtgaacataaataaaaatttgtaaattttttgtaccgcaatgaaatgtcttttttgtgtgtaaaagttcatgggctgtcattgtttaatttgagcccgtatagtttaaacagttcatggaccttgtgaaacattgggttttatagtcaataaaaaactgtggggtgatttaggacagacttataaggttaggggtcatattagaattctcttaaagttgcttccaattgtgaggaggcactaaaaccctagactccatatcaatcaatcgaaaaacctttctctcttctttcggagccgtcgcttgtgaaactttccggcgatttaacagagtcatgatggaaatacgaactccgaagactggcaaagccaagcgtgttctcgaaagccgagctcctaagttggtaaagttctcttctttttctccttcgtccttcttaaaaccgagaagtgaatcatgttgagagctgtcttcaatgttgttttgacatctatgagactcatgggttttctatttgtcgataaatttatcaaagaatcgattgaaagttgcaaactttgtatctgaattggttgtttttggaatttgtaggttgaaactgggaagaagacgttgatacttcatggaacaaagacgagtgctacacttagctctgtaatgacggaactctaccgtttgaagaagggaggtgccatcagatattcaaggaggaatgagaatattaggcctttcgagagtggaggtgaaacttcattagagttcttctctcagaaaacagattgtagcatttttgtggtaagttcataagctttggcagctgttgcatcttggttttatggtgttgcaactttgattctcctcttaacttagctatgaactgctagatagaacaaaatgttattaagatgatctatcctgtgatctagattcattctaaggcatctctgcttctgtcttgttagtctatgtgtatttatttatggtggaaattggtatgattggctgatgttatcacaggccttaagaagtcatttggaaaggtgtattggcaaattaactttgatgcgagttctaacattggtgattgtttttatattgcagtatggttctcacacgaagaaacgacctgacaatcttgtacttgggagaatgtatgatcaccaagtctatgatcttatagaagttgggattgagaactttaaatccttgcgggcgttttcgtatgacaagaaattcgcacctcatgaaggaacaaagcctttcatttgctttattggtgaaggttttgagaatgtatcagagcttaagcatctcaaagaagtcctcactgatctttttcgtggcgaggtgaagtgtttgattcttatgacctacttttgcagctaattccataaccagtttcaattttattctgattctatatggatttggcttataacagaatttgtatatgtctgcaggttgtggataatctaaatcttactggtttagaccgcgcttacgtatgttcagctatatccccaacaaaggttttccttactcattgcgcattgaagcttaaaaagtcaggatccattgttccgagaatggagcttgttgaagtcggtccatccatggacttggttatcaggcgtaatcgtcttcctaacgatagcttaatgaaagaagcaatgagaacatccaaggataagcctaagaagaaggtactaaacaacataaaagtctaatatttctcttaaaatcgaaagagacagatgactaatcaatcaatctcttcttctacaggagaaaaacgttgatcaagatgcagtactagggaagactgggaagatttatatgcctgatcagaaggtaagaaagaaagcgataaacgccaatatccgaatctggagattattatttttattatcatcccaaactgatatgttttcgatctttgtgcagctgaaagaaatgaaactgttcgataaatctaagggatcgaagagagagcggaaagacgctaagcttaagcataaggaagagactgttgccaaaaagatgaaggtgtcttctgagtgactcaacagaccactcttggctctgcatcaacagctttcaatatgtggaagatgaaatgattttgtagtgtaatgagcttgacttttatttttccattagaatctataactgaatgttttctatacgctaatattttattaaggtgattttgttttgttaaaactctgcagcaacagaaactggatatgataaaaacacatttttgtctatctctgtttcctactgcagtacatgcgtaagacagcaacttttttcccgtgttgaatgagaccacaatttttgcctgtatcactgtcttaccaacaacttttttacctcttttaactaccatctcttagtgatatcttacttatgaaaatgaagctgaccatgatgattatttcgtgtatttttttacctaccaacttttaaatgataatgactgatacatgttgagtttacaaacctaattattaagcttttatacagttagctgtcttaatctttcaacactaggcttataccttatctataattgaaacctacccctatggactcttcttcatcattattctttatggtttttatttactatatgttccaaaccaaaccataggaaactaatgattaaaatagtatatcttgcatctatcaccgaatgttaatttgtatgcatgactagaatcaattaaggaaatgagaagttcgtcttgtggatttcgaggaacttcaatgcatagattatcctatagttatcatcaatggatttaatgttggaaaaatgaaaaaaaaaaaaaaaaaaatcaaataacatgtgacagaaataaaatatcattaattatgatgtttacaacattgttatttttttctatacgcgtgaaagacagtccattttgattaccaagtttcggactcaatgcatgcacgtaccgacagtacccgttgtacacgatctgtggtcactagcaaacaattgacccatctgaccatctccattgaaaaaactaaaatatacaccgatttgatcaaattaattaatactttttacgtgttgacaaaaaaaaatttgcacgtaggttctgctttaaaaaattgtgaagtcaaatggcaacatagatatacgctttataagtaaatgacaatatgttatattatcatataaatttgtatatgaacttgaaaaaactatcttggtggaacaaatagtagaatccaaaacatctattataacgattgccatttcttagcaaatactccaattcttaagaatctcttgcaagataattaatttagcagtaaaagttttaaaattcatacgccttaaacaaatggttagtttattaccatcaccatcatcatttcatcatcaccattcccacatatgtttcaactatataacaaattttaacttttgactcgttaatgatgccaaatccgcacgctcagagcaacataagcaacgacttcttgtggtaatactattttcttatcatcagattttgttttttttccgggagtttaagacatctttattaggtgtaatatataatattttcttgtataatggatcttccatcgtccggattatcactaacatcggctgacaatatcagtactagcatgaatattacttccactacaagtccttttttctttcacaataagatatagaatgattgttggtgttaatttgatacatgaataaccaatattaattagtagcttaaataattagaagagggtttgaccaaaacaataaaataataataataattagaagagggatgataccgatatcaaacatcagtgtcttaagccttatcgatcaattcttcgaaaccaagaaaatcgatcatatagattaatttgcgatataattttcacattacatctcaaacttaagtaaggacacaaaagaaattttaacattaggaaatgaacaaatacttgatggaattttttgtagagataatagataatgcttaaaaagatatatatggccaagttgttttgtatagataatgttaaaaaagaaggaactattatgttcctaatgattcttccatttgaaatgtaaagacgaaaactttgggcacatacacaaacacttattttagttatataacgcatagattgtgtggttacacgttcgttgcgatcatttgtgcttttgttttccagcttttgtttagttaattaatttacattcgtattataaccaaagtagtacctcaacctataattattacatttcttatcaattcttttaggtatactagctagtagggatagaacttataataagggtggttagaaaagaaaaaaaaatacacaaagttatagcttttgattataaaaaaaaaagtcaataagaagtaaaaaatcctaggataagaaaatatatacctaatatatatgaaattttcaacatccataatataatttttgtctaacaaaaattatctcctaagtcctaaccctcctgatggtaaaccccttccaactcctacacctatatacgaccgcccaaattgatttattacgtatgtcgtcggatcggacatgaaatctgaaagattaagctctagctcgaatgatagaaaatgctccggatcagtgaatttgtggtgaccgatcatattgtcatacattcttgacatatttatatgaattcacgaggaataaagatttttttttctttttcattttctacaatttgcaaatttgaaataggatagtttatcttaaatactagacattattcgtgtcatattatatatgtaaattatataatttcagtttgaaaattttgaatcgttttaatttatttatgtatgttgacagaaaacaaaaataagaagcggctaatcgaaatggaatatctattacttttgatgtgaaagacaatccatcaagttaagataatcttaattagtttaagcaagcaaccttaagtaactagaaccactcctttgacggttcataagctaatgatgattatgctccattattagttttaatatgattcatattgattctaatttaaaatgaataaagaaatgtgtgaagaggcacattatgtcgaggtgcaatttcttaatcaagtctaactaaatcccataggccatgactactcctacacgagttgacttagaccaccaattaaagtacatataatgtaatctagtagacgaataaattattagataggtagaaaataaagtgaactttgcttacattttattgtagcgataagacaaactaggacaagatatgatgctaacttagctacatcagttttgaacgtaatagaagattttaaacataaatgctatggagtggcagatcacgatcgaatatagataatcattgtacgttcacaccgtttggaataatagtctttgactctttgttcacaaagagaatactgagttataggagtgaggtgattcaaatcagtgattgtaatactcttattttcttggtaaatggaaattgatgcaaagaggtgtaagagattattttctttgtaaaagtatactgtgatttatatatactgcttttatttgtagctcagcttttatcatcaataaaagtataatcagatccacaattagagtacattttttgttatatcttgaaccaaaatttatattacttttatgtaaaagcatttaatcaaaataacaaattaaaatacataaattcttagatataattaagcatccgaagatcagaacccactaaatgggaaatttaaattctcttttaccactgatttccaaaaatatcaactccacccaaattataggcaactttgtttcattctactgatagaactaaattacaaagtaataataaattaacaaagtaagaataaatgagtaataaaatattcattgagagccttaggaatccttatttaaaaccacaaattctccatttgatagaactatatattatcttttttctttttcttttttttttgtgtgtggaatatattatcttttgcttaaatgatattatttatttctgtgaaaaaagtttgtgtgttgccatcaaataattttaaaactggatgaaattactaagctgatgaaaacattaacttcatgatcaaattttgatgaaatcccggttcacaatctatatgatcatgattggctattgggaattgaaatatttctcacatgactcagtctgttccatttgtcaatcgagaagttctattagtaaaaactaaattataacaaagttataataggatatataaaaatattttagcagttagaaaaaaatatgtgtgctcaaaagtgtaaatatatgatatttgttttgttttaaagtatgatataaatgacagtaaaacattatgatttcattataaaatgttacattggttggtaatattgtaacggtctaaacaataacacaaatataattaataaaaatatatatttatcatatagtaaaatttaatctgtaaggaaatgacaatagatttactggcaccgcagcctcaaaactactgattacaaaaacatcaaaaacacttttcaaactattcttttcaacttatgcaactttttttacttgactatttatttttgggagctgttttctcatatcgccatcatttttaccatcgcagcacaaagacaaccaaacaaagttcaaatcggttcatgactattgatgttattgctaccgggtcaaaggtggaaacaagattgttatttatatgttacattaaccaaataaacaaaccaaaaaatagagagctttaaggttgtgggttaaagctttaaacactttgactttgatatttatctacatatacaacatcagttgaatacgttgtttttatagccttcctcgaatcgtacgttaaacctcaaatttccaggatcgttacgtgtaattgtctctgactcctgaatttttagatattaagatcccaattatatatatagagtctgctcggaattatctctctgttttgattagaatcggaacacacaatatctgatttatataaatatatgccagttttcggcggttagccagtccatcttcgatatttcaagaacagcatgaaccacttcaaatgtactgaattctagttactatttagaatcaagagattttgaattttgccgtgaacttaattaatatttacttaaacttttagtgatttgatgttgaagattataattaacgacaattcgtgcagccgctcatgtctttgcaaccattttaaattttaacgtttggagaaaggtaaagaaaaaaaagttatttaatattattaaaatgagaaagctgtaaatttgtgaaagtaagtaataagcaaatttttatattactattgaaaattatatttcaaatttttatacatataaacgcgcttttgaatcgaaatttttcgatcaaaataaaaaattcttccaaaaaaaaagcagtgttattaaaattttccgctcgtgtgacaatgtcaataacatataaataatgtaagatgtgttcattaaaatttgtgggtctaaaatattgttaaacgttaattaatttaaattttgtggtatcccacactagcttggaaacagctttgcgtccgaaatgacgtaaagcctctcaattatgacggtagatgatacccaacaccgtctttcttcatgtattctttttggtgttttttttcataaaatggtaaactacatacaatttgcaactttagtttttagttaaattgagatgtaaactttgctttattttatcccgctgaaatatatacaacagagatcttttatttttctactcaaattatagattttatattttcatgcatatcatatcaacattttctttcgtatattgagtaatattaatacgtatgcgatatatctttgtaacatacacatctttgtatgattgtttatatctacatattcgtatatcaatggctggccatcaaactcagctctgagtgtgtgtgtgtgtgtgtgtgtgtgtatctatctatgcattggatcggagtagaacactgtccttattcggagagggtaacagagacacacgtgttcaagattcgacgaggagaatgacacccaaaaaagtacaatatatatgtacgttatattcattaactgtttattagcacattaaattggaattattataccttcaaatttaaagactgatacaaatcatcaaatttacgaaatagaaagagtctgactatgcactaaaaataaaaggaaacctaaaacttaataaaatgaaattaatgataaaaataattttacttttactagattttttttgtcatccttttaatagatgataaaacaaaatagatgcaactatgcattaaaagaaaaccttgctagtgagttgtgtgtccctctattttataacttataggtctctacattgtatccaagtagcttttaagtcatccacataacaaaacaagtttttaaagttcatactggagcaactaaaataataattattatgaatactgaagttagttaaaaaaattagaaaaagtagttaaactgtatgtaagcatgcttgaacttggatttgaataccaagaaaaaaaaatctataaggggattttttttgttgtcaagggtttttgtttttctttctgttttttttttgttgttaagttttagttgtggaatttcaaagggtttaaccaactagtcttaatgaatttcctatagatggggcatctaaaatctattttaataaggtcgtagaccaaagtcagagaaaacacggctagttagttctaggtgtatatatatagcctccttaatacctcaaaacttaatacttgtgagcatttgctttctttcaccattctctcttagtcttcctctctcagttctgatttttttacgaagaagttttgagtttctttttgacaactcacgactcgttgaggtgatctaccgcaaggactaaacaacaaaacatatatttttttgtcccaacaaaaaaagtcaatcatcatgaagttctcaatctcatcactgaagcaggtacaaccaatcttgtgcttcaagaacaagctatctaaggtcaacgtcaactcttttctccatcccaaagaaaaagtcatctttgtgatgggagctaccggatcgggtaagtctcgtctcgccatcgacctagcaactcgttttcaaggagagatcataaactccgacaagattcaactttacaagggcctagacgtcctaacaaacaaagtcacccctaaagaatgccgaggcgtgcctcaccacttgcttggagtattcgactccgaagccggaaacctaacggccacccagtatagccgccttgcgtcacaagcaatctcgaaactctcagcgaacaacaagcttcccatagtagccggtggatcaaactcttacatcgaagcacttgttaatcattcctcggggtttttattaaacaactacgattgttgtttcatttgggtcgacgtttccttacccgtacttaactcctttgtctcaaaacgtgtcgaccgcatgatggaagcaggattactcgaagaagtaagagaagtgttcaatccaaaagcgaattactccgtagggatacgacgagctatcggagtccccgagctccatgaatatttacgtaacgaatctctagtggaccgtgccacaaaaagtaaaatgcttgacgtagccgttaaaaatatcaaaaagaacactgagattttagcttgtcgacagttaaaaaagattcaacggcttcacaagaagtggaagatgtctatgcatcgtgttgacgccactgaggtgttcttgaaacgcaacgtagaagaacaagacgaggcttgggagaatcttgtagcgagaccaagcgagagaatcgtcgataagttttataataataataaccaactgaaaaatgatgatgttgagcactgtttggcggcatcttacggcggaggaagtggaagtagagcccacaatatgatatgaaaagttttgtcattgatcatgtgaagctttttggagtgtgagattaaagatgagtctccaagatttcgtatgtgtggtggtgattccacggaggttttttcaacgtacaggtgtgacatttaccccgagagaaaaaaacaaaaaagttttttctttttaagtgtttgtatagaagaagatattcggttaatattaattgtttgatacctattgactacgagttcacgataaccgaaagttttaattccttgtgccacgatatcacacttatgtgtattgtttataatatataaacaattattttgtaatgctttttgttgtatttggtatatcttggccttacatttacgcattcatgttattggctgaagctatacaaaattaattataacagttaaattccccatgcatgcgtcttcttttcgatttatgattcatgcataaagatattgtatgttctgttttttgtttctgtaatgaacgttagggtcttatcgacgattatatgaaataacttacataatataaatcatgtatatgtaaatatagtattgcttgcatgatcaaatgttttttcagaattaatacttaatgtctggttcgttaaactcctcactaattttgagttgaacagactttctgtaaaataactttctataattgcatcatatggtaaatcattagaccaaaattagaatcaaatgaaacgaataaattgttcacatatccaagatctaaactccttaaaatatcaaaactgagtaaaatatgtaaggacaacaatgttgtgttaacctttgagcacgatagttctacttcacctctgcgtaaaaagttgagtaaataggccaatagccatgttaaccaagtagactacatgatttatctaaagacaagttctctttcatttagcatcaaagtttgggacagttcaagtaaataaaatacgttgtgaacaattatagtaaaaaaaaaggtgaaggaagagaatctttaagttgagaaagggaagaatcgaagaagcaacatggaaagagagcaaagagcgcgtgagaggcgcgtgacgagtatgtgagtaagttaagaagtatgtgcaacgacttggagaaattgcacgcgcagcttaaattaaggatcttccgtacataagagcaaaagcgtgtggagaaggttggatcaatcataaattacgttcgtacagttgtgaagagacattgatcatttatttagataatacttgtatcaagtatatatattagtactattagttttatgttattgttgttattcatggacccatccattaaattggattgtacacacgtcaagtcattaacgcatctaagacaaggaggtgatgaactaaatagcactaaactaatgtcataaggagacagcatctgatgtctttcttttcccttttctttcgttttatagttttttcctttctttggttcacaattgtgatgttctgatgatgacttgtggggttagttgttttgagatgaacttgaaggcactaattaaaaaaattgtgtttaggacttgaattctcattcgcaataagccaatcactattgttcatcaggtaaattagatataaattaccggccatgatcatttctgaaatattgacataaaaacaacaacaagattgatagtactcctgacatttataactattaactcgtattagtgatgatgatggctccaaattggtactatagaatagactagagtagaatgatttatttgggtgtcaaaagatgaaatattataaatcaaaggttaagattgaatatagaaaatatgaaaagctataataaaaaatataccaaaaactgctctttatttattcccctcaatatactattttatcgtattgtgacgcaaatggaaattgtgttattatattgggagaaaatggcgaatctttaccaaaaatattttataaaaataaacaatcttttgtggtgcgctaagtctttatttacagattttattggtccaacttcaatgagttactcttttacttatggtatgaaaaaaccaataaaattattttattgaaaaacatgtaataacaaaataaatttaatattagtacaattaaatatgtaaaattaaataataaatacatcattaatctataaattaaaagttgaaaagcttacattaattattatgtagacacatgacacatgtttaagtgatgatgtgtcaatcatatggagagagttggccaactttcatatatatgatttatatctcattatattaactttgagatttggagaactataccgcatcgatgattttaattttgtattttcatagaaaacaatgtatatgctcttctagagtcttttaataagattttatactacttgatatactagattatttcatcgttaaaggttagaaattttacttatttttttaccatatttattttctcaacttttggtgataatttaagttcttgaaaaaactttgaccatcaaaattatgatgtcttcttaagatacattaaactagtcattcatgaaaatttctataagtgattatacatttaaattaagttatttatcaatcaatttatttcataaaataatcaagtattatataccaatacaattttaatgcaatattgtaaaaccaatcagaataaaactattttgtgcaaaatctggattttacatatatcttgacaaaacttttatttaggataatatgaatttgtgcaaaatttgggtaaaataatttcgtgcaaaattagggcaaaaccatgaacagttttttttttcttcttttttttttaactcaaataaaaaaaattaatacagatcttttaaacaaatttttcgtgcaaatttagggtaaacaatatttatggtcaactctattaacgtaaaactaatagtgcatcaactatgaaagtttagttttcaaagaagcattagatctttatctttataaaagtatgaaagagaacttatctttcgtgcgaaaatccagatgctgatcattcgtgcaaaaatagggtttctgcgatacaatgcataaaacagttcagaaacaataacatataatccgtgcataaatagtacaaaaatacaaacaaaattgataatagataataagtgtataatttgtatagagatacaaacagatctgataatagataattagttcataattcgtgcaaaaataaagacaaatctaatgatagataatctgtgcataattcgtgcataaacaaatatgaacagaaaacttatcttgttagcttaagattttgtttgtttaggcggctaggattttttttttttttttttttcgttttcttaggcggctagggttttactcagctaggtaggatttgtgctgataacgtgttataaccaaagaaaaagatagaagaaattagtgtgttatttcattgaataaagggtcatttatataagagtccaagagaagggtaaaaccctagagacatctagatgatgggccttataatgggcatccatatattattcataacatttacattatttttcaaggggattgttttgttctccttcaaaccaatttattttattataagaattaaacagaaatgtcttttttatattttcacttactaaaagctttaatttaagaaaataatatgttatataaataattaaattatttatattatatatatatatttatttatattgccaaaaacaaaattattgtaagtgcggatgagtcaaagtaaagtgcagaaaataaacgcgataacaaatttgttaacaaggtttctttttttatactcttctagacaacgtctagatttcaatttcaatagaataagaaagcaaatacaacatattcgcaaacgcgtaaatcaagaacaaccctcttgaactaccgctcatttctattacatggttttttaaagataaacccttaactaaattttctatgagcctagatttcatcatgctacttaactctgaggtaatctccccatcagccttgacttcagttttcgaagtctctggaacaaccatcagacatgaacgttataccaacaaataaataagtttaatcacacaatcatcaaaccgtaaaaatacgttacacacgatctctcaaaaagctctataagatttttctttatggccaagctctcttaatccctccaagacgtgcacaagtcctccttatacacttctatttttctgatcaaattccatttttatatacttctatttttctgatcaaattctattttcatcaagtccacaaaaacttttatgtagtcatttcattttttttctttttgatccatctaaaacatgctctaatattgtcttcacaaaaatttagaaatcggcactcaaacaaaaacaacagcaatcttgtattacctcttgaatcattcaacaactctatcagacataataactacatcttcaattgggtggtgagacaacgacgtagttgatacaatctagtaatccttttcctaaaaatatttgaatatgctaaaagtcttggtctagtaaaaaacatttaaacataaagtaaataaagataatttgtatatctagctctagtccttgtgcaaagattaatacttcctctgtttcaatttatctgtagtttaagaaaaatattttacaaaactagtgttgttttcaattttttatacaaaaatttaaatgtatttataataatagtttttaaccaattatattttacatcatatttttattggttgaattagttttagttaattatgtttatatagaagagctaaaaattaaatgagtttgtgatttttatatatgtgtggaaaacctttaagtacaaataaaattgaaagaaagggagtaatatactttcatttagtgaagattttttgaaccaatttaaatcgtaacttaaacatttttaaaaaattgaatctgaaatccggagatgatttttatttgttatacttaagaaaatatagtgtattattttctaatcatgttaataattaaaacatagtatatttgatagtttgccgaaatatgtaatattttaacaactataaagttatattttgagttacaagttcaagaacaaaaaagaaagtttaataaacctctttgacaaacacttcagaaaaatcacactgaaaataccaaattagattatttatattattaaaaatcataaacctaaaagaattataacgaaaaagggggaatatgaatatatgaccaatgctcgtagctatctttttttttttttttttttttttggacaaaatgctcgtagctatctagaatctaaaaattgtagaattttaggccttcgattttggtatgtcttcgtctcttttgattgtgcttttgctttttaaagcccattctgttttaggagtatcaattcttagcttttccaaacgtacaagaagaatataaaaggtcaacatcaactttttgcaaagagaacctaagttcaataccaaagttcaggttctgagcacataaatacaaaaagaagaaaaacttaatttctaaaaacaattttatttcaataagtgaaaaaatttacacgtcacattgtcgtatttcgcattttgtgggttgatgaagttggagtcttggagacactgttccatccccttatgctgcatgcgtgtaacccgtgggcatctaattctcatcataattttactaacaaatacatgcatgtcgcaatcctaagtattctaaatctaatgtagtcaaaaaaaaaaattaagttcaacaatttcttaccaaaacagcctcgtttgaaactgaaactgaaattggcatgatcttgtcagtacacagtatttcctttatcttattttttgatataaaaatgtcaactgaaatggcaagagattataaatattacatagcccgtaggcccagttttaatggaagcccatttaaacataattttgatctcttagactctgttttgtgtttattctgaaacacgctaaaaaaacaaaaccgaagaagaaactgaggatctgcaagaaatcactatttcgaccagtttcatttgatccttttacctattcctttgctatatttgaaccaaacttggaacttaaatgaacatatttggccaaaaccaatttgatgatttttgataccggacttttatgtaatcaatggcggatctaacaaaattaaattttcataataaattatttcataattttttacctttcatattttatattttaaaatccttaaaaacatctaatttttgaaagtactatatctataggattctaaatatactaaattacatataatatatattgaaaatatttaatgtattaattaaataatgcatatatcatttgaattgttacatatataaaaatatcacaaatataaaatctaaaaattaaataaactacaaagagacataatattatttactaatttactagttaaaattttgaaaaaaactaatttaaatgtaggtattattttttcaagtagaaatttgtaaagaattagtctgaaataagaaagaacattaggacaaaggagcatagttttatttaagaaagtaataaaaagaaataaagaaaatgtagtcaattaagcataaggaagaataaaaatgtaagaagacaacaaaaaagaacaaaaaaaaaagagatgtgagcaacctgcagagaagggaatcgaactcaacacccaaaacttgcttgagtgacttattgccaaatgagatgaagcaatgaacattgatgatcaattagaaatatcttaaaactagcctgggtcaacgtgccccaccgtcacacactgtagatccacccctatgtgtatcatgctgtccaattacggttaccatgtccctgtttaaattacaacacactgctagtttcttctcctcatggaacaaagaactcatgcaaactagaagagaacgattgcgaactttaaaatcctctgtcaaagattttttccacaacaaggcaacttcaatatcaatttcattggtcgtcatccacatgttcatttttaatgtacgaaagttctgatataacactgagaattgttcatctctaacaactgatagaacattcttaccaagattaaaaattggcggaagggaaggaagataaaaacgtttgaatctctcccctgtaaaatcaaaactgagtaaaaattctgtttccgatgaagcaagccagtacatatttcccttcaaagatacacccgtttttgcgtctacgctgccgtcgaaaaccatgttatcgagaaccctccatgttgatgtacgaatcaaacatgtacgaacatcatacgcactaacatttttttcgtgaatttagtatttgattttcaatacttgtatttatttgtcaagtatttaaggtcttaatgatttctatttttatatcaactaatttacatcacatgtgtaaacttcattattcaataataactcttttaaggtctaattatatcaactaactaattcatgaaatcaaagtgatatacgaacgatttgtatcacaagtctaatcattctattttccatgaaaattaaatacaactggaatatttattcaacgccgtttaatagtcacgaatgccttctgctgggtcctagtttttccacacaccagcgtcatctctttagagaactttgtcatgaatcatattatttttttgtttatctatttaagcaattcaaatataacgtgaatgatatactcatatataaacaaattgggtaaaacggtaatacttatatatttttaacttgccaataaacattagcctttttgttagatttactctacgtttacgtagtatattcaaactacataactggagcaactaacatttataaatataaagaaagtgtactatataaacaaacctcattaaaacacatattcacacatacgtttcctctaagggctctaagaaaaacattcggaatcaatctccattgatttttcttggactttttacaaagtgtgttaacgagtcgtttagcttgatcactattcttgtttgatcaatagtcatcccaccgtaacaagaaaatcaaacacctccagatgatataagcacgcgttctctgctccttacaccaatcccaacacctgagtgtcgatttacgataggacccaactcgtctctccgacatcttcatcttctttcactacctctgtgttgttgtgagtacttttggagtagtgagaaatacagagaggtgtggaatatatagagaggctaaagttgtaattaattttacttagattgagagagaggtgacatgaacaagaagagtggaatcccactctacagaagatgacaacacaaagctgagtttacttgttttgcctctcttgtctttttccttcactcgttttagcttcaacctatcactatcacttatcacattttctataaaagaaagaagaaaaacaaactaatgctagggaaattgtacagttacgtgtttgtacatatatatcattcctattcgtagtgcttaaatatagagcatgttactacatgaatatttttgtacaattttgcccgatttgacaattctaagatggagaccttttctgaaaatattttctttttcgaccccaacaaaacagaaaagtagatatgattagttttgtgactataaacatttttgacttcaggattaaagtttgagtgggtggatcgatgctcatacacacaatctctttgtaactcaaattctaatactagaaagtataaaattagagtttatttcacaagaaattttaccgtatctttcaatagattttagggttctttattttaacagggcagtcaggtatataggctttttttttttttgtgatgttgaatatagaattccagctaaatcattttacgttggatttggtcaacatattagcagtacaaaaaattttgatctgaccagagtcgcaagatattttagataataattgaagttcgagactaaaccgagttggactgtcccaattaacacccctagataatgaacacatctcaactaattgtcgggtctttggatcatgcgtttgtttaatcactttcacaagtaaagatgtgtaggacatagaaagaacttaaactaaacagttgtgtatctgttccttctacttcatttggttgatgtttcataatgcgacgcataaactaatataataatatatggatatgtaatcctcatgcagctgttacgcattggtgccggtagtggtcgggctattgagtaccattattttttaatattatgacagttttagcatttgagttgtactaatagtcttatataggtttaaaaaaaaaaagagtatattgtttttctaatctttgataatatttacttatacacaataaagttaatgccttgtaatccaataattgtagtcattcaataaagttataagtgcatccgtatactctatcaatcaatcacaagtcacacacgtacgtgtcacgtttaaaagtgtcaaacccaaattatagatacacaaaatactacatacataataataaatttcgtagacttttagggcaagtttagactttagcgggtaatagactatgagatcttaaggatattatgtcgttgaaatttgcaaagaaataataacacatttgtataattcaagtttaagagatttttacaaggccaactccaatgattacacagtacactattctccaatctttaaaaaatggcgaagattggtaaaaaaaactgagtaaacaaaaaaagtaagatcaaaactaacaagattaaaaaacgattaaaaaaagattaagagttatgagtaatcatcggaagaaagaagcatagtgatgcaaattctgatgatatgaagctttgctctttgttgcctcactgtcctcttcatcttctccaacctctctttcatcttttccatcaactgactcatcaattttccagatatgttggataccaacatggcaacacatcattatacacacgcatacctttatatacatgcaaacacttacacgtacgaacaaaggaagaagcgacaatcccacacctatacacttgagttcaacctccaacactacatatacaaagtgtccaccatgaaactctgtcggaatcctacgtgataaagatacttatgtgtgtgcttatgggttatatatgatttacaccatacagttttgtgtttgtgggtggatgtacaattatacatagaaaaagctagctaggtagttactaatcttatttatatatataaaagatgacgaaatgttttgcaatctttgacatcatcacttctttaaatgatatatcaataaataatcatactgtatattcttttatttttcttgttaataaggaagttctaggtcttgatcccactttttttttttgttaataagaaagttctaggtcttgatcccacttttttttttttttgttaatgagaaagttctaggtgtattttatcccaaaatctcattcgatttgggaccaacttttgctaatatcattagagcgaaaccattactttcaagtgagactcgaacttgggacaactttcctcctaaggcagttcttgaatccaagttaactatccctatttattttatttaataataaatgtgggatatgaaaataatatggattggcgcatggatggagagggtccacttgtaggttggagagtgaagcaagttcacgtgctgatcatcgtcatgcaactctttgaatatttgcataaatacacgttcttaaactcatcctccatgttctctcactctacttttgtcctcctccactaacttgtcatttcttaactttttcaattttggtttgattatctcaattaattaacattatctattgtaaatgtcttatcatctttttttcttcatgtaatgctatataatcagtattgtctacaatctacgttacaccttccatttttgtatgctattcacgttaatttgtaaactgaattagtatatcgattgagatacatataggtaaaatatggccaaggaaaataagaaatcatttaaccaaaaataatacaattatacgaataataaattaaataaatcataacaatgataacaaagagacaaaaaacaaaaactaaatagtgatagcaaaggacaactaccttttctgtttatgacttatcttcaacaattagcttcaatattggttttattagccctacaagctgtccgtttcatatcaaacatataatcttcttgtcttccaaaatctgcttttaaacagcactgcctctctaattaattaatctagcttcaccacaaatttcttttagttctggtaaagttttcatcaatataattattctatgtatatcacataatttatatttgattaattaaaagcatgtatttgcgtttaaattggggatattgtaatggactacaagtatgtgctaatttttaacattaaaacctaagaaaaaagaagatatactaattgatatgtatgagatcatataataatatatgatgggtcgtatcttgagaccaactagtaaatcaggaccattttagaattagaattatcttgctccgccattatatgcgaataatcacagtcgaaccatatgcattatatcctcagctaaaatttagtactaaaaggttcatgatttgcgaagctttgttcacttggagagctggagtatattatcataattctctttaacttagcttattggtgtttattacagtcgcattatctctaaccacatatgataatagagaacaacataacttctagtagtaattaagcactttttatcaaattaaaagttaacactacaaataaaataaaccattgaaaataaaatagagctaaagtgtcaacagttaatcaatggagagatcatttgtgacacaagcagcagtatcatcgtcgtcatcactcactagcaaagctcgagcttcttccttcttcttcaatggtcgctctcttccttctctgaacccgatctctccgtttctgttcctccccacaagtagatccttcgctctcgtcgtcaagagcactctcgggttggttcctgatccatttacaaatttcatattaatttgattcttagtttgactctgtgtcaacgatttatgtaacttaattgtctaattttagtccactacagaggaaatgagtggaaaaaaatccaagcttttccaatttaattgcttattctcttctctggttttgctattttgttcaggtttaggtgtgaatgtttatagttcaaccttgctttgattgtttgattgataacttgtgttatagcattttaacattaggtggagactaattgcttctttatgggtcttacttgtttggaaaattgtcatactagtacaaccaccttgcatgcagaaggaatggagacaaatctttacttaggatgactttaagtggggatagctcggaaactgtagagatgacttcaactgatatgattttcgagccgattttggagcatggagttttccggtttgattgttctgttgaccataggaaggctgcttttcctagtgtttcatttaagaacagcaaagaccgggaagttcctattgtgagtcacattgttccagcatatattcctacttgtggttgtcttcaggaccaacaagttgtcacctttgaggttagtgtttcaattttgacatgatctagaaagatactagtagttctcttaatgtaaacttgtgattgcagttttctcctggtacatcgttttatgggacgggagaagttagtggtcagttggagagaacaggcaaacgggtgggttcattcacttaacaaccatcatcatttcgttaccctgattaatttggtgggtataatgttcaggtttttacttggaacactgatgcatggggatatggttctggaaccacttcgttataccagtcacatccttgggtactagttgtccttccaactggagaaacactaggggttcttgctgatacaacacgaaagtgtgaggtatatgagtatcctagctggtgcaatccctcttttgtggacccacgttgcagtgcaatctatcttgtccattgtattaacatcttttacttgtctagattgatctacggaaagagggaatcataagaattatctccccagcatcatatccaataatcacatttggtccattctcctcgcctactgctgtcttggagtccctctcgcacgccattggtattttcttaatattgctttctctatttatagcttgaatgtttctttgtagaaaggatctctgtttatgcaatttgtatgttgactattgtttgctctctctattgtttctccttcgtaaatattgttctgttttgaataatttatactttctacttatcaggaactgtgtttatgcctccgaagtgggccttaggctaccaccaatgccgttggagttatatgtctgacaagcgagtagccgaggtcagtgtttttgttcatattttggctttggttgttgagtaaagctaatgaggggaatgtcactttatattcagtatttaaacttttgagcttccctgtcatgcttttcatcattgtgctgatgattgcagatcgctcaaacatttcgcgacaagaaaattccttctgacgtgatatggatggatattgactacatggatggtttccgttgtttcacattcgacaaggcatgttttttcttaaagatcattccaagtggattttattaacagtgcttaccatggtttgcatagacgccttagaagttttgtattgacattataagacatttttttgaatactttgtttaggagcgttttccggatccaagtgctttggccaaagatctccatagtaatggtttcaaagctatctggatgcttgaccctggaataaagcaggaggaaggttattatgtctacgatagtgggagtaaaaatgatgtttggattagccgagcagatgggaagccatttactggtatttgacttccatatcacgatttttgtgttatcttatcatgttaatttgatatttctaaataaattgctgaattttatgtttggtttcaataggtgaagtatggcctgggccttgcgttttccctgactatacaaattccaaagcacgctcttggtgggctaatttggttaaggaatttgtttcaaatggtgttgatggtatatggaatgatatgaatgagccagctgttttcaaagtaattttttatatattctgcattcactcttttttattttcttggcagaatctttatccaaatttcatatggtcatatttgtcaatgtccaggtcgtgacaaagacgatgcctgagaacaatattcaccatggagatgatgagcttggaggtgttcaaaaccactcacactaccacaatgtaactttcttgttctactctaatctcaaattttatctaccacaatatctgatgttatgttatccttgttttttccgattatcatcgttcaagagttgtcttgtatatgtatatatagatgtcgagtgatagacagatatcgctattacttgtcttcgtatgtttctctgttattgctcttacaaatttctctagcagcttcctaaaagtttcgtatgaatttctatactgaggacatttgcagttcatcgggagtgaaaagtagtaccttggaggtacgatgtcaggcacttcaagataacttagtcaagatttcctgttgtgtaggtctatgggatgctgatggcaagatcaacttacgaagggatggagctagctgataagaataagcgaccttttgtattgacaagggctggattcataggtagccagagatatgctgcgacttggacaggagataacctttcaaactgggagcatctacatatgtctatatccatggtccttcagctggtaagtatttcaggaattttctgaatccttatcacaatattaaagtatggagtgggatagtcatttacgataactaatgtatcttgtcaagctttgaggacctaaaagttaaatactcgtgatcatatactttggctgacttcttcacatcaggaattatctattgttcctttaagctttggtgttgcttagaacctagatttttcaccactttggtagagctaacagcagaaatgagtaaaaatatgattttgctgttgtatttctcgattttggcaaagaactatttggaataatttgattttctctcataccataagttaacagttgcaacacctattaactctgagacattaaattgcacacaggggcttagtggtcagcccttatcagggccagatatcggtggctttgctggcaatgcaactccgcggctatttggacgttggatgggtgttggagctatgtttccattctgtcgtggccattccgaggctggcactgatgaccatgaaccatggtcctttggagaagaggtagtttttttcttgcaaatcttgtaagagctatttcaggcttttcggcattacaatttctttttcttactaaaagtaggacagatagacacctgagataactcataagatatgtacgcagaaatactaactcttttacgaagacctgcaactacatgtaaatttgttaaagaaatcaaccattcttgttattttccacttatgaactgtagtgttttaattagtgtgaggaagtctgtcgtgccgcattgaagaggcgttaccaactcctaccacatttttacaccttgttttacatagcccatacaactggtgctccagttgcagctccaatctttttcgctggtaggcttgtgtaaaacattatattccatgtcttgaacttatgcaatcatactatgctcactgttgctttcgtttcttgattaatgtagatccaatagattcccggctaagagctgttgaaaatggctttcttttgggcccacttcttatatatgcaaggtttttatcttcccactcaaacatggatatggattttgcgattttcatgaagttttcagaatcattgctttcccttactcatagcttgcaaatttcatgacttcactctgtcatgtgatttgtgttctgattttggccacttgatgaattttcggaacaactgatgtagaagtttttgaatgttgaagtaactagaactattgtttgtgcatgatgattgatatcttatttggtttgctcatgcaatttaaacttttcgttaataataacaactgaataattattcaccttatactctctatagtttactctgccaaacatttatactcatcaagttgtctttggtttttttctatcattgtctagcactttgtctagtcagggatcacatgagctgcagcacatattaccgagaggaatttggcataggtttgattttgcagattcacatccggtatggttgctaagagttgtgattgtcgtctcttcattctttgcgaaagaccttacacttttttttttatacttttcacatgttggttgtttgtttcatggtgtcaggatttaccaactttatatttacaagggggatccatcatatcattggctcctccacatctgcatgttggggagtttagtctgtcagatgacttgaccctacttgtgtcattagatgaaaatggtaagcttagctttggatccagacagaggcgatcagtgatctgaaatttttatttcgttctactctgcttctgttcgtttattttgcaacttgtctatcagataacaaggtatttatatagttagataggtcacaggtattatgttactgaaacttgtggaaagagaataaatcataatgtaacaattaatttttggaatttatgttgtagtgttcacgcgcatgattgtgtattaagctctataactcttttggtgattactgattgcattgtcagattttatgttcatattctaaatctcgtagtaatcaggataatacttccgtttgtctctgtcagggaaagctaaaggactcttgttcgaagatgatggagatggatatggctacactaaaggaagatttctagttacacactacattgctgagcgggattcttccactgtcaccgtcaaggtttcaaaaactgaaggagactggcagaggccaaaccgccgtgttcatgtccaattattactaggaggcggtgcaatggtactgctctttctcttgttaaagtaacatagtggaactataagttcaaaaaatttgattctagatagtgttgaacagcttgatgcttggggaatggatggagagtttatccacattaaggtgccttcagaaagtggaatttcagagttaatatccacaagcaatgagcgctttaaacttcatatgggtatatatctcatcttctatatatgtatttagctacttgtataatcaggtttgtagttattgagatgtattgcttctgttcattcactgcattcgtcaagtcctctgtaatatctagttacattcaactttaatttgcataaattaattactgtgttaaccaagtcgcagctcctgcctgtggataagatctttagttccatgaacctgtgcatactgcagaacactaatgcagagtatcttctttctgagtatgtgtattattgaaatgtagaaaatacaaaactgatacctgagaaggaagtggtacctggacaaaagggaatggaactttcaaaggagccagttgagttaagcagtggtgattggaaacttaatatagttccctgggttggtggaaggatattgtctatgacacatgttccctcaggtaatataccgaaaaactgtttttccgtgtactattaagcttgaaaagttgaaaatctcttatgaatgagataatttcaacatttttgtggaggatgctcagagacatacacatgttctgtttctttgaagtaaacaatctcagcctctatactgagagagacgatatctctatgttatttatattgtgtgttgccaagaatccgctcatgcttgattgttgacggtgttatgtccatattggatttagaatgtgcagagactacagttttggttgattacaatttgcaggaattcaatggcttcatagcaggatagatatcaatggttatgaggagtatagtggtactgagtaccggtcagctggatgtactgaggaatacaatgtcattgagtgagtttactttaacaatctctctcgtacaagcacatttcatgcatgcaatgaatgttgacatgaacacacagctttctgcattgtctttatttctgttactgaattgattgttctatctcttgtaggagggatttggagcatgcaggagaagaagaatctctgatcctagaaggtgatgtaggtggtggactggttcttcggcgtaaaataagtatagctaaagacaatcaacgagttttccggattgcctctagcattgaagcccgtagtgttggtgctggttctggtggattttcaaggtttgtctacttgcttcaagctttcctttttcttccactatgtctatgcttttgcaagagtttaaggaacagagagaatttacgcattaaagtacccaagacaatttgcaattttacatcactgtagtagaacatcgggaaaccaatctatagcaatcttgttgtgtaatttaagtagatttttgcataaaattgttaggaggttgggagcttgcaagttgcatgttggtttattcctcgtacttgatatatggatgcatatatcctcttctgttgttggaaatcccgtcctttttttttcttttgtctgcaaaatgatgttttttttggtgctggttatttaatgttgcaggctggtatgcttaagagtccatccaactttcactcttttgcatccgactgaatcgtttgtctctttcacgtcgattgatggttcaaagcatgaagtttggccagattctggagaccaaatatatgaagggaacaaccttccacatggtaagtacctttaggctttttcacatttccctcaatgttttaatcaatagcccaaataggtagaaggttgtgatactcaagcctaacagtagagaagaactaaaaaaaaaaccagcagaggaggcttagcatctttaaacctgcggataacctttccatgctgataaactttaatcatgatactaaacatatggatcatgtagcatttgggcaacaatctttttcttttttttttttttttcagggaaatggatgttggtggacaagagcctcaatcttcggatggtaaacaggttcgatgttagtcaggtcttcaaatgtattatccactgggactgtggaactgttaacttagagctatggtctaaagagcggcctgtttccaaggaatctcctctgaaaatagagcatgaatatgaagtcacaagtttcccataaatgtgttcaaacatttctatttaactacttgggttgtccattacaaatgcataaataagtgaatgaatagttgtggttaataattaaactatatatctatgtatgcgagattgtgttatattgacattctctgctacttggaatccttccttatgaagggtataatatactttctagctcataaacgaatgagtaaaagttaataagtttaccaaaagttgtattctatttagtttttgcttctagactaatacataaactatgttatgtgatttttaaacattggcattgcaactttacatcaaatatatacaagtgattcccagacattcgctctatatatacagttttatccctagattcttgcgataaaaatggatacgttaagaggtatgagggactcttatgcaccaccatgaattttgtatactggaacatcaacatatatataaggttgaagataaaaatttaataaacataaaagtgtgattctagtgtaagagccatgagctaatagatcaccgcacgcgtgagacagtttgccgagcttttttacgtcaaaacgttcggcaaaagtaggattgacagcatcacagaggcaatacatgttatcaatttttaaatttttacaacactatgggatcagagggataagtgtgaattgagccttagagacgtaacacgataaatcaaatcttcataacctttcgttcagctacatccaggaaaaggttggaacgacattgttcttgcaacaactataaacatatattatatataatagcatggatataataacaacttcatgttagtaaataataataaaaaatattttgaattaataatctctctctcttttttgttttgtaaacatgcggatctaaaaatatttattaaatattattaattatctttgaattcagaatgattacccgcacatttttttgtaattttatttggtaaataattttagaaactggatttaatttgagaaactttttgaatgaatttcagtatacgtgaccacacttctatcaatatgttataattattgaataatttaaataattaaaaagagtttttgatgaaaattaagcaaaatataagaaaaatatgagcaaaacataagttaaatatgataaaattatttgtaaagtgttatgtatgtccatgttattgagataattcaaattatcattgaaagcattgatgaccagataatcttgtttggtttatactatttaatattattattttaaaaatgtaatatcattaagttcaagaatgttgtatgacttgtatctttaatcttcggaacctcatgaccacattatgttcttgatgctctcaatggtctactttcaacttcttgagaagtgcaatattcagccaatttcgcaatcttcttaatgcttttaatggtttcttcgtctgttgctatggtgccatcaaccaagttcaagaatgttgaatctttaatcttcggacataaccacatgaccagattttgttcctcaacactcaaagtctcatcattcactttcttcatgtgatcaactccattagaatcaccccgaaagcatatacatctgctttttttgacactcttaaaacctacaaatatattttgaaaatatatatttttaattttattttaaaaatgattaaattaacacaaatacttatacatataataagctaaagattaagttctaacttaccaacataatatggatcaatatatagttgaaggttcccaccattgttaatgtctcaactgagtcgactccctcgagtacgagctttatacaaccaaaatcagaaatcttcgctctcatgccatatcctatataagtacgttggaaggcttcaaatctctatggatatagttttcttgcaagaccatgaagatattgaatctcgatgtgaaatatgtttggctagatattagggattccacttctcctcgatcggactctccggagacaagttgctcaagctgttatctaatcgataccacaacaatactataacataaactcaagccttactccaggccctggatagacagatctgtgatgcagttctcgctaagaagaaacctaagatcgaggttcaaaaactttatgaagatttggctcaattagcatgtcggagaaaacccatcttgtgttttctttcatgaacctatagaaaatctagaacatttgtactaacctcagaggcggtttggtcaggactgagtagtaagcttctttatgaagatcttggaaccaaatggctgaaactatatgaagatctgggaaaaggagaggaagttcctctactgaaagtggttgtgatagggaataccaccgaaatcaagaagaagcgtaagatcttttagtctaattcttttgggcaagtataacgatcttttagtctaatcttttgtaattgactctcaccaacagagaaaagctcaacaaatttactttgaggcaggtctagcatatgcagacgtaccaatcgtttttctaaaaataggttagtttctttccctgtttggcatgttcaaaagaaatatattatatattattcgaactataaacggaaataacggtcaagtagcattgagtaaagtggggtacagtcttctgaattgtgatggtatattattctctggcaaagcatttcaaaaatgaagtatacgaaaatttatttatcctttagttagagatcaattattttactgtgttttgtgtctgaaaatggtctactttattttcttgtgcttaaattttacttcaggtctgctattttttttacccggttctatccatatccgatccaaattattacatctttttgggtaactataaataaattatctttttggatcaagataaattatttgatcccataaaaagtatgaatcgattgatcactactaggaatatccagtttacatgtttaattaggtaattaaaaaataatttgcattctacattgaatactcaaatataattgtattcatccatttttaaaaaaagttctaaaattttctaaaaacattcaaaatacttgaattaaaatatgacatttagggcttggcataaaatccaaaattcagaaactgattcgaaaaatctggttccgaaaccaaacagttataaaatcctaacagataaagaattctccaattgaatatcccaaccaaaaagcgaaagtatatccgaaaactcaaaatataattatatatctaaaatattaattataatttaataccaaataacaaaaatatccaaaatcatacattttttacttaatttaaccaaattttataaaaattaaaccaattttgattagtaatgaacaaatttttaagttttatttttttcctaaaaccgattcgaaactaaactggatggtcataaacccgaacaaataataaatttttctacctcagttatccgatccaaaataaatccaaaccaaatcggatgagaaatcggaatgtccaggcctaatgagtattatatgttaatgtggaactaaatttttattaccaatttgagaccagtagttttgacatagtacttttggtgctttttgatattgataaaatgttgtgtgctttcatgttatgtgcaccaatactcctcaggtgaggattggctctggtttcctttataatatcaaatagcttaatactcttggtagagttaaattcattataatgctttctaggttgacctcacacatcttttagctgctcgagatcaaaagctgaggacactttcagctgagataaaacttgattctagagctttatctctatatgatgaaggtacagctgaggtagtacttgactctgaagctccatctctatatgagaaaataaaaactccatatattttaacaaatataaatgtttttgtgagcgcctcccttgtagatgaattaacttcaatattttaagtttgtttgtggtggtgtagtatgcatgagacatctgagcaaactcatttggaaaataagaatcaaagctaggtttttaagataaagatcatagtgtaatatctttctactgaaagaagtttgtgtagtgaagcttttcttaacttttctctcttggaatcaagatttcatctcttctcactttgtatatttaagtccttgaaacaaaaacagaaaagtaatgatgttacagaaaatttatcaaagaaaaaacaaaataatgatagtagatgaaagtaagatgataaaaaaaaaatcgtgtacagtgaagtttaatttaatgtaaagtaaagaaacaaatggactactcaagactgcacaaccagcttctggagatgctcaaagaagacttgaaggctcacgtcgtctgtgaatatcacatctgaccctgtagacatctcgtttgcattgttgtacgtcgctgatggattcagcttcgccaataaaaaccttgcctgcattttcccatttgaatccaatgagatgtacaaacaaaattgaagctgacaattacatgaaaacaaatagataagattaatgacctgcgagccatgctgatcacagacaactaatcttgggacagggaaacgttcccggactatcatctgggaatcctcttgaggagcttgcaataactcagcaaaagcctatcacaaaaaaagttatagtcaatggaagattatatgtagataatcattcaactacaatgagatggttccgcatcacgaaaacagctagttattagtacctggtgttcaggctgatgatgataacccatatttcgccattgtgctatagtcattccatggaagacaacaacgctaaaatatgcatctaataaaagaattcgatcggctgcaatggaagccacatctagcaaagctggttcagctggtgaattgaatgaatatgttgttaacgacggttggatcatgacagttgcattcgaaatattctcccggtttagtaacatgcagaaatatgcggtttcatcagggctattgttaaatacctgccaccatcacaaccccggaaaaaaaaaaaaacaggatactaagctaatgatatgatgaacacaaaccatgaaatgtaaaagtagtggtacctgaacaaactgcgatcgccgcagattaaatataaattgaggaaataacgaaaaatagggattcagcgtgaaggaggctggatcatcctttctatagtctccaaattttgaacaaagacgaatgagattccgatctaaccagcgagtagcatcaaatccctcctgtggataaaatatgatgaattgtatatatagacatgacttagtgataaaccctagttaactagtccctgcagtattttccaagacacaatttggatcctccaagttcatatgactaatatacagctgtgtgaacaataaactttgaatctcttctgtataaatagataagcatttgaaatcctagggactcctgttgagtattattcccaaggaaagacacatatttgaaaacatttccagcattaagagcttactccctccacaagaatacaatatagcaactaccaaactgaagttttctactgtgacgtacctctgactccattttcaaagaagctaatctagccatgaccacagcagcagtttcttggtcaaagccttgcacaagttcctgaaaagtaaataaccaccagtaatataaaatgcttaaaatcactaagaagcttttaggctataagaatcctgcattgcatttttgatggttatagctaaatgaggacgaacctctgaactcacagcactgtctatccactgtctgcatacagtagtaacccggagcaatgtttgaccttcagggttttgataactgcaatcaaataaacaacagtaaatatgatacttcggactatgatgcccacaatgtactgcagaaaggcacagttcaggtgaaactaaaaaacaaataaaattcaagactgaaacactgcccaaagtaccttgtgagaaactgcaaataaaactgtggattcgcagctccaggagtatttgacccgcttgaagatatgtcaaaaaatatcgtcaaacacgtagttttatcaaggccacacaacctccaagcagaagtattcccctctccgataaccgtgtcagcaacactagcacctttctgaaaggatcaaaataaaataaaatttaatttgattaagaacagatagctttgttcatctcacaaatcactatcaatgcatttttgagagaagtggatcttcatgtttaaccttctctaatgatgagcatggcccaatagccccttgaattttgatgtcctgtgaacaacagatctcaagcgtcccactagaaataaacgattcaaggtcagtttgatgtaagcacataatttaaattcttaaatacaagcttgaagtgtatgatgcttcgaaggaaaggttatcacattgccaaaattttctttactatgtaatagatttatcaaagagagtgatgcataaacaaagtagaaacttacttaaagcagaggccaagagcctgatcgccatcttcaaatactcgcttgaaggaatctttgaaaacagaatggccaaaactttcagacagaacaacaaggccaccagttctttcaactgcaactttcatctcagcaacaccaacctaactatatccaaaatgcaacagcggaaataattataattagatatccaataatagttgacagcacgacaagctacaacaagcaatgccttatgttgactaaagacaactactggaagaaacactgtagaggaaaacatcatcaaaaacaggaaaatgaaggggtttaacgattatggcctagatttcatagactatttatcacaggctagttaacaaaattgaggacaagtgggaggcttcacattttttttgtttatattgaccaacagtttagtaaatcccattgcatatcaaggccacacttcagagacaacaataaaagatgcattcattttatagacaaaaaagtactacacaaaagatttagaatccaggcgttgcaactaatgcaaattgaactgcacaaccaaacttgaagaactaattcagagccttgcgcaccaacgatttataattacgtcgcagtaatacctgatcaagtgcagaagcaaaaaggtctagaacatgaccctgagtgactagttgctttgcgatgctatcataaaacttgacagccttcttatagtacggagcggcatctttatctaaatctttgtgagaacgcacaggatccgacaaatcctttgagacaatctgtacaaaagagattacaaatatgcttcatacacatggtgtgatcaaagctcacaatgccaacaatcatcaacatatacttaccgttccagggccttccgtacatggacctccgatcaaagctacaattctagccccagttccaggcaagcaagctccaagcaatcctgcagctacactcaatgccacgcctgtacatcgttgggaccgatgacctggcttaacaggccactgatcactttgtagctcatccaaaagctacataccaaacatcattcacacaaagatagaagaatcagatgaaaattttccgacttgacaatcaaaagcaaagtcactcaccgagttgagtgtgaattcgcactcggaagcaggcaacaagaatctattcaaaccagaactcgggaagccattttgaggtcctttagaacctcctctcctagaagaaccaccaagccccaactgatccaaaatctgatctttcgaaatctctttatctcctttaaaaacaaaaactttagacatctcagagaatcccaattcatgtacatgagcctgagtaccaaacgacacaaatccaaccaaagcattctccggaagcaacccaatcgcttgtttaagcgccgatttagcaaaatccaattcttcttcaatcatacaagtatcaagaacaaacacaaacaccggcggatccaccagaccttccccgttggctacaggcggaggaagagtgtattcaacagtagtgtactgaggataaagctcaccaggaagattagtctcagagatcacatgataatgaggcgggaaatgattacgctgataacaaaacggacagatccaaagctttgcggtgaaatcgacttgtgcgtaagcgtttaacgcagcggaacaagtccggcatcggagcggtgcgtaaggaagagtagggatatcggcatgtcgccggatcggagaaatgcaagcggcgagtgggatcacgcatttgctagcttcagctttggaatgaggccagacgttccatgtcatacgaactccatcgattccttctagatctgtattcgcagtctccgccattcgttggaagcttttagatcagatcagagaatttgagttttttttttttttttccttaatgaagaaattgaaaaatctcaaaattctttggcgttattttttaggaactctaacgttgactgagtatcaaatatttctatttttgtgtgtctatactcatttcattttagttaggatcgaactgagatcgtagaaattgaaatggtaagtctaattactgatttgtattcctaagctcaaacttgagttttttttttctaaaataatttttcaaaactttgctcccatgatcatctttagccagtttcaccaacttatcttcatcacacttcacaatctccttcgagaagatccccaaagccaccaccgacttaccgtcaccgagaagcttctccacaacgtttctcccatgtttatgatacgaaagctcgatgcaatgccattgaagcatacatgcgatggtgtccgtaatacgctcgttggaccaatgtgtttcccacttcccagtgtttcctttgaaagggagagagatttagtttttggatttcatacttcacttgagaataaggtcttcttttcttgaaaacttgtatgaaatataacacgatgagataaccgaatttatcggttctaatatcggtgagcctttgcttaattgcttccaagaatgttgtgtcgacttcttctgattttcctaggattatttgaatcatgcatgagtgagcctcgcatggttttggtaaagtcgataaaaagatcagaatctgatgccaacttggaggcaatcctatggagctctactatgttggaacgcgagagaatgtcatcaaacttagccattatctcgtgcaagtgtggtcatgtgtgatttttcgtgtaaaatcgagcttaagcacatgttggatcaatgaacttcctaataagagagcgttctttgcgattaggtcaaggaagtaacctttgaagcgatcttcagctattgatatgactcttttgagtacacagcaaccgaatacgtcacccgctaagtcaaggattatttgaatcatgagcgagcctcgcatgatttcaacataataaccatgatttcaatacaattatgaattaaagtgatatatttttgtagtctacaaaattatggttattattgtaatacaacacaataaccatgatttgaatcgactgtttaaatttggagtttaccttcattgggcttcgtttataagcccaacccaacacaatctaaaacctcacgtgccacgtgggataaaaatatcctaagaataaataactcaaacggtcgaacaaaatcatgggccctaatttgatcttatccgttagatctatcatctcacgatcaacggagaatagatgaataaacatgtgaatgcgttctcgatctagaaattcaaaattctcgccattaacggctctctctcaaactctcaaactctctctctctcttcccttcttcttcgttactttgcccgaaacactgactgttgcagaagcagatttaattcttctttagggaatcttcgaattggttagcgcagagagatgaagcatttcatgatgccaaggaacgctatcttgcgtgatatcggagagtcacaatcgccaaaccctagcttgacgaaatcgaagtcacaaaggaagattaaatcttctaaagagaatgctccacctccggatctgaactcgttgattcctgatcatagatcttctccggcgaaattgaaaagtccattgcctccgcgtcctccgtcgtctaatcctcttaaacggaagctgattgcggaagctacggcggataatggagtagcgattggggtttcagactctggtgtcaaggtagtctgagctttttattttttgtttttcttgctcagaaattggagaatgttcgaaggaaaaatcctaatgtcttggattaattggtctaattaagttccagatttctataaattaacaaaatgaagatgattgcttgtatttttagaagtttatagttactaaattgaagagaaactatattatgttttctgagtaaagtttaagctaatctctaagtctttgggcatatgtaggttatagtaagaatgaagcctccaagcaaaggtgaggaagaggagatgatagtaaaaaagatctccaacgacgccctcactattaatgaacagactttcacattcgattcgattgctgacccggagtcaacacaggcaggcatttagttttcatgattggggtttcactatacaatgttatcttatgatttatataggctaacaagtctttatcttttttgtattctttgcaggatgagatctttcagcttgttggagcccctcttgttgagaactgtcttgctggatttaacagttctgtttttgcctatggacaggtagtcatcatttctcaatctgtttctacgggattgaatttcaatttctcaagatgattgtaattctaacatttgttttcaccagactggcagtgggaaaacgtataccatgtggggtcctgcaaatggattgttggaagagcaccttagtggtgaccaaagaggtttgactccacgtgtctttgaattgctcttcgcccgtctcagtgaggtgatgcttcgtgttgtttcctttcagtctgtttcattatgtgagagaggcagaacattcaaaagttgattttttttgtttgcaggagcaagcaaagcatgctgaaaggcagctaaagtaccagtgccgctgttcgtttctcgaggtttaatgagtggattcaactttagtttttgtgcttatgatgttttcatttatcaaagcttgatatacatggttccctttcccatcttttattgcagatatacaacgagcaaataacagatcttttggatccgagcctaaaaaacctgatggtaaaaggaacttgcaatttcaacttgtttttacattttttaaggaaaaagaacctgggttcatcatttttaattaatattgcaccagattagagaagatgtcaagtccggtgtttatgttgaaaatctgactgaggaatacgtgaaaaacttgaaggatttgtcaaagcttctggttaaggtttgttatatcattatatttcatgcttttctactttgacagtagagtaattgctcaaacgtacgtacacttgtgtttccattgcatttctccttaacttttaaaagatgggtgcacaactttggtttgttataagaaaaagaggtcacactacaggacttggtaatactgtgtattggacttaaaagatctttatatcgccaaagaagtgtcaaagtcttgcaatagtcaatctgagctattttgttgctttgctttgacatgagtatcttcaatagtaatgcttacatctgaaactggtgcagggattggcaaacagaaggactggtgcaacaagtgtaaacgcagaaagttcaaggtcgcactgtgtattcacttgtgttgtcgagtcccactgcaaggtgggttgttctcctttattttattgtgcctatttaactggcaactgcaagttttaagaataggctatgaggctcagatgcttactagtctagcaattattatgaggtgatgtcaatctatatctgactatatttgaatgtaatatgtaacagagtgttgcagacggtctaagcagcttcaaaacaagtagaatcaatcttgttgatctggctggttcagaaaggcaaaagttaaccggtgcagcaggcgatcgtttgaaggaagctgggaatataaatcgatcactttcccaacttgggtaagatcagaatagtctacatatagataggctgcttattgattttcttttgtatagcatgcatttgaatctggattttctgtgccggatgttttatcttgacattttacagatgtgatgctatagtctgaaactgagaatcgtagataaatgtaaaacttacaagtgtttttacttgcaggaatttgatcaacattctagcagaaatttcacaaacagggaagcaaaggcatataccctacagagattccaggttgacatttctattacaagagtctctaggagggaatgcaaaattagctatggtttgtgcagtttctccctcgcaaaggtaaaccgagaacccaaatttctctttcagaaattattccaccctccctccacttttctgcaaaatgaaattgcatcataaattgcagttgtaggagtgaaaccttcagcaccttgagatttgctcagcgtgctaaggcgatacagaataaggcaattgtcaatgaagtaatgcaagatgatgtaaatttcttgcgggaagtgatacgccagctgagggtatgcactctttggattatctcagaaaatgtaaatacaaagttgaatataatatctaatgtaaactgtgcaggatgaactgcaaagggtgaaggatgataaaggaaacaacccaaccaacccaaatgcagcttataccacttcctggaatgcgcgtagaagtctgagtttgttaagaagctttggcctgggtcatccaaagtcattaccaaatggagatgatgatggtgatactgagatggaaattgatgaggaggctgttgaaaggctttgtgctcaaatgggcttgtctccacctgccgaggacaacaatcaggagatgagcagagtagaaaaaataaattcatcattacagactgtggtcctgaaggatgaatcttacaataactcccaccttaaatcatcagaagctacagatgttaacatggaggatgcgtgttgccaaactgagaacaatgggtcagagactgataatgcgttaactgtggcagaaactatggatgatggttctagtgtacagcctgattccataacaaattctcttcattcttgtattagcgacacaaaccagggaaattcaccaagcaaggcggagaacattccatcatgccaagacttggttatagaagctgatgtttctgcaattgtatcagtagctgatacatcaaataatacagaacaggtctcagtaaatcctgtgtcgccttgccttagcgtcgctccagtaagtgtttctcctgtactaatacctcccactgagagcgcctctcctaagattagaaatagcaggaaaagcttgagaacaacatcaatgtccaccgcatcacaaaaagatattgagagagccaaccagttaactccagaagttgtggaaccgtcgccagctatgtccacagaggtgttaaacctatatagtgctttgtctacaaagaaaagtgaagcttttcctgtgccaactaggcaattggcagctagcctccacagaggcatgaaacttcttgactcatatcgccagagtacagctcttagacgatcgacattcagattgtcctacaaagctctagaatgcaaaccctcgaccgttttaagtaaggctgatgtaggtgttcaaacttatccccaagctgatgaaatagcggaagacaactctaaagaagtactgtgcagtagatgtaaatgcagggcagaatgtgatgcccaagaaataagtgacacttctaatcttcagttggtacctattgacaattcagaaggttcagaaaagtctaatttccaagttcctaaagtaagaattgtggctttctttagagcatttcgttccgcatttgtatagtgtaatagtatgatatgatttttctgcaccttacaggcagtggaaaaggttctagcagggtcaatcagaagagaaatggctatggaagagttctgcactaagcaagcctctgaaatatcacagcttaatcggctggtatgattcttgcttatgttctgttggtcagcttctctactttttacatataaaggaaacctttctaattatctctggaaaattaaacaggtgcaacagtacaagcatgagagagagtgcaatgctatcataggacaaacaagggaggacaagattgttcgccttgaaagtctcatggatggcgtgttatctaaagatgattttctggatgaagaatttgcatcactcatgcatgagcataaggtaaatttttgggttaccattatttagaagtttattgaatcaatgcagatatgttttcttacatataattgtgcagcttctgaaggacatgtatgagaaccaccccgaagtattgcagacgaggattgagttgaaacgagtgcaagaagagctcgaaagtttcaagaacttctatggtgacatgggagaaagggaagtattattagaagagattcacgatttaaaggcacagctacaatgttacactgactcttctcttacatctgctcggagaagaggttccttgcttaagctgacatacgcttgtgatcctaaccaagctccacaacttaataccattcctgagtcagtggacgagggtcctgagaagacactagaacaggaaagacttcgttggactgaagcagagagcaactggatctctcttgctgaggaattaagaactgagcttgataccaatagattgctaatggaaaagcagaaacgtgaattggatacagagaaaagatgtgctgaagagttgacagaagcaatgcaaatggcaatgcagggtcatgcacggatgattgaacaatatgcagacctggaagagaagcatatccaattgcttgcaaggcataggaggattcgagaaggaatagatgatgtcaaaaaagcagcagcaagagccggagtcaagggagctgagtctagattcataaacgcacttgcagcagaaatttcagctttgaaggtgcaaagagagaaggaggtacgatacttcagggatgaaaacaagagtctccagtcacaactaagagatactgctgaagctgttcaagcagcaggagagttacttgttcgatttaaagaagctgaagaaggattgacatttgcacaggtactattatagttatatttctaaaatctcacccatatcctatcatgtgactcttacttaaactttctggcttgtgtattcacagaaacgagcaatggatgcagagtatgaagcatcagaagcatataaaaaggtggacaagttgaagaggaaatacgaaaccgaaatcagcactgtaaaccaacaacataatgcagagccacaaaatcccatagaatctttgcaagcttcttgtaatgacgatgctatggccaaatatgatgaaccatcagctagtgatggtgataaccaatggagagaagaattccaaccattttacaagaaagacgaagagttgtcaaagctcgctgaaccctcttggttctcggggtatgaccgatgcaacatataatttcgtttccacaacattatttttctgtaatgtgtaataggaaaaaaaagacatgttggggtctgatccgattctgtgagatatatctgaagcttgtactcttttcattgtatttctaatgtgttacaattaaacatttttttgtactcgtccatctctcatctgaaagaggtctttgtttgattccctgtaagagattagtagagataaagaatctggaagatgtgtttcttatgttatgttgtacaaactcattttacagtttgatttgttctcaacggcacaactctcctcgatcgtcaccgtcaacatcataatgagtaaaaccttctctgaacattctacgcaatctatgcgaataactcgttggcatcaatgtgactacttgtacaatcaactctgtaaatcatataactattgaacactgtacatcatttgttgtacatatgagaaaagaaatagatttcattgttactaatttttattttaaaacatcttagcaaatcttcatcatgatgcacattaagctggaaagaaaacaggtttatgaaagaagagtaataatgttcaaagagaagaatgagtaaatgaaagacatacattaggcattgtaaattgagtcttaatcatctcgttttctccttttgcgttacaaactcactttacaattcatacataatttgtatttgtccatctctcatttcaaagatgtctttattagattcctgtaagagactttgattgatcacataaatagagataaggaatctgaaagatgtatttcttatattaagtgctactaactcattttacagtttgatttgttcttaacggcacaactcctcgctttacagttcattcgtatgaaaatactatagacgaactagagaatacgcatgatccaatcatcgaatcacgggatc

SEQ ID NO: 457 - DNA, 71178 bp, Arabidopsis thaliana
tgaagaaaggacttaaagagtagagttttgcttagaaaaaagccaagaccaatacaagctaagactaaggtccctttatttttcctttcattgttctgtttcctagattcttcaaatatgtgactacttctacaatccattctatattgaacttctgaatcccttaagtgatcgcagccaatatatcatttgttgtacatataagaaacagaaatagatttctttgttactatgttttgtcattaaacatcttagcaaatcttcttcaaattttatgatagtagagtaatcttgttcaaagaaaagaataagtaaatgaaagacattacataaggaattataaattggagtcttaatcatcttgttatctcctcatgcatgttgctctcatggattcgtttcaagtaagacaagtctcgacatgttttcatcatatcgaagcttctccaattcgctttcttcttccctttcccctccttcaggttgcttgatttgcactaaacttggaacataagagcacagatctgtcttacatctttggtctccataatctccaacgagatccaatgccctcaagtatccagcctctccaatgatgttaattgtgtggcgattcccatcttcaaaaccaatggcgactttcttctcctcgtcaatgaagaaacttccatttataataggaacataactatcaaatccagctgtttccactctcaagaacttgctccacaacacctctccagtctcaatcttggtcgtaatcgataagtcaagctcatatggatttgattcatcgtgctgaagtaaaaccgcaagcttctcttctctaacacaagataacgtcatacagtcaatatgcccaccactaaacggcagaggcagaagaggaccaaatctctcacttgtaaaatcaaaacagattaagcgattagcaaagacttcatttacatctacgttcctttttgcagcacaccagtacgtgcttcccttaagagaacgccactgttacaaaacgctatacgcaatgtggagtgacatcaagagtagtccacaaatcagagtcaaaatcgtagatttcataccaaaagaattgcttctcgtgtgcattgtagtaataatctatcaacctcaacaacttgtagttacgacaagaatccgtattcacgtatccaagagcgtaagagaacctgcacatattcacgtatacgattaacttgcaaaaagtggaacgatttatccaaaagtcagagctttatgaagatgcacattggtcaagccgcagcaaaggaaggtgagtctcagatgatcgtgatgatgggtaacaatctttctttaacgagtattattctcaatggagatccatctatagagcataaaggaaaacttccttgccttgacgaacaagtcaagatatctcagttctatcactgcgagggcttactgctatgcattttaaaagatgattctaggtttgtggtttgtaatccgtatttggagcaaacaaggtggatcgaaccaagatattcccatcgtccacacggatgggataggttctcttacgctcttggatacgtgaatacggattcttgttgttactacaagttgttggggttgatagattattactacaatgcacacgagaagcaattcttttggtatggaatctacgattttgactctgatttatggactactcttgatgtcactccgcattggcgtatagcgttttgtaaccgtggcgtttctcttaagggaagcacgtactggtgtgctgcagaaaggaacgtagatgtcgatgaagtcttggccgatcgcttaatctgttttgattttacaagtgagagatttggtccgcttctgcctctgccgtttagtggtgggcatattgactgtatgacgttatcttgtgttagagaagagaagcttgcggttttacttcagcacgatgaatcaaatccatatgagcttgacttatggattacgaccaagattgagactggagaggttttgtggagcaagttcttgagagtggcaacagctggatttaatagttatgttcctttataagtgaaagtttcttcattgacgaggagaagaaagtcgcctttggttttgatggacgtaaccgcgagagagttattgtcattggagaggctggatacttgaggggattggatctcgttggagattttggagaccaagaatgtaggactgatctgtgctcttatgttccaagtttagtacaaatcaagcaacctgaaggaggggaatcgaaacaacaaagcgatttagaaaagtgtcgatatgatgaaaacatgttgaggcttgtctcactctaagcgacaaatcaatgagctttgataggaggaaggaaaaaggagccaacgagatgatattactctattattacgcagaaacagagcttttatttcaagtcttgagttaatgaaactgaagattaagatcatgttcatggttcattcttatctttcttcatcgataatgagctagtcgctcaatctttttcttctggaacttagcttagtgtaccttaaaatgcaatattagagtctcatgaagtcaattgggaacgtatacgaatcgaaagagagaacttctgtaatcaaccactcgtactctcaatcttgtttcgtaagaaaatgtgaaaagaatataaagaagtgaacaaatttattcctgtttcttacaagcttagagcaatcataatacataacgattgtaaaacagtacagagaaaagttcttgtcatatttttacatacttaatctgaagttttcttgttttttttttgtttaaggttgagaagaaatcaacagagacacaagcaaagaagcaacgattgtaaacattaaaattccaatatgattcactccgttactcatcactacttggttttctgtatgtacaacagagataataatcatagctatggactatggttcaagcttcatctgaagcgttggctcagaacctgcaacataaagatacgagactttaacaacataagagatagttctataatttcgatagacgaatttgcttctaatttttcttacagttgttgttgttgttgttgctctgttgctggaggatatctccaaaacccatctgaacaatgctttgcaggtcattattttcccagaatcctggtgtctataatgaatcaaaaacataaaaggatcgagtttacgatacgcacaaacgagtttttctagaatctgacgttagctactactaaaactacctcagtgtgaacaaatccatcgtttgaggggaattgtgtgtctgagaatcttggcatgttcttgccaagtgaatagtatgctgatggaagtctttgctctgagcaagccattgcgtaaagagactgcgttaacgactcccccggttgaatcatctacacatacaaatacacacattatagatacaaaacattccataatctgaccattccattatagatacaaagcagaatcttacctctgtggataaagaagcattagcattaaactccatccttggatttacggtagccagcttcatggacaagaactaaagaaacaaaccacgagttttagattcaagatatacaaactccaactttcaagaacatttatgaaatacacaattcatacctcaacttgtctctgcaaggactgcacataatttataatttcatcaagcatgactgctttccctgtaatccggttgcaaccaggaaccagatcctgaagcaacgtcattctctcactaatcttttctcttcttgcctgaaaccaaaacacagccaaaaaaaacatcaacatcataaacatcaaaacagcccctaatcaacaaaaaaacagatcagttttagaaggtgtgtagtactctttcagcaagactatggctatcagttgcttgaccccttctagctctgacatgaatataatctttaggcgcctcaggaggcttagcatcgtccttattgtcgcctttactatcgcacttctctactccgtttttactactcccagctacatcttgcttgcttctcttcccacctttagatccaccattctctcctgaaacctaatcatatatccaaaaccaaacacaactaaaaaaccttgtacacacactaaaaggtctatagataaaaagtctccacaaaacacaaactttcttacacatatggctacagtttcctaaagtatacatttttgaaatagagcaagagagataatgaatcaaaacctttgaattggaagctgtaagagacgatgaagctggagactccttgccattaccactaggaatcgacttcctctttctagagttagatttcgtggtgtgaactcgatccgaaactgaatctggatccaacaaagagctcttgttactctcctgcgttgttggttgtgacccaaattcacgatcggatccaaattgacctggatatggagggaatctgattccaccagagattgggaaattctcggagatctgagaattcagagagaaggattgtagagttaacggtgaaatctcctgagggttgttgcagtatcttccaaggaaatctccaattgttccttcattgccattgccaaagggatcgctctgacccaaaggtaagtaatttagggtttgctctgtttccttgtccatgttcatctaaaaagactagaacttttatgaacaaaaaagtgaaaaattcaattccaacaacttctctgggaattctgaagaaaacccagaatctgaatcagaaagcaagattgaaattgagtgaaaacaaccaaatttgagaagtaaaaagacaaactttatgtgtgtttcttcaaaaacaaaacaagtgatgattttttaacttcaatgtaagcaaaaaaagagcttctttcaattatgggtttagtggagaagaagatctaatgagggaaatgagtcaggaagagagaactagaaatgaagaagcatgattgatcaattaggggaaagaggaaagagaagaagaaggcggtgactttttttactgatcaaaggaagaagaagaagaaggtttaagagaaaatgacaaaataaaaaagagaaagtaatgataagaaagattaagaaattaaaaaagagtgaattttacagttcaaaaggagaagaatcttacgtgtgttttatgttaatgtgggaacattagatggtgaaagtgggtaggctgcttaggctggcctctgtaatcattggagtgagaataagagagaagaaagagagagagagagagagcatgtgcatggcagagacaggaaagttgtgggagagaaaacaaacaaaaggataaaattgtttttaattatcatgtttgattattcttggttaagagactattttaaaagatgatggtacttaccaaaacatggtgtcaaaaaagtcaattattgacttgagaaggttttagacttgaatttgatgtattatgagttgtttatgttaatgaagtttataatgtgtaactaaaaacattgagtatacacatatattttcataggtttgtgttatgtgtgacatataatgatgatacaaatgaatttgcatttttgccttttaagaatatttctgaagtagtctctgctccacttgaagttacattggcaagagtttgagatgcatagagctgaatatagtggctgagtatcaaaagtcttttttcgggttcttaggggacgcgttctagtacatgctgaagcgctttcttgattcctccttgttccagagacgttgtcaagtgtatctcttgcacctgtaatgttaatattttacttaaaatcaaaccaagaatctctctatctatggccatataaatgggtagcttctgagatttacctgtcttccagcacgggcaagaagaacaaacttcccatcagaaggcggtgtctgcgtgtgaacatgcgcatagaatcagaattttcacagagcagagtttattcttacgggaaagtaaagagaaacagaactcacatttgagagccaaagttgtaggtcttgtgaaaccactcttttctcaaatccttgccggttgattttcacagcttctattctgcaatatagaaatgaatattagttacacactggaaccaaaatgttatgcctgaaacatagattctataagtaatgcaattaacaatatccaactcatcatgggttcagaaaaagtatcagccagcaatagctattgacatgtatatattcaatcgcaaatcgaggagtgaacaaatctagtagagtagaggtgatcctagtcacttataataagcagatattatgcaaagagctgactaggactgcatagtaaatttaaattataaaatgatattgtctatatacccatcttcctttaaaagctcttcaagtattgtttctagccctggaagaggttcaattgtatccccattgttcgagcttagcgaaggagatccagtagaactgtcctgtaacaatattcaattatctattaaaaatcactaagacccacaagagacagaaaacacattcattcacattgttttaccttcaaaatcactttgtctaatgtttctagaagaggatcatcttctagttgtttgatggatagtgtaatccttgatttctctctgcattggaacaacttttgattaaaaactatatcatgagtcatggctaataaatttcagtaaccaaaataagcaactcacttgtcaatattcgtgactataacccgaacctcgtcaccatcgcgtagtacatccctaacatcttgaacgtaatcccatgatacttcggagacatgcactagtccagttaaatgataaagacctatacaccaccaccccacataactgacatcaatgtcataagctcaaaacaagaaaaagaaaccaagaaatttaggtaaaagcaaatataccatcatcaaaacgcaagtggataaaggcaccatagtcctcaacagaacctactcttccgttaaacacatccccaacattaacgttttgtgaatactttggccataatgctaacttctcagataaaatcaactttctattttcctcatcagcttgaacaacctaatataaagatttacctcaaattataaacaatatagagatcacaaaacaagccaaaggagaaaactttacctttacaggaagtttagaaccaaccaaagtcttagctatctcatgaatacttttctgaggctcttcataaagcaaaacacaaaccatcgatcaatgtaaaaatcgatactttaaggacataaacatagaaccttgtgaagaagagagagttttggttacctttacaagaacgggaaggacttaattgtggataaggaagaaaacccacaagagaatgaaaacgaataagtaagccaccaccattaaagccttgaacttcaccttcaaatgtatcaccacttttacaataagcttttgctgttttccaatcgcttggtcctgcagctgaagcttcgtcggaggtatcacggagaagagaattggaagcggagaggactgaggaagaggctgattgatcggagtttctatcggtatctgctgtggcggagcttgagaaggatttgactatgcagacgagagagtttctattggaagaagaagaagacgaggaaggaaggagtctaagtgggcaagagaggaaagtggattgttggtcgaagagatgagaggcgaatgaaacagaacctaaagtagtagcgccactaaaaaccgccattgttgcgcggtagagcaaaaaagccacggagattgaaggtaatgatggttaatggattttgccattttggataagaaagtgagagactggagatgaaggtgacgtggcatttgtcagctcacaggtgctatattttaaaacatataggatcaatttgtaaacattggataattagagggtttctttacaaaaacaattctaattcaagcaaagagatcaaatctttttcctcagtgtcgtcgtcttcttcgcaaagcctttcaaaaacccttcactactctttctcagagtctcaagcatcattttcccgagaaaactatgaattcaaacattttcccaccatcgaaacaacaaaacgagcttaataatatacaacaatccttctcaaatctccaatctcaatgctccaatttactcctcaacgtttcacaaacccttaatcctctcttcaacgccaacacgaacaacaacaaacctaatatattctctgctctcaattcgtttcgtgatcaagctaagcaagctttagattctagaatctctcgattcaattctggtaaggcacctgtctgggcgagaatttctgacgacggtggtggtgcgagggctcaggtgacggttccgattcgcggaagcgggaaaggattatctgctgatgctattgaggagagattggcgggagttcctgtttacgcgttgagtaattcgaatgaggagtttgtgttggtttcagggacttcctctgggaaatctctgggtttgttgttttgtaaagaggaagatgcagagactcttcttaaagagatgaagagtatggatcctcgtatgaggaaagaaggttcaaaagttgttgctcttgctcttagcaaggtataaggaggaatcaataactcaattagctcctttagtattcttctgtttagtggttttgatttttgtgtgtgttgtttgttgcaggtgttccagttaaaagttaatggtgtggcatttaggttgattcctgagtctactcaagtgaaaaatgccttgaaggtgagttgattttacgatcgaacatatctttggatactcaaaaacttttctttttgtcacggtaggcgttagacctgctgaatatgactgtcatcattcattaacgaggagcttttgtgttaatttagttcaggggcattttgattacttcagtggtttattgtagctctgtttcagcgactatagataagtcagttagttagagaggtaactgattagaaggaagttgatgcagatggagaagggattctggattggtctagcattggtttgggcttaggagagttgagggtgctttagaattcatcattggtgctttgatttggtttgttctcagttctgtatgtggattcagagagtgagtaaataaagagagaataccttttctgcgtcaacagttggttttctttaggagtacactaattgcattcagttttggtacatttttactcaaaggtggtcgggttaatttgcagggtataggtcttatggatgtaatccttcctagatgtacgattatgtttctgaaaacagactgtagcatttggttagacacagtacaagtaaattatatatctcttctatatgtgtatacaggaaaggaaaacagctggtatcgatgatgatgacttccatggtgttccggttttccaggtaatatgcgaaagaaccaatacttttaatggttgtgactagctttttcgtttttactctatctagtggtctgtaatatagtttcggatatttatctaccatggaatcgtaataatcattatttcttccttaaaatggtcgagacatgttttccttaatgtccaattttcttaacgatctgacttgtgttgtctcagtcaaagagcttgattctacgaagtgaaaacatgagttatcgccctgttttctttagaaaggttagttaaactaacaagacacagttcacctttgtccatacactgattacatgatcggcaagcttgagtcttggttgagttttgacaggaggacttggaaaaatctctaatacgagcgtccagccaacagaaccgacttaaccctgctctgaaaccaggcgatattcaggttccttgttatttaactttagtctccctatttcttgtcaatccataattctgtcatctcatattgaaattcatgattttgtattccaaaggttgcagttttcgaagatattgtcaagggaatgagggtaaacaatcaaacatgattctgtaatgcattttcctttaagaatgattggttttgctgaacctgttttcccgggcgaaattgcaggaaagcacgacgtcaaactgggacgacattgtgtttataccgcctggttttgaggtttcaactgagcaaacacaggagtaagtgaaatccttggagcatcgtaaaacctcaacacaatgcttctcccttttcatattcctatctcatcattcaacaacttgatgaacacagcgagttggaaatagcgttgatgatgttaactccattaacatccttctccaatctctgctttttctatgtcatcttatgagttttttagtgacatcttcgctttatgtttactattagtactagaagagtagcttgtactaatagtctaatattactgtcatgtcttaacatttaagttaatttttgttaatttgcatccgtgacctaagtgggaaagtgggaaactatgcgtcaacttttgaaaaattgtgattgactagatttacctatcaatatcttaacaaggtccatgtaaaaatcgtgcaaacccgcatttgattaatcatctctcgtatttttccatgatttgtatatattgacatgttcaattcgaaaatcctacatatcagccgcaactcgtatattaaactacgattttgtctattttgttgaccaataaattttacttatttgaaatttattattctaatttaatatgaaaatctatttttagtgtatatcatttatatataatcatagttttagacaaaaatatatttacttatttcagctcaaaaaaatactaaaagtttctgcataaaaaaactacttttgattcaatttttggtgtcatgaggtgtgttacctcgtttgtagttttgtgtattctcatgttccttgtggtaaacaatgttaaaggtaatactattaattttcttataatttttttatatattaggagttatgcaaatattgattattcctatcaaactttgaaattctttgtttatcagtatagtttagttaaatatttatctgtggttttttgaaacagtagatgtgaaagcacaacgaaggaaacctgtttgtaaattgactggtgtcctaaaccctggaaaatgtcccacagctatacatgatgcaagcaacttgtgtagtcgcaaattggcttcacctaatatgacatttaagcgttgcgactgtcaaaacactgaatggcgagggaaagaccactatcaatgcacatgttatataaaactcccttgcaaccaatagctcaaataccaaaatgcactttctccaaataacagataagggccgtgagcttttttatgttatatgattgacaatatatattgatgtgataatgggaagcttggatcatggagctaaggagcagcttcaatccgaggagtttggagaaagaaagcagtttgaggataaagagcttggagctaaaaaggatgaagcattgcatgttcttgaaggtctaataacaagatcaaagacgaaactactaaatcaagctatcaccacacttttacaaaagattgagggcagtcttaaactagaagcttgtccaaccacgttggttgtgattcaagccgtttaagcaacagcaatagaggtgtgtgacttgcactctttttccctcctcttggttttgtcccattgggttttccaagagaggtttttaatgaggcaatcccacacactcttttcatggcccattgttgtttttgaagcccattagcaaaagagacatccaaatttcgtttttgtgtttttatttctctaaaatgactattcctcttctctagggctcctcttcttctctatataatctattctcttctcctttgtaagacttatcaaactttttattatcaaaacctctttctaattgtttgatctgaagggtgtgtaatatctcttcaacttgtgattgctttggtgtgtaatatcctagcaagatcgagcccgaaagttcaagagtctttccgcaactcttagaagttttacttcatccattttcagtttgttttcagttcatcatcatcccatcttcaacccttcaacttcccacagatccattcattcaccatatcaccatcacttcatcacaatccatacaaagagacttcaagggactggatcttgtcacccaagatcatatcacgtggtatcagagcaactttgtatcaggttgtgtttttctaaactcttggtattctctgttcgtcaaaattgtttcgtcgttgtaggcttgaatacttatcggaatcgttcgaaacttgttaaattgtttagatcacgttctgaactataggaaactgtactagatcgtgcgatttgaataagctaaacgtttcgtattctagggtttatgattatgtgtttttggtactgatttggtttgttttaagaggaatttgatagtgtgtgtcttctagttgcagaatcatgtcagataaagataaggaagagcatagcaatgcacaaaacaacaagttgttgatggaagctataacagctactcttaccgcaactctcactgctaatatggctaagatgatggatgagagatttgtggctgcaaggtctaaccaagaaagggagaacagaactatgaggaataattctgatcgggaggcaacgcttagctactacagtcaatcctctactcgcactagtcataggaggcaaagacgtgggcaagaagaaagacaccctccaagagacaacttagctaatcttaagcttcgcatccctccattccgtggtactaataatcttgatgattatttggagtgggagaagaagattgagttggtgtttgtttgtcaagagtatactgaagcaaacaaggttaaagtggcagccactgaattctatgattatgcactaagctggtgggatcaagttgttactactaaaaggcgtcttggagatgatccgattaaaacttggaatcagctaaagaatatcatgaagagaaggtttgtgcctagtcattaccatagagagctgcaccaaaggttgaggaatttggttcaaggaaatagaacggttgaggagtacttcaaagaaatggaaacattgatgctaagggctgatgttcaagaagagtgtgaagcaacaatgtctagattgattcatgggaggcctcaatagagacattatagaccgtttggaggtgatacattatgagaaccttgaagaattgttttacaaggcagtcatgtttgagaaacagattaagagaaggagtgctaagcctagctacaattctagcaaacctagctaccaaagagaagagaaatctggttttcaaaaagagtacacgccgtttgtgaagcctaaggttgaagaaatcagttcaaaggggaaagaaaaagaagttacgcgaactagagatctcaagtatttcaaatgccacggacttgggcattatgctagtgagtgttccaacaaaagaattatgataattagggacagtggagaggtcgagtccgaggatgagaaaccagaagaatccgatgttgaagaagcacctaaaggagcgctacttgtgactatgagggtcttaagtgtgctaaacaaagctgaagaacaagcgcaaagagagaatctgttccatacaaggtgtttgattaagggaaaagtgtgtagtttgattatagatggtggaagctgtaccaatgttgcaagtgagactatggtccagaaacttggtttagaggagtttccgcatcctagaccttataaactgcaatggctaaaagagagtggagaaatggatgttaccagacaatttcaagtgccgttagccattgggaagtatgaggatgagatcttatgtgatattctgcccttagaagccagtcacgttttgttaggaagaccttggcaatctgatcggaaagtgatacatgatgggtttagcaatagacatagctttgaatttagaggaagaaaaactgttttggcacctatggcacctcatgaagtctacttggatcagcttagcatgaaaaagaaaggatctcaagctgttcaatccaaaactttcgtgagtaaaccaaaggggagtactaaacctaatcttttgtttgtctttaaagaaaacttattgaatataacagccttggaaccggctttgccgagtagtattaagtttcttttgcaggactatcaagatgtttttcccgaggaaaatccagaaggtttaccacccattagaggcattgagcaccaaattgacttcgttccaggagcttctttgccaaacagaccagcttataggaccaatcccgtgcagaccaaggaactagaaaagcaagtgaatgagctaatggagagaggccatattggtgaaagtatgagtccatgtgatgttccagtgttgcttgtacctaagaaggatgagagttggcgtatgtgtgttgattgtagagcaatcaacaatatcacggtgaagtatcgacaccttatacctagattagatgacatgttagacgaattgcatggttctaacatcttttctaaggttgatctaaaaagtggatatcatcaaattaggatgaaagaaggtgatgaatggaaaactgcatttaaaactaaacaaggattatatgaatggtaagtgatgccattcgggctgacaaatgacctagtacattcatgagactaatgaatcatgttcttagagcttatataggacattttattgttgtttactttgatgacatcttagtttatagcaagagtctaggagagcatgttgagcatctaaaaatggttttagaagtgcttagaaaggaaaagctttatgccaatcttaagaaatgtacttttggaacggataaccttgtctttttaggttttgttgtgagtacagatggagttaaggttgatgaagagaaagtgaaagcaattcgggaatggtcaagtccaaaatctgtaggagaagtaaggagttttcatggacttgtcggcttctatagaaggttcgtgagagattttagcactctagcagccccactcactgaagttatcaagaaaaacgtgggattcaagtgggaacaagctcaagaagatgcattccaagccttaaaagagaagtttactcatgcccctgttttatctcttcctgatttttttaaaacttttgaaatcgaatgtgatgcctccggggtaggaattggtgctgtcttaatgcagaataagaagccaatagcttatttcagtgaaaagctaggaggaggtactctcaactatcctacatatgacaaagagctttatgctttggtgagagctttacaaacgtggcaacactatctttggcctaaggagttcgtcattcacaccgatcatgagtccctaatgcatctcaaaggacagcaaaagcttaacaaaagacatgctaggtgggtcgaattcattgagacgtttccctatgtcatcaaatacaagaaaggtaaggacaatgtagttgtcgatgcattgtcaaggaggtatgttcttctctcatctcttgatgctaagttacttggatttgagcatataaaatctctttatgcaaatgattctgattttaataagatatactcatcatgtgaaaagtttgtatttggaaagtattatagacatgaaggattcttgttttatgataaccgtttgtgtattcctaattcttctttgagagagttgtttataagggaagcacatggtggaggcttaatgggacactttggagtctcaaaaactcttaaggttatgcaagatcactttcattggccgcatatgaagagatgtggagagaatgtgtgaaaggtgcacgacctgtaaacaagctaaggctaagtcacaaccccacggtttgtatactcctcttcctattcctttgcgttcttggaatgatatttctatggactttgtaataggtttgctaaggactaggacaggtaaagattccatctttgtggttgtggatagattttctaaaatggcacacttcattccatgtcataaaactgatgatgccatgcatatagccaatctgttctttatggaagttgttcgcttacatgaaatgcctaaaaccatagtatcagatagagacactaagttccttagttactttggaaaacgttttggtctaagttaggaactaagttgttattctctactacttgtcacccgcaaactgatggacaaactgaggtagttaataggactttgtctacactcctgcgtgcattgataaaaaagaatttaaagacttgggaggattgtttacctcatgttgagtttgcatataatcattctgtgcattctgctactaaattctcgccttttcaaattgtttatgggttcaatcccattactcctttggatttgatgcctttacctttgagtgaaagagtgagcatggatggaaagaagaaagcagatttagtgcagcagattcatgagcaggcgcgaaagaacattgaagagaagaccaaacaatatgctaagcatgcaaataaaagcaggaaggagcttatcttcaacgaaggagacttggtttggattcacctccgaaaagaacgttttcctaaagagagaaagtctaaacttatccgcagatggatggaccttttaaagttctcaagaggatcaacgacaatgcctactctctggatttgcaagataaaacagatttgaggttaaatccttttcaagtgggagaggatgatgtgataatgggaagcttggatcatggagctaaggagcagcttgaacccgaggagtttggagaaagaaagcagcttgaggatggagagcttggagctaaaaaggatgaagcattgcatgttcttgaaggtccaataacaagatcaaagatgaagctactaaatcaagctatcaccacacttttacaaaagattgagggcagccttaaactagaagcttgtccaaccacgttggttgtgattcaagccgtttaagcaacaacaatggaggtgtgtgacttgcactctttttccctcctcttggttttgtcccattgggttttccaagagagatttttaatgaggcaatcccacacactcttttcatggcccattgttgtttttgaagcccattagcaaaggagatatccaaatttcgtttttgtgtttttatttctctagaatgactcttcctcttctctagggctcctcttcttctctatataatctattctcttctcctttgtaagacttatcaaactttttattatcaaaacctctttctaattgtttgatctgaagggtgtgtaatatcttttcaacttgtgattgctttggtgtgtaatatcctaccaagatcgaggccgaaagttcaagagtctttccgcaactcttagaagtttcacttcatccattttcagtttgttttcagttcatcatcatcccatcttcaacccttcaacttcccacagatccattcattcaccatatcaccatcacttcatcacaatccttacaaagagacttcaagaaactatatcttgtcacccaagatcatatcatatatcaatccattttgctttttttttttttttttcttctcaaaattagttacttttgtattcaaataaaatgaatagttatgaattaaatcctcaaaacgtaattcctttattcaatcaatctttttcttgtacagtattcctttgtttatttgagttatataagattaaataataaaaatacttacttatggtgtattatctttttttttgaatattatgtaaaactattcgaaaaaaactgttttacatcaaatgcggcttatggtgtattatcatctcttactcattctttattattgtttatttaacaacttgtttcataaaattaaaatctagtgattgtttaaccttttatataattatggttgataagatggtgtttaaacaccttaataggacgtcatgtacgtaatgaatatcatatgaatgagttgaattgacatcctgaagtttcattttaagatagagaacagaaatataaatcaatacaggattatctttacgatattggccgtggtcatgtaaatatccgttttagaattgaattctagagtatcatcctttttacgtcaaccagattattataatttctacagtgtttggaatatttaagtttaaatgcacatatgaattaagaaaaaaataatgaaagccttaagtggaacataacataaatttcaattatatatatttatacaattcatgtcatgttaatcagaaattgttgtcttttaacatctaagtaatttaacttaaaatttgtctaccacaaatattttcaatgaaaaaacacactcattatactactttcaatgtgacacttttacaaataacattttacttctttttaataaagaaaaaatatttgcaataactaaaaatcattttttgattctataaacaaaatttatgtgagtattttgtttatttctaaatgatttttaacattagtaatctctactgagacaaagatggatcatcaagaacgtagatgaggctagtctcccccctcaagtagtggtgcccccttcccgtttgatatgttcaactatagaataaatattttcaattagtatagtaaaacttaaatttttttcccaaaactaaactaccaattatatctctctagttgactttgtcctaactcctaaattatttttctaatttaatatagaaatctgtttttagtttgttgactatatattatgagtaccgataaaaaagttaataaactttttaatcttaaaaatactaagtttgtgcaagtcacataaacgacttttgattaatttttggagttatgaggtgtgttacttcgtttgtagttttctgcattctcatgttttttgttttgaacatttttacaggtacgtaatatcttttgagttttattacttattcatgaattatggttcctattaacaaatatggtgttgtaaaaaattcgaaatcttttgtttataaactctttaattagcttaaaaaattttggattctctagataaattatttagggaatttggtcaaaaatatttatctatattttgtttttacttttcctttggtggttgcttgaagcagtagaagtgaaggcacaacgattggttcctctttgtaaaacaattggttatgaaaatcctggaaaatgtcctgctgacggaaacaagttttgtcgccgcaaattggatgatcgttatgtaaaatataagcgttgcgattgtcaagataccaaagggcgaaagcaaaaccaccatcgctgcatatgttatatgaaacttccttgcaatcaataggttcggataaaaatatatttgccaaaaataagagataaaggacaatatgtatgtctgtctattttgatttgtttctcttttcaaatatagttatttttgttttctaatatatgttcaaaatgtattatgtttatgcttcggtcgatcattttgttgttcagtttttcttgtatcatcggatcttttactctttatgggatttatttaactatgtaagtcataaaactctagtgataaactgataattatataccttttagttattgaagatggcgtttgaaaaaccttaataggaggaacatgtacctactggtgagtatgatcacatatatggtgttcgcttatttatcatagatatctatttttagagtatttattatttatatatatatatttatttatttatttatttttgagtaacaaaaaaagtataagattattaccaaagtaagaaaaacacgaagttccaacaattgattaatttttataatgaaatctgctacttcgcgtatagttatgtgaatcatgtcaaaggtaatttataattcttttttagatttgatgaattcttattgaaaaatcagaagtgaaattgtcaaaaactttttattatcaatcgttgagctaactctttatctacaattaaacttcttcctttttttttggtggttgcttgcaaataatagaggtgaaaacacaagatgtgttttctatatgtaaatttttcaaccaatacgctggaacttgtggcgctaatggaaacaacttgtgccaaggacaaatggggacgcgtgagataaaacgttatgctcgttgcgactgtaataacatcagatggcgaaagaaggagtaccatgagtgtacatgttactctaggcttccttgcaaccaatagctcgaaaaccaaaatatatatgtcattgacaaaatcaaataagatacaagggacgaatgtttttgtaaatgatttgactgacaatctgttctcgttttttgtattcaaagttgaattagtttttattctaatcaaagtaaataaatttgaatattctaaagattgtttatgactaatttttttatccgagcggtacattagtgaatatttccgtgaattagtttgtgtagaccgtgtagtcacgtgaaaagtttggttttaaagatcggccaatttgaagatttcagaccgttgtatgatctaaataaattgaaccaatcaaagtttaagcaacatctgatcttacacatgtagtcaatgcatattttgatttctggctatcaagtttggaccaaatatttacaacattgtaatacttgttagttaccagctgtaaataaattgaaatttcgacatagaaactaaggcaaaaaaaaatgaataagaattagtgttcttatatgtgtgtacatgatatgggtgtgcgacgagtagcataatttgaaatcatggctaaggaaaacaaatgatgatgtgtcgattccaaattccatgaatctgcatgcatacctaatataagtttttttaaaagagtatggcattgaattgaactcgtgacaatttcgctttacccatttatatagtcaatcaaatttatttattttttgaaatggatgttttggaccacaacacacaccataaccattccttatttaatattttttgggagaaaagccaaaccataactcaacgtataactccatttattggttttcaataggtgacatggtatcaaatgaacacatatactgcattggaattatataaaataaaatgtaaggatacactcaaacaaacatatttccattaaaattatataaaaagttatgaacacagaatataaatatatatatatacatataattcgaatgtgtattaatatttagcctactaactttctgacaaatttaggatcaattatgggattgacacattaaagtttatgtttttgtgaatataggaacatctcacagtacttacaaatttaagtacttctatctcttctctttttaccatattaacctttatattgttggaaaaaaaaatcaagcagaaacgtcgattttttctctccttatgctttcttcattcttccttcttcaagatcttgggtcttgagatgcgatgaagatgatttaggatttgctcatgattcacaattagattgcttttagttattgcgtacatgattgttttgaataaattttcagttattcacaatcaatgaatttgtgtctataattaaagccattgggttgcctaaacatcatcccttagggtttagatatcttgcatcaaatcttatttaattaattccattggattcatcgaaaaagagtcatagaaacgttgtgtgaatcaacggaggaaaaggaaacgatattgatggagtcaaaagtaatgattttgattgagtgtggagtccatgttaataaacaaatttgattatcacgacggagaggattgcagaaggtggagacagtgaggattgttgttctcacgacggagaagacgaattgatttctcatcaacacatttgagggcaaaatcgtcatttctcgaatcaagaagtacccaggcttataagtccaagtagaatgtgtttttcttcaaatttttggatccaaatatacccatatgtacaaaagccccgacaatgtatcagtgtttttatttttcatcatgtgcacaaaaaagaagagcaaatgctaatttatagtgagtaacaatgagatgaaaactaataatgataaatctggttacagatttaattcattattgtgagcaaaggtgcccacttgtagttaattttgtttaaacaggaataattagtgaatactataatgagtatattccctaaaaggtgaagggtttgtaatcttcttatgatggattagtaacagcagcatctcgtttgtatattaaaagtattttcgatagatcaagaaagattaagcacttgtcatccacccacaactcgatctaatttttttcatttaacatttctggatcatgtttttgagatttgatctattaatattagtgtttataagatgccagcgaagtagaaccaaatgtgaagattatacagtattagaaattactgaggtaatactgtttatatttgtgtaaacttgctatacaagtctctccaaacgaccaagcctatattaattaggacttgatcgacgtacctacgttccaatactataaaacctaataaaattaaaggaaggttttcatatcccagttaaaacattttacgtttgatcgaacatgaaaacaaaaaatcgcctcaaaaaccctatttatggattagagtctcgtgttttcgaagagttgcgttttttttttttttaattttctttggttcaaagaaaggaagagtttcgtttagaatttgaattttagcatgtacttactattcaataaaagaggtgagaattaatggagagaaacacgtgacctgaaacaggtatgatcgagagatgtcacaagtgtatttgtacttgaaaataaaataaaatggacagctaaaattgtgatttcttaaaattactagctacgaacctttctttttcattaaaccacaaagtacgttttctccttttcgtatatcttgttaagttcaaaaatccaaatgctttgatctaaaaaaaaaatattaattctaaactcttcaatcaattatggaaaaaaaaagaggctcaaacgaaattcgcaattcgaaactgtcacatgtgtattcgttatttcgatatagaaacctcaacttgaatataatagtttgtttgtttgcttgaagttaatctctctcttttttatcagctaaagctgcatttataaaaattctagtttaacttttaccatttgctataatttagagattttaacaagaaatctggcctagtccgcaaaacttatagaataaatcaaacattcttcaatattttacacatccacaatacccaatccaagaaatggattgcagttgcaccagagattacatgtctcgttttagtttgctagtcactcaaactcacaaagcataaattgtaatagaaaatagaactttatttaaatctgaagaaagatatatataaaaaaaaaaaaaaaagaagaagcaggctccagttttgatgggagaagaaaagagagctggcaacagctattcactgatagaccgatcactctcttctgtcccgcactcttttcttcttttgtttctttcttttcgacagctttcatttttcctccatttttaaatttgaattattttacagtcataaaagtacttcaaacgtatatgtaaataacgagcaacaaaacaattaactacaacaaaactagttctagctaagagaattagttagaaatttttattataatagttagtatatgtttattcataacacaattaattaacacacaaaatacatgtaatttcctctataccctcttcacatataattagagtagtgctttaatttaagattaattatcgatttacatcattaatgatcatctagtcttacacagagagtttcagtatctgcatgagattatataaaggaatgtattcatgtttttacttctttttattcatggttaaggatgatacattataattataaatccataatctatgaactcaactattctttataaaaaaggaattaaattctgaaaataaacaactgtagttggcttcccaaggctgctgcttcacctataaataccctatcctctttgaaaactcatctcacatcacaattcacatctcctcgaacaaacaaattataaacccattttccttcataaatttctaaaataaaaccccttaaactttcattcacatcatccaacccccaatgggtcgaatcttgaaccgtaccgtgttaatgactcttctagtcgtaacaatggccggaacagcattctccggtagcttcaacgaagagtttgacttaacttggggtgaacacagaggcaaaatcttcagtggaggaaaaatgttgtcactctcactagaccgggtttccgggtcgggttttaaatccaagaaagaatatttgttcggaagaatcgacatgcagcttaaactcgtcgccggtaactccgctggaaccgtcactgcctactacgtaagctcccaaaagttaagaaagattcattatttttgtttttgtaacaaaaaactaatgagaaaaatatgttttgcagttgtcatcggaaggaccaacacacgacgagatagactttgagtttcttggtaatgaaacagggaagccttatgttcttcacactaatgtatttgctcaaggcaaaggaaacagagaacaacagttttatctctggtttgatccaaccaagaacttccacacttattctcttgtctggagaccacaacacatcatgtaatgaacaaatcaaaaacatctaaagatcatgtgtctttttttgtctctaacgttttgttctgtttacagatttatggtagataatgttccaatcagagtattcaacaatgcagagcaacttggtgttccatttcccaagaaccaaccaatgaagatatactcgagtttatggaatgcagatgattgggctacaagaggtggtttggttaagacagattggtctaaagctcctttcacagcttactacagaggctttaacgctgcagcttgtactgtttcttcagggtcatctttctgtgatcctaagtttaagagttcttttactaatggtgaatctcaagtggctaatgagcttaatgcttatgggagaagaagattaagatgggttcagaagtattttatgatttatgattattgttctgatttaaaaaggtttcctcaaggattcccaccagagtgtaggaagtctagagtctaaaaaccaatgattctctctttgttgttgtttagtgcaaattaaattctctttgttgtttctttaataaattgatttgatttttcttcattggctttgcttattccaatgcaatattcattctacatgtcaataaatgtgtcacgggactcattatagtgtcgtaaaaagatttttttaaaagaagcggtagattcttaactctcgcagacgccaaaacatacaataatttaaagtatgaacacttgaccaacgtgacttgatctaagaacaccaatccaaattaaaaggtacaaagatcacgtgtagaggtgtcaattaggagggagagtacaatggtgttggacacaaatatgacttcatcatataaaccaatatagattaaaaggtacatgtggtgtctattgcaagcaagagtccaatggttttgagctatagttttagatcccaaatgataaatggtattagcgagttagtcattgacacttctaatcaaaggcaaagatgtagaataaagaacacccatgttgtttttatctgcaacttgctaagagatcacaggaggttttgcttttatagtctttgagtatgtacatagaacaagatgtgtgtttttgaaaagaaaaaaaaaagtgtaataaatatgatcacatggtctatatgtataatggcactttgatctatgcttctactatgtttaggatggtgacaaaaagaaaaagacagctagtaatacctctttcacttttcaaaattaaaaaaaaaaaagagcatgaaactggataatctggagacagataatgacattaaaaagtacccatcctagttgcttcagggtgatctactgatcaatttgttaggttcggatgcttttacaatcgtcttctcgtgtatataatgagcaaatttcactcttgctcgttgttcgttctgtagacaaaatattgagagtgagaatcatgtgtttttaactgcttcaactactagatgttgtcttaacataaagcagaatgagacaattgattatggattactcacggggattctgtagtgaatttgaaggtcatcgttcatctggtggaggcggctttttgcaagctctgcagcctcacaagctctcttcgaagcttcaccagcctgtttacagaacaatatttagatccaattaagcctccaagataaggttgcacaaatctattactaatttaacaagtctttaagaacttgtgtctacatgacaaaagttggtctagttgagaatatttattctcatcttagttactttagtgaagatactaaaccaatttgatatgagtctatatctaagagacaattgattatgaagtttgttctgcactgacctgacttttgtagggttcactgtgatctgctgaattatatttctccaacaaatccctgagatgagatatttctccaactagatccaaaaccattacttcagtatcttgtaactgatttcttgagaattcaaatgctctttcggcgtgtagacggaaggaggagcagttcaaacaagagcatatccctctacatcctctcatacttcttttcagaattcctttcgagggagaaaaggaggaaggagttgccaatataacagaagggtcaaccagttcagctgttgcatctgaactatgtgcctctagttcctctgcactgatctttgcttctgttatctctgcaccattcatgttttcttcgcccaccaaattgtctacaaatgtgttgtgcaatgcagatgaattaacttcacttgaacttcttgaaccaacaagaggagatgataatgggatctcagagcccaaattattttcagtatctgggatgacatgcttaatctgtgtttcttgttccttgtcaggatcagactgttctagatttacaggtacacgttcacaaggaaggggctcttcgttttcatcagagcttgtacctgattctctagtaacatttgatgtcaccacttcctgtgtcccttcattatcagactcagagtttaacatcggtgatgaaataacctcctctgtgttcttttgaggatctagaaaaatcaacaaagataaagaatcattagtatctcagtctataaacttatgttccctaccaacacaaaataatcaggcagatactagccaccagtatacattaagcaactaactgtaccaatgcatttttattaccacttcctaacataagagttgtattggactcgaaataggcttacaaggattatcctcttgaatatctttgagatatggaagcattcttctgtaattaacagaacctggtgtcttaaatagcttacccctagagaatgcctgtttcatgtaaaaaacaatcccatgttggacagatagacacaaaacaaggaaaacagaaactgagagatgaaaatttccatggccaacatggaagtaaccttaaaactaaggcttagaagcaagcaagcttcttcatagatagaatcttacagcatttttgttaggggtggatgcaataacactcttcaaagggctggtgtctctacagaagcttccggttgaatctttatcatagacactgtccatagactgcgaaaccggtttagtgatgttctgactcaaagactttgagcaccggcttgatgatgatgttccatctgtaaaacaattggcaatttagcatatcaaattccagtttttgatgtacacaaaacaaaaacaaacaagtaccatctgaagcttgcatcaagtatggaagcagtctcttatagctgaaaggaccagtattcttgaatatcttaggtcgagaacatggaagaagaacctgtggtaaaaaaaacaaatcaagcaacgaacaaaacttaaaatgtatcaatcaaacaaaacccacaaaaacacataccgattttctccagagattagtatcacttttgttcactactgatccattgatctcttcactgatagctaacaattcggaatctggtggcgtcgtttgtgcaaaatcatcacctaaccataaaaaatatctcaataatctattcaacattgatccattttgttccagactcatacactagacatcgatgtttactaaaatttgtaatgtgattgaatctacagatgataagataaaaaaaacatactgtttgaattgtcacagtcgcatagacattcatgattttgtctcttggtttgatttttatctttgcagttacattcgcagtcggtggagatcggagttggagagaagacgcgtcggagacgaatatctttgatggtggctcgtggatacgtaggtgtgattttagaatcgattttttgatagagtgatggtgaatgatggacgctagatcggtttctgctttgagatacggtggttgcgattcgttggttttgtgattttctttgagggaggatctctgtagctggagaagacgagaatcgcattctcttccgagggatttgatttgattccgccattgttgaaccttcgtcaagagagagagagagagagagagagcggtttttctttaatattttatttttggagggaatgataagaaaggaggtgggttagcttgtggatgtttggcgggaaactagatggcgggaaaggagtaacgcattgattttgtgcgggaaagagtttataaggcctagagaatgttgttgagctaggcccatttaagcccgctatgaatataggttttgtggttttagtcatttatttcccctttttttattcttctgagctaggaacaattttattgataaaacaagaatttaggttgttttcctttatttttcttattacttcatggttccattttaaatagtgaatgtgattctttggctatctgaagaaaacaaaattttaatgtaatagtaatagtttcttactcaactaagcaggaaaatttgaaacataaataggctagagaagcatgtttgagtaaaaaaaaaaaaaataggctagagaatatatgtatctatcaaattatatgcatattcaatctttgaaacctaattcactttatgaaaatgtatattactaatcagtttttacttctatctatataaagatgcatcgtacatgcatgtattgttatatttttatataaatatcgttgaaattggtattgtgtcgtgtaaaggtggttataatgtataataattcaaaatttctcttcggtaatgtgatcatttcttttacttaaaaacatcctcttgttaaaagtgtaagctcgtatactcaatcaatagggcaatacttctattgtcgacaaaacaataactattttgggttttgggacacccaaaaaagggaaaagttcttacaggacatgcagacacgagaacagactgtcacatgcaatgctgatcgtcattctcattcatcaccaagtttctcacgtccacatatgtaaaagcagataatgcagtttcatcatttttttatatatatgagaagtgtaactataaccatatcgtataaaaaatctctatatatagatagacatagatttaggaaatatttctttcgattttcttccaaaatccagcagcgccgtcaagattcttaagaatgatttagtcacagctcatcgatgtattaaatgattataaaacaaaatcacacagctcatcgaatgcttttatgctcaagtgctttgtctactttacattacattcataaaacgaaaaaaaaaagataaagataacttcttcttatgaattctagagttttcagtttttggcatcttaaaaatattaagattctgaagttgtaagtcagaaatttttgaaaaagtgtaatcttgtcaacatttgagcatgttatctacacattcttgtatcaccaattctcgatgtagtcgaacttaagaagtagataagaatggcgtggacctcaaacatatattacaaactttaattttcaataaaactacaatattaggttggacgttttaaaatgtatactgtaaaaaaaacgaatgttagaaaattattgacgagatgtacaacaatatttttctaacaatgtattttgtaaacttctgattggcatgacacgctcgatcgcaaccctgctagcgactaatcaaaataaagacgtccattcttttctatttggctttccaaacaacaattaaccattttggaaaatgcattactaaactcacaactccgtcgatcaacaaaatcagaaactgcatctcttctatttgggattaccctcctctttgcaacaaaatgctcatgcaaacgtatttcgcagaaaattacccacgaaaatttctctcaattttgcttatactttctaaatttcgagaaataatatttttcttcatcttttgtaaatgcgcttctttctgttagcaataaactgtaattataataatttgtttgcaaactaaaacaaatgtactaaaatggcagactaaatttaataaccaaatagtgtttattattgtcatgtcatacaccgaatttacgccatgtagaagtaaaagatcaaattaaataacattactgctgaatttttcgttagtataattaaaaagagaacatgtataaggtagactgtatgtagtctatgtagatgttatataaatgattttttttttctttcaactatatatagattagctaggtcggttgtattacaaaattaaatagtagtaatattttattttaaaagaattgtgttgaaaattttgatcgatcgcctctcgctctttaataagccattgactctttaaaacaaaaaaaaacttgaacaaattccatttgtctattattttaataaatacggtgttaaactaaaatagtataaaataatatccaataaactgtatgtttgttgacagaaaagaatataatgattttaaaacttcaaagacccaagtttcttttgaccaaaatctattgccttcatttattataactcgcatactgttttactcatacagatcattaaaaaactataagcaattacataacttgcttacaatcattgaaatagacgcacatgtttgccggaatgatgaaaaccatattggtcacacccttcacctaacaaagggtgtgatcaccaaaaatcacatcacttgcttaatttttcataaaaaccgatatttctaatgatgttaattggcaaatatgataatatatgaaatatttactttgaaatatgagagtaaaaaaattgaaacaacatttcttttgttatctaattacattacgcaagttattttggttcaagttaccccaacattgcatgttatcatgttatcaatcaatacaataatcgatcaagttgcatagcataatagcatactccatttatggaactataattactcaactcgagcttcgaattatggtggaaagctgcagcaaagtattgcaatgaatgcggcatctatagctatgccagtcggtcaacacaatctataagctatagcactactatagtccttgtggtcctactcagccaccacaaaaggttcaaggcttcaagcttcaaaggttcgaccacattcattcacaatcatcatttaacacataaataatctccattatcacctccttaaattatgcttcaaaaactttcttaattaccgaccatactaccaaacacaaattatgattccaatttaatctccattattacaaccaccttccctcaataataacctcaaatcaattaaacccaaatttccattattatcatccatatctttaaaacactacttattacaaacaaacctaatccctttattcatacattattacaccttttatattttcataacaaaaacgcgtagtttctgtttttaacggaacgggacggaaataataatatggttagatttataatagtaatgatctgttgaataagctaagtaacgacacctcactcttcgcttgcttccattcatcatctctctctctctctctcttcccaaaaatcaaaaaacagaaaaattaccaaaccctaccaatctccttcttcctcctcctcctccttccttcttcatcctcctcctctctacgcgccgcgcgtgttctctaatcaatggaggctcctacgcctctcctccttctcgtcctcctcacaaccataaccttcttcaccacctccgtcgctgatgaccaaacagcaatgctcgctttagctaaatcattcaatcctccgccgtcagattggtcttccaccaccgatttctgcaaatggtccggcgtacgatgtaccggcggtcgtgtcacaaccatcagcctcgctgataaatctctcaccggattcatcgcacctgagatctcgactctttcagagctcaaatctgtttctattcaacgtaacaaactctccggtacaatcccttcgtttgctaaactctcgtctcttcaagagatctatatggatgagaataatttcgtcggagttgaaaccggagctttcgccggacttactagtctccagatcttgagtttaagcgataacaacaacattactacttggagtttcccatcggagctcgtcgattcgacttctctcactacgatttatctcgataacacaaacatcgccggagttttgcctgacattttcgattccttagcttctcttcaaaatctccggttatcttacaacaacatcaccggcgttttaccaccgtcgcttggaaaatcttcgattcagaatctttggatcaacaatcaagacctaggaatgtcaggaacgatcgaagttctttcgagtatgacgtccttgtcacaagcttggcttcacaagaatcacttctttggaccgattccagatctctccaagagcgagaatctcttcgatctacagctccgggataatgatttaaccggaatagtacctccgacgcttcttacactcgctagcttgaagaatatttctctagataacaataaatttcaaggacctcttcctttgttttcaccggaggttaaagtaacaatagaccacaacgttttttgtactactaaagctggacaaagctgtagtcctcaggtgatgacgcttttagcggtggctggaggtttgggatatccttcaatgttggctgagtcttggcaaggtgatgatgcttgtagtggttgggcttatgttagttgtgattcagctgggaagaatgttgtcacgttgaatcttgggaaacatggattcaccgggtttatatctccggcgattgcgaatcttacttcattgaagagtctttatcttaatggtaacgatttgactggtgttattcctaaggagttgacatttatgactagtttgcagttaattgatgtctcgaataacaatcttagaggggagatacctaagtttccggctacggtgaagtttagttacaaaccggggaatgctttgttgggaactaatggtggagatggttcgagtcctggaactggtggtgctagtggtggtcctggtgggtcttctggtggtggtggtagtaaggttggtgtgattgttggtgtgattgtggcggttttagtgtttcttgccattttaggatttgtggtttataaatttgttatgaagaggaagtatgggaggtttaataggacggatcctgagaaggttgggaagattttggttagtgatgctgtatctaatggtggtagtggtaatggtggatatgctaatgggcatggagctaataacttcaatgctttgaatagtcctagtagtggtgacaatagtgatcgtttccttcttgaaggtggaagtgttaccattccaatggaggttcttcgccaggttacaaataatttcagtgaggataacatattgggcagagggggtttcggtgtcgtgtatgctggagaattacacgatggaacaaagactgctgttaagaggatggaatgtgcagcaatgggtaataaaggaatgagcgagtttcaggctgagatagcggtacttactaaggtcaggcatagacatttggttgctctattgggttactgtgtgaacgggaacgagaggttgcttgtctatgagtacatgccacagggaaatcttggacagcatttgtttgagtggagtgaactcggttactctcctttgacatggaaacagagagtgagcattgctttagacgtggcaagaggtgtggaatatctccatagcttggctcaacaaagcttcatccacagagatttaaagccctctaacatccttctaggagatgacatgagagccaaggttgctgattttggattggtcaagaacgcacctgatggtaaatactctgttgaaacaagattagcaggcacattcggttatctagcaccagaatacgccggtaagttcattcttctcatctctactaatgttaatttcacaatgtgcttagtctgtgttatcttactatgcaaagagtttatacattctgccattacggctgcattggttgcactggatattgatgttataatatatggttgcagctactggaagagtaacgacgaaagtggatgtgtatgcatttggtgtggttctcatggaaatactaactggaagaaaagctttagatgattcattaccagacgagagatctcatctagtcacatggttcagaagaatcctaatcaacaaagaaaacatcccaaaggcactcgaccaaaccttagaagcagacgaggaaacaatggagagcatttacagagttgctgagctagctggacactgcacagcccgcgaacctcaacaaagacccgacatgggccacgcagtaaacgtgctaggtccacttgtagagaagtggaaaccgtcgtgccaagaagaagaagagagtttcggaatcgatgtgaacatgagtttacctcaagctctacaaagatggcaaaacgaaggaacatcgtcatcaacaatgttccatggagacttctcttattctcagacacagtctagtattcctcctaaagcctctggctttcctaatactttcgattcagctgatggtcggtgacaccaaactttgtgtcgatctgtgacaaatcgttgttactaagtttttttctttcattttggctttggctttttttcttcttttatggtatgatgattatatttatatattgtaagcacatatttgcgtctgacctctttgagcaatcgcatttgttcattcttttcaagaaaagttgtattccgtagctaggttttgagaaaagaacaaaagaagtcttgttagtttcaagtggtgtaacttagaatcttcacatactgtagttgttatttgtgatttgtaaacgtcttgtttttttttttgttgttgttttttgtttgttttaaagtttgttttgccgcgtgaaacggatataacttgtaaaaatgtaaatgtcacaatcatttgatgagtgttacaggctgtgttttaattgtggagctaaagaagccaaagacttattgccaccttttacggctcaattttggataatattaatattagggcgttcgttgtgttgataagctcaagtcacaatcttttatttggtttacttattcttattcttatctactgtttttttttccttgcaacatcttataataatttgcctaaagagagtaagaaatgagtcggatcttttgagaaaatatttgtcctcaattttacgttagaaaaaactgcatgggaaagtattaaagaataaagtgatgggaaaagagagcatagatcgggttggaaattgatttggaaacaagagctacaagtcttataactttaggtgaagcatatgatgggtgatgaaaaaatgaatgccaaaagtaagatccaatttaaaaacactttaaaaggggaataaagaagagaaagaagcatgttactatattcccataaagttgaaaaagaagaaataaaagtagggtttatgttttttttttttttaaatactaaaagctgagatttatgctggggtttatatgttaatcttttcttcttaattgacttttaaaactttttaatactataagaaatggacatctgaatcattaattagaagacaaaaagtgaaaaagaaaagactaataacctttttgttcagtctaaatatctttaggaaccaaatcacatgtacattggtaatttggtctcttgactttatcctcggcataatgaatccacaaacgctcaaccattggttactttatttttaaaaagcatttacttgagtattacactaactagtgtttagggatgatgtaatggatttagaaacgcgttatgaaaatgaccaaactaccttttcctgattatcaactattatgctaatgtcatgaacatacatcacatagattctcttttgaatgtggtcggacctacattttaacttattataataactttctcttattaattgctatcgtaagttgtcatatctaacaacaatttacgttttagagaattttggcaaatgggttttggagtagacaagtaagatacgtttggggaccaaataagaaggtgcttagtagaccttagctagacaagaaggtaattacaaaactagtgaaagcccaacaaaggcctatagattaagacatcacttttatttatgcttccaagtgtatttgattaaaaacgaaaatgacctcctcattgaacggttgatatatattcaaaagatgcccaaaactctacatagaaatgaaacacaaaatcatttactcattgtacttctttcttctcattgtggaaacaatatacaggagcctgccatttctcgtcttctaggacagctccaacttcaaatgtcatcacatgagcttctctacctggaataaactttcagtatttggtcaaagccagataaataaaatgactcataattcaatagtagtatagtatagtatccatcagttcacctgtatagaagatccactgtacaggtctcttggtgacaacatcttcatagtaccataagaactcaactttttcccatacgttgcataaaaacccatttacatgtcgttgacccatatactttgctccatctagccaatttggtctcaagattccaaccttgaatcgagttaaaaaaaaatccaagactagtctcagcaacatactaaaacatttctgtttctgaaaccaataaagaactacaaaatctaccgtacaactttacctaggcatatacttgagtcagtgagtgtatcactgaaaacaataccgtggaaccttatgtttctatcataagcacaatcaaaaatttcccatcaaaaactcaaggatgaatgacttggaacctctatataactgcagtccaaaatattaccaagtcctactcactattcttatttcttagattcctattgtggctcattgcagcttatcatgaccatcacttaattgttgatattcaaatgatcatagattcatcaatcaaagaagaaacagaagcattacatgctacactcccacattgacacgaaaacgtccatttgcttacaacaaacacggagatctaagccatactctccattgaatgaaataaagcaccacaaaaacataggatagagactctccaagtttcttttcgctgtatttcaaaatcgaaacaaagccaaaaacactacaaaattcacagggttcccatatttcttcttgcttgcttcaaaatgtgatgaattttgggtagttctctagccaaaacactacaaattctcctcaaaatcaacatagactgccagaaacagtcctatgcattacatatagtagcacattctcctcaaaatgaaactactatgcattatgaaattcacaaagctgagagagtggccatttatgcaattcacattatacatctctaaaactatattataagttcattatacatatgttttattaacatatacatcacattatacattatacacctaaattcacaaggtcttatagttcttcttatttcttcaaattgatcaactgtcttagtcaattatactacaaactttccaaaaaatcacagagactaacataaagagcaaaaaacagaggaactgattatagagaggactaacctcgaaatgaacggtgcgacaagttttagaagcgtcaagagtgtagtagaaagaagtgccattgttccattcgaggtcataagtgagcttaccaagctgcttctgaatgatgttaaagttacgtccattgacccagtcataccaaagatccacaatctccaatgaccctgatttgttcatcaacatcaacgcgtggaactgctccggccataccgcaggaactggctccttctccggctcagtaccggcggatattttgtcaccgacggagagaacgaggaggaggataacgatgaaggaatggattggttttaagaccatgtcgcttgatgagttctggttcagataaatgatattaactcactgtaacgttatcattcatatatctttccacggtggaatatattttattaaatacaaatattttatactatactttaaataaaatttgataccaatagaaaaaaattaagtaaaaatttaggtgtagatgtaaagataatatgcaatgcaaaattttgaagtaagaaaaaaaatattagataatggattttaaaacgaaacggaataaaccatttttatagaagaggacgacaatttacagcataataaatttattcttatgtaaaaatggtttatagtttatccgaaaccgatttcttttacttttttccgatttgcactactacaaactttaatgatgataaacaaaagcgttttaattcacaaacagatttgtccgtctcaaccgtcgtaactattcgaaccttacatatataactcaaactggaaaatacacatcaatatgttggggaaacaaagaattgtcaacatttcttcttttttcatgtaaatgataatttgttgatgagatattatttaattaacactcaattatggaaaagaaaaaaatagcaatacgttctaccaagtttgagtgaacaattggacaaagcgttcttggtcgcctttgaaccaaccaactaaccagtcttctttaacctttcattaacgacactaattaaaaaagaaacaccaaagcactgtgagagttcaagaagcaattaatagtttgagctaaaagcttttcttgcatgaacgatattatactaatccttaaacacacttccttaatctcttcttaaatactcctcaacaagctctcttctcctttatcccaaatcacactcaccactctctcttctcaacatttttctccaacaaaaacaaaaaacaatgactccttttgctctgttcctcttcactctccttgccctttcaagtaagtctccttatatatacattaagattacttaaaccataatctttctttttataactcacttatgtttttttataggttcatgttgctctgccattggtccacaaaacaacagaacagtgttagcacttgcaagcagaattgggatcaactatggaaaattaggcaacaatcttccttttccttaccaatcaatcaacctcatcaaaaccattaaagcaggccacgtcaagctctatgacgccgatccagaaaccctaaagctcctctctacgaccaatctttacgtcaccatcatggtccctaacaaccagatcatctcaataggtgctgatcaagccgctgctgataactgggtcgccactaatgtccttccttttcacccgcaaacccgaatccgattcgtcctcgttggcaacgaggtcctcagctacagttctgatcaagacaagcaaatatgggctaatcttgtccctgccatgcgtaaagtagtgaactctcttagagctcgtggaattcacaacatcaaagttgggacacctcttgccatggacgctcttcgttcgagttttcctccttcgagtggtacattccgggaagatatcgctgttccggtgatgttaccgttgttgaagtttctcaatggaacaaactctttcttcttccttgatgtttacccttacttcccttggtctactgatccggttaataaccatttggattttgctctgtttgaatcgaattctacttataccgatcctcaaaccggtttggtttacaccaatcttctagaccagatgctcgattcggttatctttgcgatgaccaagctcggttatccgaatatcagtctcgcaatctctgaaaccgggtggcctaatgacggtgatatccatgaaaccggagctaatattgtcaatgccgcgacgtataaccggaatttgatcaagaagatgactgctaacccgccactcggtacaccagctaggcgcggtgcacctataccgacgtttttgttctctttgttcaatgaaaaccagaaacccggttcgggaacagagagacattggggaattttgaaccctgacggtacaccgatctacgacatcgatttcagcggtagaagatcgttttctggttttgattcgttgcctaaaccgagtaacaatgttccgtttaaaggtaatgtatggtgtgtggcggttgatggggccgatgaggcagagctagggcaggcgcttaactttgcttgcggaagaagcaatgcaacatgtgcagcgttggctccaggaggagaatgctatgcaccggtgacggttacttggcatgcaagctatgcgtttagctcgtactgggctcagttccggaaccaaagctctcaatgctacttcaatggtttggctcgtgagaccacgaccaaccctggtaagtttctcttaacttgtctcacaagaaaactctacacagacgtgtaaatactctttaatttcaactttttggtgaaattctggaatattcttatgattgtaatttgtaatggttactatcttgttacaggaaatgagcgttgcaagtttcctagcgttacattgtgaggctgcctcgtgactcaggcgtgtggaggaaaggatcaaaagaatcattcgcattaagttgattatatctcttgataattatgattagtttcctttttattccaagtttttactctttgtgtcccattgttgtgcaagatctataataatctatagaaatttgttcctcatcccttctcatttctcatatatctagtagtttattaatgttctgaaggaaattatgagaattttataactaattcaagaacatgttttgcgatcattactatacgagaaatatgaagtttttgattcacatgttcctaaagaacacgaatatgaagaacatatagtagtgctatagtgttcttatttgaacaaagcgattgaacggagttatgagttatcgcattatgaagaaaaaaacagaaccaataaaatcataaaatggagtcatgaccttctatatgaaagcgaaatcgaagaatgagagaaacgactccgagcaaggggtttatgcctccggaagaagaagaagacaatgaaagttttcctaaaactttactttagatccgagaattattaacggttaaagagtcaaatctcacaaaagcaacacttacgggttagttcagtcatcagtggctcggttttacgatttcttcggttcggataacccttaccgaatcaaccaaaccaaaacctatactactaaccagaaccgggactgaagcaaactacacataacatggtcttaaggcaataagccatttacataataaagagggggaatcagcatagcttggtgtcgaagttgagagtgatgcccatgctgaacagctcctgacacagaagcttagctccatacggaacatagaccctaaccacatggtctgaggatacgcagactctacaatatggccctctaatctttcttccactgcttggagtcctctcgatcacattcgcataggtcttacattttctgcagatgtgcatctgagaagagtcacttagagtgaagagacgctcatgcagattagctgatgcaccgtgagctattaggcagtctcgctccatttctccaaattttatcccgccaaatctcttcctgtctgcaactggctggcgtgtgagcgggtggactggtccagtgttcctgaacttgactttgtcctctgacatgtggacaagtcgctggtagaaagttgggcccatgaatatcatagaacgcatcatctcacctgatctaccgttgtagaccctttcgtttccccatcttgaaaagccggccctaatcacaaatatttaccattggtaatgaatcaggactcaagaatcaacaataatctaagaaaggttaaatgaattatacatagatcacaaggctcacagcatcaatcctctaactaattatatactggtacatgactcttgagcctatttttctgtattctctagacgtttttcaggcacaatacaagaaattaatcaaccatagaacattgaacttcttagttttttagtcttacagagacagataactcatgctcacttctagtactcctagaaaacaaaataaagatccactatgacatgtttcaagtaaggtgctcaaatctagcttagtgccttgtgcagtatattagctcaatcaacttttggaaattctgtagccaaagtctccaagtttaaacatcttcaacgaggaaatattatcaataatatgttcctgcccttaatgatatcatctatttgtataggaagcaaatgtaaatctgttatagcatataattttatattctgttttacgagctaaaaccaagagacaatgtgaagaatgtacctgtgaagctgctcggtgatttcagtgacacccggagtggagaaaggagtggcatgacgtgtcaatttggtgtatgcagcagagctaccctccttttgtataggacaagcgattcctttggagagagcagcctccaagagttgacctggtgtttgcctagaagggaaagcgtgcgggtttatcacaatatcaggaactatgccttggatcgtgaaaggaaaattctgctgttcctctaggtagcctaaaacacccttctggccatgcatactggaaaacttatctccaaggcatggagaacgaacctgtaagatgtaaaagccaatcaatggaacattcgattcatacataggaatgcattctctgaaaaaacagctcgatttagtatgatctggaacttacctgtctcagagaaaccgcagcaaaattcttcccttcatcattagatgataataccactttttgcacaattcctctctcagtgtgcttgagctttatactgtgatcagccccagactcggtgcatctgccaatgacaatatcgccagtactcatgttagcaccaatgaaaggaaacccgtcatcttcaaggctgtctactttgccgattttgctgtgtgtctttccaaactgaacaagctcatccatcttcttcctcttctctgagtctttagcatcaacctctgctttgtagcttctaatctgctctgaacggaacataccacgttccaatgaagccttgttcatcacaatggaatcctcttggttgtacccgagatgaacattcacagcaacaattgcgttctggccattgaacagcacttcttttttaagacactccgacgccaatgtcttgaacagtggcttctgaggatagaacagctgctgggacagcgtatcgcagcggatgttagggttcgttgatgagaatccaatggcttgttggcagtgcttctgggactggtagagaactcttctcccatggtcgtgatttgcaaatgggacaactgcacagctcacacccaacaagaatgacaggtccaattcgcaatgtgtgtatatctttggttccttcagaagctgtttgattccccatgctgtattacagtcttcttcttcctcaatcccgatcagctcgagaatcccatggtcaagaagatggtcaaaaggatactgtgaaggtttttcttgcttcaacttttggagattttccacaaccaagagaggtcggagtagtctaccagcatcagtgaaaattcttacctcattgtcatctttatctcgcttgatttccatctgcagagaacgtttcatatatataaacaatattcgacatagacacatctgaagcagaaaaatccaaagcaaataccaagtaacacaagaatatcaaaatatagcaagagatttgctgaaacagaagatacctcacgaggtaattcactttggcgccgcctgctttttaactccgcgacaaaggattcagaatctgcacataatccaacccagtctccattgagaagaactttatgtttgccaaacaatggtgtgcatgtatcatccatcagctcttccattccacaagcgaagagcttttccaccacagactccaaactttgggtgctcacaagtcccagaagagacatgttcttcacaagaccacaattttcaccgtctggagttgacaaaaagcatactctgccccagtgagaggggtgcctgtggccaacattacaaacaatgcagctatagttcagtttcccaacacgatttaattgtctaaccgctcacattgaaaaggaaccaaaatggataatctcaagagttcaacagatagattgaccaagggagaaagaaacaagaaagacagtatcagagttttttaatagcagtaacatctatacaaaataagtattatacacagacaagagactgcagaaacagtgatcggcatcatatactacattgaattaaagttattacgaatatctttaaaacagtctgaagacatgtaaaatggagtaaatgcagaccagaccagtaagttaaaatacgtgagatatatttaaatataccagaggaggtggaattcacttacggatatctagcatctccaaccttgccggtatataagacttgctgtcgcgttctcctcagatcaatcagagtctgcaatggatttgcacgacccaaattagccacaacacctgaaaccctttccatcttcctgaaaggatgagaccatgctccagtagagaaggctctactaagcccatttgtgataacagaagcatccaaataatgctcaataggcttcaaatcaccatcgcctgagaggtgtttctgcatggccctggtcatctttcttctagcatgtgccagatgcacccttatctccctctccaatagttctccagcgagctcaattcgcttattccggaaactgtccctgttttcgcattttctttttcccgcatacgagttcagaaggcacttcaccatatagcccaggaatcgagctttcttcttcaaactttggaggcctggaaacaaatacagatggaggcactcatccacactttcagcaggagggaatttggtgcttttgatctgctgttcaacatatgttaaagcattgttcccacagcgaaaagcttcacaaactgcatcagctacatggatagaagctatgagactgttggtaatgcttgcatcatcaccatcaaaagcaattagatccatggcttctttgtctgacgaaacacctagcgcaaagaagaggagccagactggaatctcagtcgacaagaagtacactgtcagtactttctcccttctcttatagtcttctgctttctcattctccgagaggcgcacaatgaatctatttcttttattttcggacctgaaggagactgtccatggtgaattagaaatccacagtctctttgtgcacatctgttcttgagctataaacacctgcaaaacaatataataacgttagggagaagtataacaacttgaaaatattttttccagaatatattagagtcaaatcatctgtcccagagcctaagattgcaaagaacgcttcctgtaagatttgaatactcatggcctcatggtcaagccagaaaggaaagaaaaagtttatatctttgatgctaacgaagtatacaaagtcataaataagttaagtttcttaatttcttacttcatctccattaggaaaataaaatgaaccaaataggttattgtctaatttgtaacatctttttgctgataaacactattatctgatgatagaaaattgtaactataatccgttttatggattgctgacaaacaaaatccgttttggcatagaaaataaagttattgtacgtattgaatggcaatatgcatatatgtatgtattagttaaactcaccttctcagccccctttatcacgaaatatccaccctgatcaaaggcacaatccccctttttgcagttttctttccctttctcgcttgttttgcaaaggatagatttcaccatgacaggaatgctaccaattagaatgtcctgctttttgacatccagtatcttcttctcgacatagttgtcttgtcctgtcttgaatttgtcgcttttaacaacagtattcttgaacacctagtcaatttatagagtgaagaagcagttagacaataaactacatttataagaataagatacatggacagcaaaacagaaacatcatcaaaagtttgacagtacaagagtcattgcacacaagcataaaacactcaaactaaagcacagtgaggcagtggggaagaactaaataaaaaaaaaagctgaagatgtttttcttttattgcatccaaactttaaaatgaaacaaactaaagcttatttcgtttgaatacccaccactacaaggaaaagtaatcacaattcaaattttaaacaagaaacatctaaagattgggagcagacaaaatcatcaatcttaaacacaaccaagcttgaaatacacctctacttcacacgaacatgtaactgtaataaatctcttttactagatattttgctcaggtaagaaatccagcgaatgcaaataaggaaccaaatccaattacagaaaacttgtaaagccaaaaagagtgaaaccagtttcagacaaatatgttccttaacccttagtaaattatttgatggcaagttaaattgagaaatctatgacaggaacctcagtgtatgtcaacatcttcatatatgtgtcagaaagagtctagtagaaacatcaagaaataagcttataccatgtgttctttatcattcatcaaatccagacaaggttacttaatttcgacaaagaatttctgttacctcaacttggacattgactttgatccttgcagagtatgtcatgttctgaagcctagcatgccatgggagaaactcaagctccttgtcatccgaaaagaaagtaggcttctccacagtgacttctccgaacttcaccgttgcgtatctccaatcattatccttcttctttacaacatcaaaagacggttccacaagcatctcaccaaaggattgaaacacattctgaagcccgtgttcaatgaagtagttgtaggagttgagctgatgacttataagtccatacttatcaaagaaagaagttgcagcttttttgcagaaactctgcagaaaaccttctcctagctcagatagattgatctccccagtagtagcctcgaactcttcaagatccttcacatcaatgtccatatctggcatacctcaaaacacactgtacgaacaaaaaccctaaacaaagacagagaaattgattaaaaagctgtgaaaatcatgaaccacgaaaatgcaatcatgcgaatacaaacacgaaatcaacaactttcccttagaaccgaatcattctccataacatattctccgatgcttaaaagcagaatcaaagcgtattacctaaaataggtaccttgattgcttaaagctggcacgatggagtaaaacggcggtgtcggaggagtgcagagtaaacgtcgccggaaaatcgctgagaatgcggagagattcgacgtagaaaacccttggcacactttttcagtggttaagcgaagcagtcaaagagaagtgaagaaattgacgtcactagtactagtagacaatattattaaattttgctctttggtatctatatttttatgtttaagttttattttatttttattttaaagtgaaaaggaaatatatttagaagttcacatgacataaaatttgtaacatctttttttttttccaaaatttgtaacatctacattttggtttttacatctaattcgatttggttgtttggtttaataaatttcatatataacttaattttgaccaaaacacaaagaaaaaaaacaacacataattcactaaaaaagctcagagcaatcccaatggtttaaaatcaattaatttttaattttggatcttaagcttattttaaattaaaatgttgtttttactaagttaagaaaagttaggaagaagtttaaccaatttctacttcaatggttaagaacgattagaattttaagaaacaacaaactatttcaacacaatgtctacccactcaaaacacaacacatatgcttttcttagttttaagaaaatatcttaataaagatgtttttgtttaaccaaaaaaaataaaataaagatgtttttttttttggtgagtgacggagaggcttaataaagatgtttatcttagctaaagtttattggtttcattaaatttaatcacttttatacctaaaaattagctaagatacaaagttggggttgctcctacagtttagaaataatcatcaaatagttaccaaatttgggacatcataattatgggtagtttgatttattaggttaaatctgatctaattatagaaatataatatataagtaaataaaaagttattatataagtgtaagtattgagctctgttttttgttttattatctctgagagtctgaagaagccatgcttctgtagcggtgccaaccaacttggaactgatctttcctgtgaaaaatcgtaatcatgacatcgacctactttctcgtctctttctttctacctttctttgcttcttcatctttctctctttctcctctcatatattctctctatgcaagcaacttcatcacgataacctcttatctcctcagccatggcttcaacgtctctcggagcttcgattctcgtttctcactgctcctcagctcctgaatttcaagtttctgggatgagattggtgtttggttacaaggcttttggctgcagaacttcacgcaggggatttcgagttcgctgcgaatccaaggcgagttcctttttggtttgtggacttaaaaaattgctcctttcactttgatttttgaagtaagtaatctaaagaaatgaattgactttggggaaggttcaagtttagctgttgcaccaaaatagacaacgagtggctctgacttctgagtcttattagtttaggatacttgtcttatgaaagctgaattgcttctgatgaccagggtttaaacagcttgatcctgaaaggcttttatagggttcttgtaagtttaccttatggttcatttcctgaattatatgtaacatcaattgtgtaccgttcttatagattcaggagaaggagttaaggcggtgttcgccattcttagaacgcttatcattgccaagggaggctgctttgagctctaatgaatggaagtctgttcctgatatttggagatcatctgtggagaagtacggtgacagagttgcggtggtagatccgtatcatgacccgccttctacattcacgtacagacaggtaacactacttcgcatctcattgctattattttagatccccacacttttgaaatagaggtttttaaagcaaatgacagaacttagggaaaaaactgaagtttaagagttaagattgattggccatcagctttttttctttatcgattagttttgtatctacatatcttaactgcttgtcaataagaaggtagctagagggtgctgaagatgaaccatattcgaatgttaggaagcatactaaattgatatttccttatgattattgtcaggcatgtcccttggtatttgctgtgttaatctatatgttaggaaccaatgttgtttcagttatctgcctgaaatacttcctgttgctagataggtgggtaattacttttgaagtttacagtgatgctaaatttggatgagtaatggaacctttcatttcaatcatcttattttgcagttggaacaagaaatcttggactttgttgagggtttacgagtcgttggagtgaaagcagacgagaagattgcactttttgctgataactcctgtcgatggcttgttgcggatcaaggtatgcagttgattatatagaacactttcgaactctatagtgtaggagaataacaatctattacataatcttcttagtgcttgagccttaactgttgttggatgatgtcactacacttggaatactgaatttactggtgcttaccttacacattaattattttttcatttccattccagagaccaccaatgatctgtcgagatattattcacttttcttccttataaagtagtgctttatccatccaaacgactaaatagtctctctccattctctagatgtttctgaaagggaaaaataatcaaccttaaggcttcttaagttcatactccagtttgaaagtctttcatttcatagtgtatggctggctaagtttcatgcccaaagaagtgaaagtctagttagaatttttcaattgacatggaaagttaaatttcactcttaggtggcaataacatcatggttctcgcttgggaagttgccttaacttccctgctttactgcaataaaattctaattatttcatttggttattcgatttttttgttttccgcaggtattggtatgtttacgtactctttactactttatgccaggtataatggccacaggagcagtcaatgttgttagaggatccagatcgtctgtggaagagttattgcagatatactgtcattcggaaaggtacacctagacctttttgtgatcttgttatttcaagtgaatatcttactcgagatagaggctagcaaattactctattcagaattttattgctgtataccaaaaaacacttacttaccacttgtgtcatcaaaatttattttttatatgaaccatttttagaacttctgtcacttcagatacatgtaactgtcctgctttgtccaagagagatttcatttagtttcatagtgatctgcactcttgattaggcgtaattttagtcaatgtttggtttcacacttgtcttatggttcttcataatttggaggttcttgaatggcacagacagaattctttggcccttcaatatgattgtcttttgaattaccttttatgcgtgtctccagttcttatttccaaatttattcagagtactgagttttggtaacttcttgtgatttaccttgcagtgtagcccttgttgtggataaccctgagtttttcaatcgcattgcggagtcattttcttacaaggcagctccaaaatttgtgattcttctctggggggaaaaatcgtcgttggttacagcgggtaggcacacaccagtctatagttacaacgaaattaaaaagtttggacaagagagacgtgcaaaatttgcaagatctaatgattctggtaagcgccatatctatttttttacgaaccccttagtgatttcgacagtgctaacaaaggaatgactgcagggaagtatgaatatgaatacatcgatccagatgatatagccacaattatgtataccagtggaaccacaggaaatccaaaaggtgttatgctcacacatcagaatttgttacaccaggttcaagctaatacttattgtcaaaacggtgtctttatatctccatttatgaaatactgagtttgctgttatgttctgatttttttttgttcgtttggcttgaattacttgctacagataagaaacttgtccgattttgtgcctgcggaagctggggaaagatttctgagtatgttgccatcatggcatgcttatgaacgggcttgtgaatacttcatatttacatgtggagttgagcaaaagtatacgtctataagattcttaaaggtaagtctttctatgttatgttacataatgacatttcaaaagaaacatcttatccttggaaatgggagacgttgagactttgcactgagtcaagcattcatttgtatttttccctttggatttgaaactttttttttttgctttttggtataggatgatctcaagcgttatcaaccacactatcttatttcagttcctttagtatatgagacactctacaggtatgcgctttactagtaaaattgtttcataagatttacaatgaataagtttttttaatgaatttaatcattaaaccttttctcagcagcatcctcaaccatttaaattgctaaacacttttctctcttttctgagaactgcagcgggattcaaaagcaaatttctgcaagctcccctgctcgtaaatttttggcacttacattgatcaaagtcagcctggcatatacggaaatgaaaagagtttatgaggtttgtgaaccagataatgccctctttagtgtttcatgctacctaataatttggtttaaatgagttttttctgcttgttcatatttctgatgcttggagtcgtcataagtactttgctctgctgttgcagggtctttgtttgacaaaaaatcaaaagcctccaatgtatattgtttcgttggtggattggttgtgggcgagagtagttgcatttttcctatggccattgcatatgttggctgaaaagcttgtacacagaaaaattcgttcgtctattgggataacaaaggtagtattacaacattctacttcattttcagttacttgttttaaaatttttttaccttacaagcaatattgtaagactgacttgcaatctattctctgtttcctccaggctggtgttagtggaggtggtagtttacctatgcatgttgacaagttttttgaggttagaccgccaatattgtttcttgaaattagagataaatgtttttttttgcattcaaacaaagtagtctgtccatatgtaaacaggttagttctttatgcaggccatcggtgtgaatgtacaaaatgggtatggtttgacagaaacctcaccggttgtctctgcgcggaggcttaggtgtaacgtaagtttaaactcacacctcaataacctctccttttgtgacctctgcacagaaaaactgtttagatcttattcatcaattttcctaactttttttatgaaggttcttggctcagttgggcatcctattaaagatacagagttcaaaattgtagatcatgagactggtactgttcttccacctggttcaaagggcattgtcaaagtcagaggcccaccggtgatgaaaggttactacaaggtgatacacactttctgctcttagtttgattacattttgacgacaaagttgtgaaaggatgacacagctgtttttagctatcaaattttctgtccatgagtgggtttgtttgtgaatactgcccttatatataactagattatgtgaactcttttccttcttggtctcatcattaaagcatctcttggaatctacatttcttgcaatctatttcccttttgatacatatgtagactccttgaataatctctgtgttttcgatgaatgcttttagtttggtgattagatcagattaactcatctttctgttgattatctcagaatccactggccaccaagcaggttatagatgacgatggatggttcaatactggagatatgggttggattactcctcagcactcaacaggacggagtcgtagctgtggaggtgtcatcgttcttgaagggcgtgccaaggacactatcgtgctttccacaggtatatcacatttgtactgtttgttgtcagcgtccacataaaccagttcctcggaaacctgaaacaaaattatgtttcctactgtctgtatgataagcatacattttaaacactacaagtcttaacaacaaaatgtgcctctcaagttaaagatgaatccaagtgaattgtaaccgccttgctgcacaaatattgctaagaatatttgatagcagtttaattgttgtaggtgaaaatgtggaaccattggagattgaagaagcggccatgagaagcaatttgattcaacaaatagtggttattggacaggtacttgtttggagactttggtttaggaacaatggtatgggctgtttcacttaattaatcttcgatttggatgcgtccttgatcttttgttctcaggatcaacgccgccttggagctattgttatcccaaacaaagaagcagcagaaggagcagcaaagcagaaaatttcacctgtagattctgaagtcaatgaacttagcaaggagacgataacaagcatggtctatgaagaactaaggaaatggtaatgattcaaaccaagtgtgatcccactctaatataagagtaaactttacctaatcaggcaattactcatatatacaccatatgatgcaggacgtcacaatgctcgttccaagttggaccagttctgatcgtggatgaaccattcacggtaggttcttttattcgctctcactgataatcctttaatatgcaactcaaagatttgaacctcatgtgaacgttctatgaatatcgttacagatagacaacggtttaatgacaccgacaatgaaaataagacgggacaaggtggttgatcaatacaagaatgaaatagaaagactctacaagtagactagaaattttagcatcctctttattttacaattatcttgttaaggattagcaaatgtgaaccagttcttactccattgttaatataagctgcatatatctttgttcatcaactagggatttccaagttctgcagcactatggatacttattgagtctaatagaatcaataattggaagaagcagttaaaccggtcaaaagacctaagtatgttggagggtttgagatatcttgacattctgtgtttagaggaaggctagatgttgatacaatattgtataatttgcataattatattatccgttcaatccaaaagcatttaagtgcgatgtaaagtgatggttttttctagtttatgttaaaacaaatgattagtctcactctctagtcgatagaatattgcaacttgtttataaatttgattaggtgagctatgattagtagtgcataaatacattatctatgagacaaagaaacgtgataggttattgttttttcttgtttgcgtctggcatatgtatgtataaaaccaaatatcaagcagaacatatgcgattttcaaaatgtgggcggtgctgaaaacatatattagtttactccaacttgcagaatatttgagtatattaatgcaaaaacagtaaacgcaagagcaggtgcattactagctaagacagcttggttgagagatagagacgaaaatggaagcggcgatgaacaaccacgatggagactgctgcaagagcgggccgggttatgcgacacccctcctcgcgatgtctggtccacgagaaaaactcatctatgttgctgccatatacactggtaaactattttgtagctctttatatatatatatatatatagagtggaagtaagagtcattaattaagatatggcccaaactttgttggctcatgttttttggaaactggtttggtctaggaaccgggcaagcgaagccagattacttagctactgtggatgtggaaccgagttcatccacatactcgagtgttatccacagattaccaatgccttaccttgaagatgaacttcatcactcaggctggaactcatgtagctcttgctatggtgattcttcttgcgagagacgttatctcatcttgccttctcttctgtaagaaacttgttatctctcctttgttttgttctgaaaacttctcatgtattaaggtctgttttcgtgaacttatgtttgaaaaggtctggtcgtatttacgtgatcgatacgaaaacaaacccgagggaaccatctttgcacaaattcgtggaccctgcagaggttttggagaagacggggttggcttatccgcatcagcctcattgcttagcttccggagacgttcttgtgtcttgtcttggagacgaagatggaaacgcagaaggcagtgggtttctcttacttgattccgagtttaacatcaaaggaaggtaacttcgaggacaacggatttgtactatttcttatacagcaagaaagaagaacaaaacctaatatctcgcttaggttattttgagtaacagctatttatatgtcttttaataggtgggagaaggatggaaacagtcctttgtatgggtatgatttctggtaccaacctcggcataagacgatgatcagtacctcatggggagccccggccgcgtttaccaaaggatttgacctcaaagacgtctctgatggcttatatggaaagcatctacatgtctatagctggccccaaggagaattgaaacagattcttgaccttggtgataccggacttttacccttagaggtaaaccctaatcttccaaatatcagcttatactactttcttcttccacaagaaacttcatctctgttttgttctgcaggtaagattcttgcatgagccggataaagctacgggatttgcagggtgtgcgttgtcgagtactttagtaagatttttcaagaacgatgatgaaacatggagccacgaggtatataatgaatcttctctacttattattcttcatttctttttgatttttgtcctaacaacaaacaacctctccaatttgaaggtggctatatcagttgaacctctgaaagttgaaaactggattctcccagaaatgccagggcttatcaccgactttctaatctcacttgacgaccgattcctctattgttccaactggcttcatggagatattcgtcagtacaacatcgaggacccgaaaacccctgttttaactggtcaaatacatgtaggcgggctagtccaaaagggaagtcttgtcttggccttaggagaagaaggaaaagcatttcagtttgatgtccctaagatcaaggtccgttgaacaaaatatagaacttgttacttgttctacacgctattgtaaatatgggcgtgttttcttttttgaagggtcagcgtctaagaggaggtcctcagatgtttcagctgagcctagatgggaagcgattgtacgtgacgaactcgctgtttagtgtttgggacagacagttttacccggaacttgtggagaaagggtcacacatgttgcagatagatgttgatacagataaaggtggtctctccataaaccctaacttcttcgtcgactttgggaccgaaccggatggtccttcgctcgctcacgagatgagatatccgggtggcgactgcacctcagatatctgggtttagttttttcgctaaatcaaggatttctatggaaatcggaacagaattcagaattgtgttgagtgtgatcaatctaataatgggtaatgtcacatgtgtgagtgtgatcaatctaataaatgttgattacttgcaaaatacacttgtgagtaataatgatggtcaaagacgcaatggaatttaataaagcgaaccaacactaagatcgtattcatatcatgtatgaaactaaacaacatcactcctctgtttctgttctgaaaagttctcaagttttgtatgtcacacatgttggaaaaagtctggtcgcatctacacgaaaacaaccttgtggaaaccatctatgcgcaaagcagaggtttaacatcaaaggaaggtaaacagatcggtcaagtttcttggatggcaagaaaaaaaaaaagaagaaaacctaatctctcgcttaaggtttttagtaagagctgcttaaatttttgttgttaattagtgggagaaagatgggaacagtcctttgtttgggtatgatttcagataacaacctcagcacaagacgctgatgggagcaccggccaggatgtgatctcaaagacgtctttgatggcttgtgtctaaagttgagcccaagacgcactaacagagaaatataaaataaaatagcaatcattattcgataatagactaattcgatgacagaaaaggaaattattctttaatttagaaattaattagctttttactttatagaatatagagtaggtaattaatgatcctcactaccatattctaccaatgagcttgcagcagctgccgagaaataagtaggaaactgagacctgatatggaattggtaatgatgatgatgaagaagaagctgatacaaaaatctaggacatatggcttgtttctttctctttttgatatatgttgtcgtttattgaaagctgagtagttacctctctcgtagagaatcttcaaagctttagtatctcgatatagtagtagatatttttcatataggggagaagatgttcttacgatattatagtcaaatgcttctaaaaggaaaaatatataattcatcaacaaaagacatggatccatgataattttactatacatgaaaatgttgtgtaaccaaacgagacaaagaactaagagtgcaaagctttgtagtttacaagaaaactcgtacaagaaagcttcatcactttggttgagtggatggatcgaaatttgtgaacaacaatttatgcttttatgtttttaacttttttttgccatgggaccatttgtataggtttaaaatcttttgattgtaaaccttaactttttcattttcaatgaaatatttacattcttagcaaaaaaaggaaaactcgtacacaaaattcaacgttttctttttattaattttgaaactttattgttgcaatgttggtaatgataatatatatatatatatatatatatatatatatatcttggtctataagtaaatgtctttttatctaatcaatcgaagggatcatgcatccactttgtgttagaatatcttcctttgtttaatcatgcatctgatgagaagaaaatgattgtgctgattatagagaaagaagagaaactcaaaagagatagagtaagagaaaaagagaatctggtgacacaagtcacaaaaagaggggtcaaatcatcatgggccattaattagaactaagcccaaattcttataatgggtctcggtagtatatgtgttttaactcattttccttctttagacaacttggtgaagtagagaacaatgaaatcagtgaagcagaggaattgagtccaagactttattttcattctcttctattatttgcatttgttaaggaaataacaaacttttatatctccaagttacctgctttatctgatttctttcaaattaagttatgaaaattgttttcaaacccttcaattttcagctgattgtgttattaatggttttatcttttgttttgagcaatatgatgtgaacttattgatgctttgatgtgaagcaaagaagaacatgtgggtcaaagcctcaaaggaaacagctcagctgatgtagttgggttgttgaacttgtttggtggcatttacactaactccttaatgatcatttttaccgcctaaccccacacatttaatcataatgaccgccggaattatttactttctcatacgaattaaacacaacttaaactattttaataaaatcgcttcaaaacatgtttattacattaataatttataataaaaatttatactatataaaagttgagctattatcctaaacaaaaaattacaggaaatcattaagatataaaaacgataaatatatctttaacaaaaaaaattattaagaaattacaacatttcgttaatgctaattcttctttattttgtgattaacgatacctataacactaatgctaccattaacgttactaattaacttataaacaaacaaaaaacattgcagttggaaagaaaacaacaattaatcgtggattctcaaaggaaccaagtgtttgttagtggaccacaataaatattttttaaaatggataagaacccaatgaaaaaaatagttttatttaaattaaatactttatgttacaaattctgttgaaactctctatcaatccaacttaaaccgaccggtttaactcccaagagctacttggagttgtcgtaaacacagagatcacaatcttaccaaattttcacacaccgacatgtctagatccttagctctcgtttacttatccttactttgtcttcaaacccatctctcaatctccgtcacagttccgattccgtcggtaaacggcgaaatcgacgcaatgctgaaccggaacggcgtaatcggagaggaagaaggagaggagatgatgccatcggagataagtcggagagtaatgatgatgcggaaacagtacataagctacgaaactttaaggagagatatggttccttgtcagaaaccaggtgcttcttattacgcttgtcgctctggtcaggctaatgcttacaacagaggatgtagtgtcattactaggtgtgctagagacactaacgacatcaagacttgaaaacattggggtctttaagtacatttgagttttaaactcagatgctctagaggcaagtgaaatcttattattcttgtcttttgttttgtaatgttgttgtttacattagatttcttaattattgatatgtaattttggctattaatgttcaagtaattgatatttatagtcttgaaagtgttgagtggagtaatagatggaagattgtggaataaagtttgggttttaagcttgtttagggtacttatggaccaaatttagaagttttggcagggtatgtgaagaattgagatggttcttataatggatttagatctttgatgggtttgaattcatcaagcaattgatctgagtacaataatgttttaattagaaagctgattttggttgttcttgtaagttcaagaacctgactcttggactctccattgaactccatttgtcaaatgcctaaagagtttcagatgagttttggcttaagtttgtgtttgtgttgtgttgtgtgatttcgagtaggaaaccggtatactcatgtcttgttcaaatcagtaacttgttatcaagactctttgatatatagcttatcatgttgaaggagttggtatagtagaattctgtgactagagaccaatttgagtgttttggtttcttacattcaccgaacaaacctcggatttgaactccatccatgttccattcgtttcaaggtttgtcaaagtgttatctcggtggtcacaacacagcacccccattgttataattaccaaacgatgaatcagtgtcagtctttgagtcgttagaaaattcatgagacgatttataggtatacaattcaaagaagcaaaagaattccagtaatatgaagccaaaaaataactttgcgtattttgttttcactcttgtttggaaaagtagacagaacaaagcataaataagcctaacaataatgtaaagcataagctaatttatgttgaagatatataaaatagaagaagaagaaaacaaaaaaacagcctctcataaatcaaaaacaaccccttattcataccaatatttggtcacacgcatcagaagaccaatatctcatatttctccgaccaaaccagacccaatccgactcaaacaattgccaataaacggcttaatcagaaaaccaaacgaagaaccaaagcttggctcttttatcctctcagtacctgtagtgaacaggcttgtaaggaccttcaacgggtatgctgacatagtcagattggtccttggtaagcttggtgagtcttgcaccaagcttgcctaagtgaagtgcagctaccttctcatccaagtgtttaggcaaaacatagaccttcttctcatacttcccgcttgacttctcgttccagagctcaagctgtgcaatcacctggttggtgaatgagcacgacatcacgaaactcgggtgtccagtggcgcatcccaagttcatcaaacgaccttcagctagaacaatgatgccagagttggtatcaggaaacacccacctatcggtctgtggcttgatggtaatacgtttcacaccagggtaggtctcaagtccaagcatgtcgatttcattgtcaaaatgaccaatgttacagacaatggcattgttcttcatcttcctcatgtgatcaaccataataatatctttgttaccagtagtggtacagaagatatcagcttctgagacaacatcctcaagggtcagaacttgaagaccttccataagagcctgaagagcacagattggatcaatctcagtcactatgacacgagcacccgcggttttcattgctgcagcacaaccttttcctacatcaccataaccacagataacagcaacctttccagcaatcataacatcagtagccctcatgagaccatcgggaagcgagtgtcggcatccgtacaagttgtcaaactataaagcaaacaaatcatcagtgaaacagagaaatgcagagcagaaacagagcaaaaaacagagttcttgcttccacctaaatggatccattaacaatatcattcatattttggtgatttcaaaacattgtattatccacaaattaggcaaaacaatatcagatctagtgtcttctaaagctataatgtgccacattaccttgctcttggtgacagagtcattgacgttaatggcagggaacaagagagctccagtctcctgcatctgataaagcctcttaacaccagtagtagtctcctcagagacaccaaccaatctctccttcatcttatggtacttcttgggatcaacttgaagaccgtctttgataatagacaggacgatctgaaactcgggattatcagtagaggtcgggtcagggaacgtaccattcttggcaaagatctcttcagctttaactccttcatggatcaacagtgtagcatcaccaccgtcatcaacgatgagatcaggaccacctccaggaccccagtcaagagctctctctgtacaccaccaatattcttgaagagtctcacctttccaagcgaacaccgcggcggaatcacgagcaatagcggccgcggcgtggtcttgagtggagaagatgttgcaagaacaccatctgacttcagcgccgagagcggttaaggtttcgattaaaaccgcggtttggatcgtcatgtggagagaaccggtgattcttgctcctttgagtggctgagatggtccgaattcggtaacgcaagagacaagtccaggcatttcgacttcggctagctcgatttcgagacggccgaagtcggcttgggacatgtccttgaccttgtattcacggccacttgaggttttctctacaagcaaagccatttttgaatagtttcttgatgtgtggatctgtgtgatgaaggaggaggaagagaatggtgagggagtgaggttaaatagataaaggcgggagtgagatggacggttgagattagttgtagagagagtttggtggatctggtaaaagatattgacttttcatccttttttttagatattccgaaaagagtgacaattctgttttcaaaaatggggttaatcatacaatcaataattattgatactaattattttgcaaaaaaaggggaacatgaagaaaaattctgtttcagatgtataaaatttttttacacaaatctgatattatcatatgcaaataaaactaaaacagttttgtgttattttatcatcaattgttttttttttaatacgtacaaatttttctaaagtactcatatctttggttttaatcttggccaatatattttaaaatcatttggccaacatattatcattaccaaaaacggtcttttgtataatacataaaacaattgatattaatttgtgactaatgttaactcattcttatatcacaaattgcaattttcatattcgttacaagttcgtaactaatttgtaacaagacattggtgacagtgttagttatcatcggatgttcgtcactaaatgtgacaaattttgttatgatccttttcgtcacaaatatagtgatgaaattactatgaatttgtgagttattttagtcataatatagtatctaaatatcacagatttgtgacaaaaaaaattgtctcaaaattacttttcaataagtatattataggcataatttaaaaaaaaaacttttttcaaaaattccctatattttgatatagaatcatcgattttacaaaagaaaaaaaaagtgatatgtaattagatcatgaccgaactatgatcatgcttaagtgttatgtgaattgtgaaacacatattgcttttgttccaagctttttcttttacattatcttgatgacattgtttcttcatcttagattttcgaagtatataaaccaaaaaaatagaaaaaattcaaagttatatgtgaaaaaaacgataaattaagatgagcaaataattatttgccttcaaatggttgcaattatcagttggaaatttatataactgtttgcaattccatgaaatttctgaagctctagtggttcctgcaatttaaggaaacttgttgctattttaaggcaacaaaaagtcgaaggttcataagtctttggaagatcaagttttacgaggaaactataaccaacacgttattcgtactactaaagatttagggaaaacttgttttcgtaaaacaacattgaagtatatattatgacatctaacaggtgatttgtcaaatggcatgcaagataaaaacacattaatattatgatgcagatagatcagagacgtgatttttacatgataaggttaagaaggttagaactttggtgcactagcaagccttcacacatcacacattcagaccgatagatcttaattcttattcgtctgggccaatagtgtcgttcttccattatctctgtttcacaccgatagttttgtgtgtgtgtgtgtttaaacattagttattattgaatgtaccaccttattcttcttgagccaagaaaaaatatgaacgtcggtgcactggatcgtggaagggcgtcggtggatctgaattaataccctaccaacaaaaaaaacaccaataataaacgaatgcaaaataaggtgaactcattaaatatccttttttttgtgtttcctaaatatttggagtattttaaacaagaaatgagacgttgcaagtacacgagccatgtcaatttgttcctttgatatcttgcagagatatataactagtataggtacattagttgatctaatttatattattgtttgagtaaaaattatggtctagttttcttaccctaataaaattattttagctcagcatgtggctaaagctaatttatgagttttgtggtgggacactagtccaaacctctcatacataagtacttttgtaatagtcgaatagatatatacattgtatttgatgtaagaacaaaaattggcttaggaaaatcaattctcaaccaacaaataaagtgtacatcacatatcaattcttaccaagaaacgaaaaaataaaagtaggaataaagttcaaacattagtgaacgtcacaatgtcgacagatatttggttataagtgacacggcgtctattttttgtgtgtgtagaaattgaagggccacgccactcattatgaagctccataattggcattggtaaacctgattccaaaataactttggcactttgtgggtcggtgagaatagttctcaatctctcaagtctcaactaccacattcccaaaagtttcttttaaacgtgattatactccacacaaactatatacttcaaaaagaaagttaccaaaagtatactcacttaagacttttcgttttcaatattcttttcgttttctagttaaaatgtcaattgtcttctatttaaaaatatttgtaaacagaatgtcaattgtttagtgcagtacattttctatatacatgttattaataacgcgcttcaaactgataaaaatgtattctaaagaagtatcggatttaagaagataacaaatggagcagcctcgaacatggtaatatattgttgaaggcatgcgtttagaaagcagtatatttggatcatggttatacacttatacatatcaacatgcataaaagcaaccatcgattaatttcatttttagaactatgggccattaatgggttattattggtctactcaaaatttgggcctacttaaatagataaaaaataaacgatacccaactgataaaacatccatgaagatgtttattgcatgaagccatgaatagaataggttgattttcactctttacaaatcgatacttttagttttctttttaaaatttgtcagtgaaagtaacaaaataaggtgtaagagtttagggaactttagaacatattacgttattggttcggatacttcggttgctgaaattctcggggtgtttgtgttgagttgctgagttacgcggatgattaaagagactcaatttcttgttgttatcaggaattataaaagacgaagaaaggaaaagacaaacaaacccaaatatattttcttgaatcatggttgatatcattggttacaataatttcaggattataccatccgtgttagttgtaatctactaaggtcattaagacctccaaacgttcctactctacttaattactctctcgtccagccccatcgaagatcctttcttttcaagactaaattctacaaagccaactataaattactctgaactctcctcctttttatgtaatcactaatcaagaatttctgtaacgctgctattatatattttcaatttaacagaacctttgcatgtgtttttgtaacacaattgatgggtgtaattaaatcatgatcaaaaactaaaaacaaaattccattaggattagcccaacatggtaggcttttggcctttaccaaaaatgtcttggacggttggacctcactagacctcacccctcactaaaatccatacaaacattttaaaagaaacaaacttggactttgttttaatatatgagctcacacatcattgtgaaagtaatataaaaataaagaaataaattactattatctttggaatagaaacataatataaaatttgttacaattttgagcttttaaaacgagaatcatatttgttttcgttctttctttttagttaaaaagatggatgatttttgtaaaagtaaagtggaattagttgggagaatgtgattctaagatgattcatagtcatcgtattgatgatattgcattttcacaattaaaaaaaaacggagtcattgtcttgccttggcacatgggcaagagattacacccaatattgcaataatttcttaatatttctttctgaatttaaacgaatttcttttatgcattttaacgaactcccctcgccagacatatcaaatcagtaaacatctcaatccattcctcattttcatcataaacaagttccaaaattcattcgaaatctcttaggggataaattgaattacacaatttaatatcatatatgactcagtacctctagattgttccgtgcattgattagagtgggaaaaaaacatgtccatactgaacaaataattggattcagaagggccagaagaagcatatgttcgtccatattcgcagcactatatccatgttttatttttattttatctgtcgtcggttaacttttaggatgctttaaaagcaaaattcacgtaaattggtagtgtatggtacattaaatgatataattcttataagaaagtcttgaaaataaaaagaaaggagcccttgaatagtcgatatgtcattatctcatcataagttccaatctgccgacaaataacaaattagaatctatgaatcacaccgttgataatgaagtatggttataaacaagtggcataataaaacttatcaagacccccacaaattctaacgagagcataaaaagagaaaaattaatatgcgcatcgctgtaggaaatcgagtgacaacgacttcatgtaatatgtatagtttgcaatggaaattgaatttgctctgtaagacttgtattgattttatcatcgtatatctagttggagttaatttcttcatgctcaaaattgatgttatttagagtttcccaaacatttctactttgatacaaagaactacatttgctcagcaaccatccacaaatttaatgccccttcatcgtctccataatgttctccatgcaatatctctcacatttttctgataatatttctcacatttttaaattaatagtcctaacattatctctctcaacaatatgtgctcagaaatatagatgtccatcctcttgtcctactttttgctacttcattttcattctcttgtctcttcgtgtagatttgtagggaatagtttggaggagtggtcatacgcgtatataactttatcgtaataactaaaacattgtatatgataaggccctatagaaaaaaaaatgaaaaaaaaatgatcatatataatacttacaaccagaacaggttaggcttatttgttttgagacacttggcaagcctaagatcattcccaacttattttgtttaattttcaactccaaatctagtaatttcaaaatgtctaaccacataattcgtcctatcaatctattaaacatttaccacatttgcttagctagctctgtttgattcacttgttccacattggtcaaatttgttattaccgtctagagctaagtatttaatggtttaaccacatttataacacaagtggattgtacaaaactcgcgtacttctgtctatttataacaagttaattattatcataaagtttggaacaatgatgtaagaactaattttattttattttttgataaagtgaggattgatctcttacatcaagcaacactataaaaccaataaacatatgtttacatatatatgattgcatgaattacaaatgtttttatacaataataattaaggagatgatggcatatcaaaaataaaatcttaaagaggataaaagtatcttctcaacaaaggagaaatgtacctctgccgacaaaatagagagagatagagatatttgtgaagtggagaaggaagtgcagtgtgagttgtgaatggtcctttcaacttgtaagaagccaaattatggagataattgccaattggtcaacaaaaccactgtccctttcagaaccgtcgaattgggaaacgggcttttggctaaggtaaatctttcgctttcttcttattttcgattttttttttttggtcggctattatttttatttgagcatctaaatatttttctttttaagtgtgaaccctttattcaggaattatcaatttattttaacggtttacatcatttacccaactaaaaaatgaatttcataatgattttaaaaattttggtttttcaaattttgattttaccttatacgtctattgccaaaattggtttttttttttaaaaaggttcatgttagttaataatgtaaagttgaattcttctgcttgaatgtaccttgtgtttattttaaattatatataaaatcagatagaatatgctgtattcctacaaacaatatgtactagggagaagaatttataatcttggaaaatgagtctcagaacgaagatatcgaaattgaggatgcacaacaaatgatagttttgtttagactgatattagttgaaacaagttattgttcaagttttaacaacaaaaaaagaaagttattttcaagttactaaaatgtaaaaacaactagattttaacccgcggtacaccgcgtagacaattcatttttttaaattaatatatataaaatttgtaaattattttatagtttacaattgttactaagtaacgtcctgccaaatccgtcccgccaaatccatccacaaaaaaaaattattaattttattaatgttgatcttatttataatatgtttatgaatcattgtcaaaatattttattcgttgcgggacgttgaacccacacattttttgccaattagttaatatatgttcattcttaaaatttcgaatcacaaaatatgacgaattttttttgagatgttttaaactctatatattatataatgatgttatttttttttatatattaaactttttataaatttaaatattaataatgttttatgaattttaaatatataaataataataattaaaaaattaatattttttgtcttttaggtaatgatataataactctaaaagcaagaatttagaagatttaaatctttaattaaatattttcatgcctaaataattaatatcagtagcatgacattgtaaataagttcaaatacatgatttgtttatttaaacaaaaaacgtttagtaagaacaatatttatttaaacaaaaaactttgttttaaaatattgttaacaaaatacttttatgctaattttaagggattgatgtgaagtttgtttggattaaatttgattgataatgtgattgacaatttaaattaagaatttaaagtaaaattaattattttgaaaaaaagatttaatgctaatggcattgggttgtaaataagtccaactctaagatttatttgttaaaatggctgcaaaaatgtatatatagattgaacgtttaattctcactgaacgaacgtaatctctttgaatttaattaatataactcgtttcctatgaatataatataactgaactagatttaaaatttggtggcacatcctttgacttatattgatttatgattcacaatcacatacatgtttacatacagaaaaaaaaagaaaaaaaagatggatc

SEQ ID NO: 458 - DNA, 80393 bp, Arabidopsis thaliana
aagcttgcatctctcaagaactctgacaatcagtcaaagggattttctctgagccttatcagcaaacttgaggtaagatcatgtttctccaaactcaacactttcttctcgattttacaattccatcataaacaaaggtcttctctgttccttctccaggtcattgttgtcagtcttatttaatctctcaaatcgaacatttaggatatgtaataacatgattaagccattgtcctagaccaaatacagtttgcaacattgtagatgtaagtgcttttggttttgctcagcgtaacgatttgtctcttgctctactagtcaggaactagcgaactccttggatttagagacccggcaaaacttatcaggcttcatggatgctgttgagaaaatactcgtgcagcaaacccgtgaagaactcaagtccaatgaatcctcccaaaagtgagtaccaagaaccacctcaagagtttgtgcagtttctatctccttattgtttttgtcttgggttgttatctgcaactctttgttgtaattactttggaaattggaattgtatcaatactcttgcttatgtcctcaagtttcctttatatatcaatatccttaaacacattattatcttactctccgccatatataatcagagaactaatgaaataatctccaaataatctccaaatacttctccattctggttaatggaggaaaacaccaaccatatataacttacggagaagtaatctccaaataatctccaaatacttctccattctggttaatggaggaaaacaccaaccatatataacttagtgattacttctccgtaaggtgacaacaaaactcagaggtctctttaaatggaagaagctaaagttgttctttgagtgttttaactgttactttagtcaatttaaggaagtcaatatggcttagtaaatcaattaagaaaaccatttaaaatctaccaagtttagtctaaaagactgttgtctacacttagctaaaccaaaaaacagaaccagaaccagcaccaaataaacctaatgaaatttccattttaaattaaaccacgttcagattgttcttgtcttcacttgagattcttgtgcagtggaacctctttgccttgtagaaagtttttcaatcgtttgcttcaagacaggtttcaatctttctcttacaagagtgacctcgcgcagtttctgattcaaccggttcaagatcgcaggtaaaactctttgatgattttctttcactatttcaagcatatctctaccatataaattttctgcacatctgtagaacttccctccaagatctttcaggtccctctctccgttaataacttcctctgcattcttcgctgcacttgttagaaatcccaccaacatatctagctcgaacatctgatcttcccagttgtacatatctttttcgatatcggttaggttcttctgtgcctggatatcataactgttcacaacccaagtgttgtttagtactgtagacgagaccggtgtctgttcttccttgggaattagcttatagttaggtgtcgctcgttcagtctttctccttttcttcagaggtctctcaggttggtctgattcctttggaggcaacattcctctcttcccctttccctccaacttgatcttatccgactctgtgtcttgggggttatcatcaactttaaccctagttccagcctcatcttctccatgaccgtaggcaatgtctacgaaccgttgataaagattcttgtatttatcgatcaaacgttgaagagacttaacgaattggctgtaatcgattctatgagacttaaagtctttacacaagcaagtgtaaactctcaattccgaccgagttagtctctcctcgatagccttcaataactctgtcaacttctgtttcgcttctaaacggtccttcatctttctctccacatcgtctttaggtttataaactatccgtatacgaggtatcatctttggttcattaagaagaatagggttctcttccggcttctcatcatgatcaatctttcgattaaggttattgtctttaagcctcctaagttctctagtgagttcgggatttctgagtagacgtaccgaagatcgtaaccttgtctgtaccgatgaagactgtgtcttgacaccgttcgtcttcatcaactcatcagcgtcagccatatcttctgaatctcgatagcgtgtgagcgaaacaaacgacttagggtagagtatatataaggtgttttcgttttcctttttttttgaggagattaactatctagatttgctgaaagtacgcagattacttgttttctaaccaatggtaataaatcaatttatttaaattagttttctttcaactgattaaaaacaattaaacgcaaattaaattttgagaatcagtatttgtcttatatataaatttatacatgaaaaatataaaatatttacaacaaaaatcatcatcttatgaagagttcatgaatctcatcaaatctctctgttttctcttgcaacaaaactcacggtgatgtcgtctatacaaatcttgttgctttttatattagaatttgttagattctagtaggctggaagggatcttgaaggatttgtgtttagagatttatgtcattctcattttaggaggtggagaagtcaaaagagaatcaaccatctagcagctcaattggaagtatgtgaagtgattgatgatgacatgttttatagttttgtttctattatatgaagcttgtgccccatctgaaattttctatatttctcttagttctttcctctggctaacatacctaagatactgtatgatatgcatccaacctcaaagttatattttgttgaatcttaaggtgtctgtcataacctatcttaaaactgcaggcaggtaaggttacactcttcagtgctagacacaagatcttcagtccagtgggttgtcgccaaagtgcaagatataattatttctaacaactttgagaaaagattttgtgatgagttcgaaaacaattagttgagccttccctttcagtagcttaagaggctgaatttttctttcgtagctaactcatgtcattgagttctctgagcaagccaattgactgcatgttttgtgatcctatggcaggcacacgttcgaatactacgacaaagatgaaacaattgtgactcatatagctggaggtattgatgcatttttaaaggtctctgatggttggccactgctgaataccccattaaatggaagaagctaaagttagtgttttaactattactatatagtcaatttaggaaagtcaatattgcttagtaaatcaattaagaaaaccatttaaaatctacaaactcaagtctaaaagattgttgtctacagttagctaaaccaaaaaacagaaccaacaccaaaaacaaattaacctaatgaaaattacattctaaattaaaccaggttcagattgttgttgtcttcacttgagattcttgtgcagtggaaggtcatttggattatgtgtaggtttgggatttggctcgagtgatctctacatgtggtgagtttgtaagaaaatgaagttcgggaatcgaaaaaaacgcttcataaacccagtaaagctacaagagatggatgttacaactaaataacacttgcacttgaaaactaaacaaagtttttatacaaagagtgccacaagtggagtggtggtatacacagagtaaaaatgagacaatgtaaacaagagaaggccagtcaagctagacgagtggatctgtcaaaggcctcaatgacttgataaccatatctatgcttacacaaatgaatactgcgggtgacgaggacggaggtgagactgtgcggaagatcaataccggtgcgtttaaaaccccaaatgagacgctgaactacatagttcccaacacgatctttcaccaaattctcaaagtaactatcaaactcagaggcaatcaacgtaagacacctttcatcaagcatatcaagaaacttctgcacagggtaattagagaaggagcctgatgaaagggacacaaagtgaccagagaacttgtttaccctttcttatcaaaggcagctatcaagcaatcattaccaaacatggagagcaaaagtgaaccagcatgatgtataagcagtaataggttcttgttaccaatctcattacgggagagttcaacaaaagttgcaccaacttgaatcaggaacttgaacaaaagttgcaccattctcatattgacttgatttaaatattaacaaaaaattatatctatgttattgtagagaagaaaaaagaaaaacgtatataattaaagattaggaaactcaagtcctttgaagaaaaataagaaataaaaaaacccaagcctaaagtaaaccttgataaatcgtcataccttttctcaacgatactattctataatacatatttaactagataagtaatccgcaccttgtgcagaaaaaaaaattattaaataaatttaacattggattaaatatagaagttattctagtggccaaaatctataatgactttagggtttatatagatatatgtgatatccattatatgatcaataatatattggcaaatatagaacagaacatttatattttattaatatgtttagtatataaaatgatgattcttttgatattataacttattctttataagataaataatattgctaaataattcgcttaacgcattagtaatactatttttatgtatttttgtaaaggtgaaaacgattttatgtaatatatgtttgtgaaaaatttgtagtattgtggatgaatatgatattggtattctatttataggaaaatatgtttttacatatgtaggaaattgtcttttttccttgcaattgttttagaaatttgttacaagatattaatgcgggaaaaatgtaaatttttgtttcggaatatctatagtaaaatatgattttgttcccatattttctaatattttacttatgtattattagttaatgatatacgcagttattctaattggcggcagatttgctatatatacttgattaggggtagttttcttttgtagacacatcaatctgtatgaaatttacaggatgaaaaacactcggccacgaagagccaaaatttaggtttgcgttttgctgtgtgaagagaaaatatgagtcaagtatgggtttgaaattcagtaatttgagaagagttcattgactaagtattgacgtgagtatggtagaatatacaataaaccatatacttacataactaatcataaaaggaattgatagtcttatactacatgcactaagtcactaaccaacctggcttagcatttctaaacacgaatttacaaactgttaagatctcgtggcgtctgacaacatccaataatgacaatggcgatatgaagaaacaaaagcagagggctagaccaagcatgaagttctttaacgttattttttgttaagagactgaagaagaaagaaggattctatggagattggagagagtggttgagctcgggcaagagaataaaccaatgtaccactttagatacaatgttttgagctttctgaagagaaaaaagaagagaaaaacgagactaaacaattattagtttttcatagttatatttaactacaaactgattgttttcggtgtatgtgtataggtaccaaatccattggctttcgagattgaaattaattaagaaactcataattccatacatacatacacaatatatggacgaaatttgagtaaaattcactaagcttctgtccataaaaccttaagtgaaaaagggagatcaatcccaagaatctattgaaaatatgataatcttaagtaaaaaagcaaactcaagaatcatagctttatggatagaacaaattataacgctcttggaagaaaacaagaatcatccgggtcctattctctaccaaaacaaagagtgccaccacacacgaaacttatacacttcgttttcatcgagaatgttcatgtatatgaggaaatcttgagatttagggcaacgtcttgggaatctcctacttataataaattgaaatcaagaaaaaatataactcatgcaatgatcagattccagattcaagatcatataataaatcaaaccctatatcttcatgaaaacaccacaagacatataagaacaatcactacgagagcagtgaatttagtagaaatcaatacaatacataagggtttatcaattgcttgagtaacaatgaacccctaaacaataatgtctagagataaaagatatgtaaatcgaaaagaaataaaccctaagagaatgatcgaaactaattgatatcggaatcatcaaaatcatcctcgaacttgttgaagaaatcgctgtcttcgggcttcatttgaaagggtgaaattcctccaacttcaaactgcatatccatgggcccgaagtcgtcttcatcgatctccatctgcataggcatcgagtatcctggatactccatctcacccagaaagtcacggtacaccatcggcctcatcgggtcttgttcccaatatctatccatcgtttcgcttcctttgcgtgaaaatcaaacaaaacctaaggataaagagaaagagaggtgttctactttttgagggttaggacacccttaagtaatatccgggacattataaaggcccattagtagaggagattggtccattatacagtcaagataaattaagagatttctttctttatgtgtcatcaacaattagtttttaagatttttttctaaaacaaagattttgtattagattatattcaacatatgtagtatctactaaaataagcctttctaataattataatgaccattataaagaaaaaagtatatttatttttatttcttatttttggtattgattaaaatatacatatctaacgtctatataagaaacatatgtgttttacaattatcaaaactgattacttccaacagaaggaaacatacaaatttgttaacatgtattagctgaagctcttcaccagtaaaatcattgcaaagatatatgattcaaaattgggaaaaatcttccctagtagagaacaactcaatgacaatgtgaggacaaaagcagagaagaataaacactaaaagagaaaccttttgtatcatagtatttacaacatttaacgatcataattttgagcattttcaggattgatcaaaatctatatatatatatatgataagagacttcattttgaataatcaaataagatacaaacaaccttaatccgtataatagtcattaatttattagcttgtggtggaggtggtttttctgccacctataggattctcacacgggacaacatgcaagcatgcatattgtcagaaacatactcaagaaagccaaagaaatgaccggcctcgagaatgaccagtatgcaaggacgctatactatcctaagtcctaactcctaatccatagaaaaatactctgaacacgtggtacgtgacttgtcttcttaaacgatacttggctagaaacttgcagtttcgtaatatgtagccgtccaaacttttacttcaaagtcaatctcggttaagaaaacatgttctgtccaccaaggtaataaagatcaagagtacttgatcgactataatttcatcaaatatatcacgacttgacaggctcacctacttatgacggagggctgcgatattggttacaaacacatcctcgctgacgatcattcggttataacctttcaaataatttcaatttcttctaatcctttcaaatagatgacaaaacagtcttttggtgaataaatctttcattcataccaaaaataaataaagtgcaaatgtgcaaatgattgcatataaggaaaataaataaacgtacctagctattttaagtgacactttctaggatttctcagccataatgattccaccgttcttcatggtgctgtgagaaagaggttcattgtagattctatccatgtaggtagaaatttttgttttctcaaatcatcgatatggtttatttagttcctcatgtaagaaaatactttgtttatgaaagttttctctgtggattgatttttcacacagctccgtttcttcggtttcctttggaatgtacatgtaagaagtatgatgtattccattttcaatatgttttatttaacataaaatctagattttcgaccaataaccttttcaagtaaaagaccagaacaagtcaatttagtcatttttcgaacatctaaaacttaaacttatgatgatgttacgactcaatctttttaaaagttcccctattacatcactagagcaatagtttttgtgtaactttagttcctaaaaggagcgagtctaataagtgcataaacaaggtatatactaacagaatttgggaaaaatagtgaaattaaaaaaaaaggtgcacaagaacacaaacatagatagatcactcaaaacaaaacaaaacaaaacaaaacccaaaaaaaaatccaatcaagatttgtatttcaaaagcaaaatcccaataatacttaactggatataaatttcaaaacagcttgaaaatcaaacggctggagggttaggcgcacgaggtactggagatccaggcactccaatggaatcatcatcattatcatggtagatataagcaaaaccaccatgacctgctaaatccattcctcgcatttcatgctgctccgagatcctaagcaaattgagctttttgaggatgaagaagagtgttcccattgtggcactaacccatccaacaatcacaattatttgaaccagttgtgctcccaatagcttccctcctccgcccataaatagcccgtagtgccttcctgggctcgcgccgtaaacctcatttatatacttctcttttgcaaacagtcctacaaatatcaaaccccaagcaccacaccctccgtgtagttgtgcggcctcaagtggatcgtcatattttaagagctctgcgagcttgttgcatccgataaggacgagggaagccacgaagccacatacgatcgctgcccatggatcaaccacagagcaacctgccgttatggccgcaaaccctccgagtaacccgttgcaaacgtcagttacgttccagtggcctgataggagacgttttccgaagagtgtggttagagccgctgtgcatcccgagagtgtagttgtaaccgcggtgcggcctattccactccattggccatagttggaaccagaattgtagggaatgagtatcttggtgaaggaaccagggttgaacccgtaccaaccaaaccagagaaggaaggtccctaagacgacgagtgaggcagagtggcctcgcagagcaatagcatgacccccatcaggaaaccgaccaatccgagggccttcaataagggcaccccataatcctgcgataccaccaaccatgtgaacaacacctgacccagcaaagtcgatggctccagtgccaaacaaacggtcttctgaacggaagggactagcccatccatccggagaccagaaccagtgagagacaactgggtaaacaaacccggtcaaaaaagaagagtatatcaaatacgccacgaacttagtcctctcggcaatggagccgctggtgattccagcggctgcgattgcaaacgcccattggtagaggaagaaggagtaatccgaggtgagagtcggaaagttttgaagaccaaagttgtgtcttccaatgaatccatcggaggattcaccaaaggcaaatgcataaccaaagaggtagtagaagagtcctccggctgcagcatcaaggacattagtgagcatgatgttcatcgtgttcttagctctaacggagccagcacaaagcatagcgaagccgagctgcatcgcaaagacaagataggcagagaagaggaggtacgtgttgtctatagcgtaggctgcatcggtaaacttgttgttaacggaacccaactggccgcaaatgtagtcagccgctgccgtggcatttgggccgagtagggctgagagatcagccgcagagcaagtaatagctcctgacatgttttagagacttgagagaggaaccacacgaataagaaagattgtctcttgtgcagctataaaaagaaaaagaggaggagtttctgattctggcttgaccaatcaaattcgtagttaagtggagagatattcattattaaattattagagatggaatctaacaaatcttataaactacttgcaatatacgagaatcttatacggttttggaaatttagtgattggcatgtactttttatttggtatcaaacgcaatagtttcttattataaaaaaagagagagagggagtttaaattcccttatcacatgcttcttttagcaatctaagcaagctgatggaagcaaatttaacccaaaatatgaatgacgacattataatattgcaaaaagatattaaaaataaaaaatatgatctattcaattgtagcatatgtaagcaaaacatatttgaccaaggaatctaagaagattcccgtagagagttggtcgccgttttcgactcacactgtcacaccacctcacacgaaagggaagctcattcgtgcttttactttcggggaaaaaacgtttacatgtacctgagtatcttctaatttctattttaatagaattatataaacaaaattagtacttctagggtttctagcaaatcaatttgtggcaccttgctagttgtagatcagcaactctttttttgggaatcaggtcaaaattcagcattcttaatacgaaaatcttaaatataatgaacttgtaaagtattaatataattgctgacgaaactgcaaatgataacatggtttagcgggaaccacgttttattagttgaaaatttcacttgcgatcttaaaattcaacaaatcaatggcgtttaatgtgattctatatattagcaaccacaatggtcgaataagaatgagtatagtttatagataaaattgtagcaataagtaatgttccaactatgcctatatgtaaacttaatcattataagacatacttgtaaattcactagtgaatatatacgtacgaaggagaataaataagtttactagattacaaattagctgatggaaaacgaagaagtatacgatttagaatacattaatattgggatttgacactcaggaaaatagacaaaaccaaactttttttttaatctaatgtcgtcgacgaacgataaatattttaattgcaacgggagcttttaaaatcatacagagtaacctgacatcattgattaccacataacacaaattaattatttgataatacgtttaatttactgattaattatagtgcatattatattttagtttaggtcaactgacaattaactataagaactaaaaatttactaaatacgaaaagccacattgggacgttttctgttttatgaaattatgcaacggcgcattgcggcgtctctagctatcctctatgcatatcagactataaaatatttgttcgtgaaattactttttatgttctataatagtgattgagtgtttaataaccaagaacatcataaaaaaaactctatagataatcataataattgcattaacatatttggctatttgccaaaacaatttaactcaatactggttgatttgcaatgctagaggatcttaaagaaccatcttagattctaagtagtaaacaaatatataaatcaagtggtagtggtttagcgattcccattctaggaagcgttgccttgtcggtctagaacaagaaaagattcattacaaaacattgaattatctacatcaattgttatttacctagtcgaaatagtgttatattttttttctttattattagaaaatttggtgaatacactagtacttgacgactataatcactctaagaaattagttgggtggtaaaatgtcggattaccgatagataattaaaataaaataaaactctaagtctaaactatacgggcaagaatatttaactggttcgtaattattttaatattttttcttactacgacccgttaaaggtaatcaaaattcttgtacaatgttctgtctttgtttgggtgacatatgaaatatacgtttgagaatatttaaatacagtttgacgactaatatgcacaaaaagatgatgtgcaaggtataagctactggaattgcatcgtaattccatgattctacaggtctcgaaagtgtatacaaacaaggaatatatgttataaaaatttttgtttagcagaatttgaaataaataaaaaatactattgaaatattaggtgctaaaatttatcaaccacaaaatatgggtcatactcctttgtttaaagttatcgaggacgcaagaatttgatttatattttaattttagtttgtacgattaatagcaacaattgttaggctaataaaacccattaggcttagttcaatagttctaaacaagtgaccagttacatagatgtaatgacatgtcatatttcttctagtattatttattaaccaacatcgttcaagtaaaagataatatctacgtgtacctaagcgtggctagttaactaattggaaaaaatcgctttacgtgtacataagggaatgactaagttctgcttttggtacgaaatggtacacaaatgatttttcagaatttatattattctaagaacaacttttgtgtactccaatttcctaatgccgtcggcagaacaaaaacctaagcaaagttgtatacagtatatgcataactctcctttttggatcaccaaaagttgtatatataaatttctaagaaatagcataaacattagccgaggcatgtaaaattaaaattcaagaaaaaaaaaaaaaacataaactaaaacacttataaacacaaaaagacgataggtcacttaaaacaaaccaaaacatccaaatatttatatttcaaaaccaaaacccaaacaatacttaaacggtaataaattaccaaaaagttgaaaattaaacgcgaggaggagtagctgatcgagggaaaggagatccaggatccactctatgagactcatcatcattatcatggtagatataagcaaagccaccgtgacgtgtcatatccatcccttgcatttcatgctgctccgagatcctaagcagattgagccttttgaggatgaagaagagtgttcccattgtggcactaacccatcctacaatcacaagtatttgaaccaattgtgctcccaacagcttccctcctccgcccataaatagtccatatggccttcccggggtggcgccataaacctcgtttagatacttctctttggcaaacaatcctacgaatatcaacccccacgcgccacaccctccatgtagttgggctgcctcgagtggatcatcatattgtacaagctccgcgagcttgttgcatccgataaggacgacagaagccatgaagccgcacacaatcgctgcccatggctctacgacggagcaacctgcggttatggccgcaaacccaccgagtaacccgttgcaaacgtccgttacgttccagtggcctgataggagacgtttaccaaagagtgtggttagagctgctgtgcatcctgagagtgtggtgttaaccgctgtacggccgattccgctccattggccgtagttggaaccagaattatacggaacgagtatcttagtgaaggaaccggggttgaaaccataccatccaaaccataggaggaaggttcctaagactactagcgaggcagagtggccgcgcagagcaatagcgcgaccacctttctcgaaccgaccacgacgaggaccttcaataagagcaccccataaacctgctatgccaccaaccatgtgaacaacaccggagccagcaaagtcaatggctccggtgctaaacaaacgatcatccgctgaacgaaagggactggcccatccatccggggaccaaaaccagtgagagacaaccgggtaaacaaatccggttaagaaagaagagtatatcaagtaagccacgaactgagtcctctctgcgatcgaaccacttgtgattccagcggccgcgattgcgaacgcccattggtagaggaagaaagagtaatcagctgtgggagtcggaaagtctctaagagcaaagttgtgtcttccaatgaacccttcggaggatcctccaaaggcaaaggcgtaaccaaagagatagtagaagagtcctccggctgcagcgtcaaggacattggtaagcatgatgttcatcgtattcttggctctaacagaaccagcacaaagcatagcgaagccgagctgcatggcgaagacaaggtaggcagagaagaggaggtaggtgttgtctatggcgaaggctgcatcggtgaacttgttgttaacggtgcctaattggccgcaaatgtagtcggccgccgccgtggcgttggggccaagtagggtggcgagatcggccgcagagcatgttattgctcctgacatgtttgagagagctgagagagagaaagagagatacggagaagaaaggttgtctcttgtgtgtctcttaaaaggaagaaggaggagtttagggttgactttagattccggctagaccaattaagttcgtatttaagagagtttatcaattatttaagaagttatgtgacgtaacaacattattgaattagagatgtaatctgccaaatcttcttaataacttgcaaattacgatcctaatcctatacggtttttggtgattaagtgattgccatgtaatgtgtgaataaaaaaaaggtaaattaaaggcttgtataaaaaaattacaaaaataaatttgtgaataaaattgatactagtatttaaagtaataaatcaaagaataattgtcctagctcaaccgtatatgttcaagcaaaccgatcagaacttactacatagatgtcgattttagatcagcagttttatgaaattaagtcaagattcagcactctttatacgacaatcttatgataatcttgcaaaattttaataaagttcataaccaaatattaattaagtttgctgaaggttgaaaccaaaaatgataacatgggttagcgggaaccacgttttatttgctgaaaattgcactttacacccttaactcttagatatgtccaaaattactcagatcatcaacagaagcattaaaaaaaattatcttggttttgtataataatactacatgcatgtataaagtattcaattaggaaaacaaaaaaatgaagacacacgacatatagtttcaagcaagagatatatacaataattcgatccaattgacattgaaacctattaacagttcatgaataattcacgtttataccaaaacaaaaacattcatgtttaagatatatatatatatatatatatatatatattttaagatatttaatgattgaaaaaagacatttatctctcagtttgtgccaagccatgaaaattcaagtcaagtattacttttaggaacatgatgatctcttttgatcaaaaatctattatgatgtatttgaataaatatacttaaaagttgttacaagtgctgatgtttcaccaataggctttttattgtcactaactagttctaaaaactgaaagctttctatatatgtatgtgtgtgtgtgtctgaccttaatcatgttttaagtcaacctaacttaatcattatgggagacacttgtgacttgttatctatatatttactgatgagttgtaaatgagagttgacactcagaaaaatagacaaagcaaactgttttctaaaataatgaacgttaaattatgcacatattttagtagacggtagctttctaaatcgtacaaaataatgtcaagaattgacgtgacatcattgattaccacataacaaatattgattctttagtaatacgtagtaactattgattaattgtagtacatattttttaatttaggtcaactgaaaattataaatgtaaaattgtttactaaatacgaaaagccatagtaagtgatttacattatattggtttatgaaataaaactaaagcaggcttgttatactgtgtaactaggtaagcaccacggctcgacgcaatagcacgttagggagtctatagctcgcctctatgcatatcaaaattcacaatttttgttcgtgaaattctttttttatcctctgatgttagaaaccaaaggcatcataagaaaaattgcgataatcaagacttttgcattaacttttgtgccaaaaaacaattacgccaagagtggtagactttgcattgcttcatgatgactttaaagaaccctgctggattctaagtagtaccattcaaatctattgtttccagctagttctatatattttaaagaatgagttattgactctattagtctctaattattatacttcttagattttttttttttttttggttcaaagttcaacgagtagacattcacagcaagattattttaaatgccgaaagtatttctattaatattcttgcaactaccactttaaatgtaatccaaattattgtacagtataattgaaagtttcgcatttgttgtctttgtttagctgacatatgaaagatacatttaacaagaaaaaaatgcgtgatgcaaatacagtttgactaatatgcagaaaatatgatgtgcaaggaaaagctattggacctgatcgcatttaatatcgtgataacatgatactacagttatccaaactgaatctaacgaatgaataaaaggatttgtattgggtttaggaacatagaatgttattgaattcttcatctaggcaaaattaagttctataaattaatcgcctaccaaatatgggccactcattttttgtttaggaagtctttgcaaagattttaaggcaacgaatggttaggcaaataaagcccatttaggctcgacccgtaaacgtttacaagtggccacttagatttactgacatcaccttatctaaggttattattattcatcagcctaagtattttggttggtaaagtctaaaaggaaatatccacgtatacctaaacgcagctagctaactagttgagaaaaaatcgttcaagttacatataagattactttgaataactttatctttgagatataatttgtttagggaatttatgcttcgattcttgtttcgaaacgatgtaccatactatcatcataactaggtccagaattctagacggcgcccttgtaaactacaagaggaatgatcaagcaagtaaagaggtaatgctgaatccaagactaaattagaaagtaagagatttcattagctttaatgagttcaaagggaatttcacctagtggaagtcggattcataactatttgttccttaaaagcggattcatgtttaacatatttatttgttaaagtaagaataattaatatggctcaaaccgtgttcttgtttttcttttccgtagcactatgccactatctttattatacaaaagcttcggaaattggatgggacacgtttagccaaatccaaatgatagatatcgattccttgttacggaaaaaaaaaaaaaaaaagatatcgattcctttgttttagttttaattttttttgtcgtctacttcatcactattacaagatattaatattttcctatccggtaaaacttactttattaacatacaaatttcgcatttttccgataattgaattccaaacataaaataaaataaactttttggtcaaacacttaatgatatgagcttccaaaaatattaatacacatttaagatctaaataattttggaaagaaagctaaataaatatgaacaaacaagggaaattaactagaaattttttttgttttaaaaaagcggatcactggtttttatttttattttcttttaaaatttatgtttaattttactttctaataatgaactagtgtatgatgatgatccggaagactatccaacatgcagttaagtgttaaaaaaaattttaattaagtttacgagaggctttaataaaagagctaagtacatactggaactattaaaagcaaccaaattgaacagaacactttctattaatctacaagaaactcattaggataatccaagttggaataatctactgtaatatcttaatctcatcaagaagatattttcactacaatatgcaagtgacaaaaaaaatatttgatctattggagtgagttgtgttgtactaccattgacataagcattcttccacatactttcttaaattctactacatcactcttttatgataaaaccaaatgagcttcttacatcacacacaattcataccaaaattatatatgttaaaaccaaaaatctcaaataaatgaaaccacaaactaaactcaaactcgacctaagttgtcggtcaagtttttctctttcattatccggcagataagatattttaaaggtcaagttaacagaagggaatgaccatgttctggaaatagtgcttccttggggcacaagcagcgccaccaaaacttccttgtccttcaaaatccagattccataaaccgtcccaaatagcgttatcttcattcacattagcctcaggtattgttaccggaaccaccgggtaatacccgttactatttggttcacaaccagaagttgttgttgaatgtgtgatctgatgaggtacatataatgctccactttcgccactactgctactgctgaaggtgttatcaccattgttgttgtcgtcatctagtaacgacatgatctttttcatgtcgatttgattgaattgaagcaactgttgttcttgctgcaactccatttgtctttgctgctgaaattgttgcctcttcaagattcggttctttgtcttctccgcactgttagttggagacttcgtcttcttcttgaaatgggttcgccaatagttcttgatttcgttgtctgttcttcccggtaaactacgtgcaatcgtggaccacctacaaatacaaatcatcagacaaaaaaccttagaataaggaaaaagagatgagttacttattagggtaaagctacaattgtttcatattttagtttcgaatgtaatgaaaaaaagttaagagaagaaaattctatttagcatactagaggatgtgaataaacaatcaaagcttaggttaattacctattgccccacttagcatgtaactcaaggataatggtttcttcatgaggagtgatttgtcctctcttgaggtctggtcttaggtagttaacccatcttaacctgcagcttttcccatttctcttcaaccccgcgagcctcgcaacagagttccatcgcccttcaccgtgaagctgcacataatcgatcaaaaggcggtcttcttcagcagtccaaggcccttttctccaaccttcttctaccattccccatcctcctcccatccctccccacaaactcattatttcttcttagtttttttttctttagtgaaagctaaataagagaagtagtgtcttctccttctctaacagtcccaccaatctctttttgtctctctgtcttgtgaaacctaagtgttcctctgttttgtctttgtgttgtgttttgttctgtttttcctcttcccctttcattatttatatatacactcactctagctccttggctccaccactttttttgtttgtttgttttctatagagatatagactagtgacaagacaatctttttacatttttagagttgtgtaccttttagaatcataaatatcatctaaccactaactaaaagaaaattccgtgcaatatacatacctttttccccttaaactacaaaaatagttctacaagctcttaattagcaataattagaatttaatgtaaacacaaaagaattacgagaacttgggtgctctcgttaccccttttcactggtcgttttcataagtctttcgtatgtatcatttcctctgtccattcaactcttgatctccaaaggcatcatcatacacaaattactaaattacccctcttgttggtatatttcttttgagttttaatcatggatgaaaacatgcattgatacattaaaccaaaacttttcttcttttctccaactacattttgagtccttagttgctaaccaaatctgaaagacaaaagtttacaagtttaatttttttaaaaacaattctaagaatctaagcttaatagtctctgtatgggaattacaagtatagaaattaataaaacccgagaaattagaaaagttaacacattgtaaactagtgtcatggtaggttgaaattttttggattaattccaaggagacgtaacaatggtgagttgtggctacttcatcacaatcagtttcaaaaacctatcaatatatatccttatagaaaaatattcttcataacctataacaaaattttcatcttcaaatgaaacagtgaagggtccaatgaaaattttcccttgaagcactatctgatcgtctccctataggctataagcaaatacttcttacgcatatggtggaatgaatcagaagaattttacgagctatcgatcccacatcaaaatttctgaaaaggtcttcccaaagagtatctttcctacataacctcgacagaccaagataaccgttcacttactacacaagttttaaactcattagttttagggtttttgtttttaatatgttaaaccaaaaaaaagaaaaataaattaaatcaaacagaaattatatttgtatatatatatatatatatatatatatataaacgaattcagcctaaatcaaaaactaaacagatccaaagcataatttatttgatttcagttagaattctattgaaaagtttaagaaactaaatcaaatttaaatgttataattattaagccacccaagcttcatcattctcatatacacgaaacgaggatattacagggctattcattttgatccattattttatgcaagattaaagaaataatgttaaggcattaggtaacatggtttaacaaggcatcaaatccaatagaataatccttttaatctaaatttttatctttttgatagggttaagctaaagttatttacaacttgtgttttgttgccacgtatatgatctagaggtttaatgcagggacatatattatgattattataattatttaacttccttaatgaacattttcttagaaagcataattaaaagtaaaagaatatcatggtgctggattattttaaggttatacacattattgaaccactaaggtttctccaagtgtcaaggatatttatacatgcgatcttacactaatctttgttgttgtcgtataagattcgttggattccacataaggagttattacaataaactatagaaacaaaccaaataatatgaaaaagttgatggtgtttgtacgtcaccatgggacaggtggtcttataattctctcctcttagatatttgtaatgtctcttctcatttctttctagatattgtgatcaatccaaaaaaatgaatgtctagcgtttccatctttttccatagtagaaatcaaacaaaaaaatactgcaaaatactaatataacaagaaatatctacgtgaaagatgagttattatatgtcattaatagcgttttatgaaaatcacaaactatgtattatgtctctggtttcatgttgggtacgtatttcagatgaacctaaaaccaaaactatcggttggtttttgtttctaaaatacatataacattttcagtaacatccaataaataggatactgaatgttaagtttacgtgtatacatattgcaacttatttatcaaaatatcaattggacggttgaaatttcttttgttaagtccatgacaaaactaacgtcaactccaaatttttgatgcgacaaaacatagtagttagttaattagcactacaaacattagactaattttctagaactagggtcggatttagggtatttcatgccaagcttgaccgatcgactgaccgatccacttgctagtcaaaggtaatagattttctttttaatatagattacctatgaatgaatcttttaaatgccaaaataaggtacatcatcaaatcataattacttaaataatgcgtaaactgatcgtatgggttttgaatctctcaagctgttacggtggaactattggggcacttcgaagattaggacaatttctaagaagtgaaacgaaatacgttaagacctaatctctagaatatagttcccgtgtctttccaaagacatttgatgcctataaaatataaatcacatgactgatcggaagagtcgaaaaacacaaatagaactatggtgaaaattcaaatggttcaacagatttttattttctaagtattttaatcagattttgttcacaaagcaattctcaaatttgtgtacctcaacggctcagagactacagacacaaaggcgtgcctataagacgtcagcaatatcattcactgattatacataaaaaataatttttaattgaatgattagacactaatcacttttttaattccacatgattaattatttaattgaatcatctaataaagttttgtcgttggaggtcatttgaactccgtgtttcgtacgggttttcatattatttctgacctttgtactgcaaagacatgtttagcagctaagcatgtgattttgctagatatgcttttacgttaagaattatttattttattttaaagtatgtcttttcaggagaattattatttttttttttgttttttttcacatcatatccctctcaaattatttgtagtttatgtgtgatttgttttggtatatataatgtgtgaatttgtttttttagaaacactagagactccgtattgaaatgtttatttaaattatttgatagaactcttttttataaacacatgttaaaaagacggtcttgctctatatcagaaaataaattatcaaaacttactcctaaactatatccgctagaatttgtgtgtggagaaatatcgaaaatataaattcacatttgggataaacaaaacataaatttttaaaatgtcataatttaaaatttagtttaatgtttttgataaaacggtcaaatttcgttgatttggctacttgggataaatcattaaatttttgttaacaagtttaatttttattaaaaaataagaaagaatattgaaccaaaatcgaattgatgatcttttagactaatacaacaaactttaaaccattgaagcacgatagcattttcgtatgctagatataatactaggtagtaagagatgtgaaagaaaaaatgattgcaaagaacggataactttgactaatttcttactagatacgacaattttatcaaatatttcgaatcgtacaagtaataaaataaacaaaaattcaaatccaacgtttctgcgtgagatgcaacttggcatgtactttgttgatcaaatcatcgtaatcttttgtgtaacttatataacattttcgtcattttttttttaagttttccccctttttggtgactttctttgtcgattaaaaataaagtttgcacgatactttggaattagcttttaaattaattataataatgttgttcctatcttaagttgaaagtgcagggatgtgtacttgccaataatcttctagaaccagagtgaatcattgttattctcacagctttgattacaaacatttccccccaaaaataaaataatacaaaaaccatatatcaattgcaaatctatgggttcatatatggttttggtaaattcttttatctttggttgtgacccatatggagtatgaccttggctgtgaccttatttgtggattctaaatctaggacttggttatagtcgatagactcaatatggattgtaatttcataaataggatttatgcaaaaaatgtatatggggaattgtattagtaaaaaaaaaatcattttgcggcatatcttaccaaagttcgaattccggttattgcgttatcatgcataatagagattgaattatgcgacttgtccattccaataatgtcaaaaacaattgacaattttttataacactactgaaaataggcacatttaaacttttattatataaaattagaaataggcttacttagagggatttccataaacttttccaaaaactatttgtttctgcacacactctgaaagaaactcatctcttcccatctaaagatttcagactcatcacagtgctccttactcaagctattatctagaacatttagaaagagcagaattcaagaaccatatatgtttcacgttcgccggcttccatagcaagtgacatcataacaagatgtttcttggcctttcaaacttctatatttattacatcaggccattctccacatccttttggttttagcattatgatccaaccacaccatgacgatttcatgtgcaagtttcctgaaatcttcttataggaagagtttttttgccattataattcacatgtttttcttgtaattttttatctctctcttctttttattctaagtttcatagtgaaatattttgtaatgtcttacttattcaatagaagtagaataatatttattcacatacaactttcctaaacttgatagaatcctatctaggtaaacaaaattggtcaagaacttaaaccatctatttctttttattatgcgtcggataagacgtttgattttttttgaagtatatattcctcacatgtctttttctgaaacttttttcgtcactgctcttcttttttatataactacaatgtgttattgtgtcgaagaataaattcaaaacagacaacattatattatttctacgtttttgattaaaacataatcactttccctaaatcatccatcgaaagaatgattctcatcaagaaattacaagatggtagagttaatctcactttcagaataggtatttagtataaatccatcatagatatagataaccttatctcttatacaataaataactcttttgaccaaattaattcatatgctgcaatcttcaactctttatgtttaatttcgtatatacacctcaaacctaagagtatataaattggaatatcagaaaggatgcaaaattatcgtatttaattatatatcagaaaatatatacttattgtatactttttaaaaagaaatcgcatcacaaattgaatcaatatttgtgttctcctaatttttggaaagaaagaaaccaacttttaaccaggtcccgttggttcagtggatttgagtagtattggctaccgaggtttgagtaatttaacatagttttccgaacctcaggattaattttttgagtctaggaagcctttaaaatcacttgagttatcgattaaaaaagaaagatgagttattcaagataggattacgttatatatgttagataaaacataatatattatttacaaaacaacataaacaataatgttatccaaagaaccaactttttcatttaaaaattaggtaacatagtaaaattagacattccatattattattatatagtaaaggtacagtcattagactattcttaggataaatttcactttacatcaccggcctagcgttatgtagatttcggtgtttctaatacatgatctgagtctttttagtccaaagcaatcgtcatgataaagttgttcggacatgaaggaactagaaaattctactaactttggacaaaattcagttttaaatagttgataatataacccatagttataatcagttaattttctatttcctggtctatgtcgcctagaatgatatacgaattataaatcttatttgatagaaaagaaaatgttataagagacaaggcacgcaagaatgattgaagatggtagataatttaggaatccagaatacatgataaattattaccttacggcattcgaaaaagtgttcaaattatcaattcttattcttttttttcttataacttgtgattttgtgtgttttagtggattttctaatcattaggtaaaaagtgtggtcatttagtttaacaaaattgtaaatatcgaatttgatacaaaatgaaattaatgagtttaaaaataaaggtttgacaaaaaaaaaagagtttaaaaataaataaaaaaacttagagaatcaaaatgagagttttaattcttgtcatgttttgttttgatgcaagaaaaagtatccgaggatgctaaatagcttagaatgtcatgaatacgtgatgaaatcattacccaagcttgtatcatatgaaagtatttagggaaaattgtcaattcagaatttcttacaatgagtcaatagtaggaaagttttgtaacaattttataaaatttgggttaacatttgtaaggtaaaaaaaactacattgaaggaccactacatattcgactatattttattttgttttaataatcagaggtggtgttggaaacaacgtaaggttggattaagcaaatgtgaagcatccaaatcgttaattaattaatgacagcaaatcaagtttggctgttaaacactaaagaccaatccacctctagctatctattttactttgacgaaacccatttatgagttgtgaaataattactctttgattactttataaaaccttaacctaacaagtgaaactcttttaattacttttgcttagctcaagtctactggttgaaagaaaagatacattgtcttttctctattccaagttcgagtgtagtgaatggattgaaaactctagaagatatatgagtcatctaaaagttaagaaagtgagagatattgagtagaagtgcaaaaccttaggttaaggtcgagggtggtggggctatttcatcaacaatttgcgcacgaatgccaaaacaaagcttatcaattttttttggcatagtatatctaattagtgttgttaggcaaatacttacatcattcttttaaaatattctttcttctttttgttataaagaaataaataactattttttttcttcctttcccacaaatttattttttatgaccatctcatttttaaagataacttgatagattaggaactcacatttaaactagtttcaaaatctgtaaaagatctatctttactatttatattacaaaggcttatggtaatttccacactttataaatgggattttgtgcaaaagaaacccttcttagtcgcctatttttgcaactttaccctctatctccgaaaaatgcataataactctatgaagttaaaaataataaacaatatattggctattgtcaagtttttaaaatttaataagtaatatatcaaatcgagactctcgagacgaggagttcaactctttataattcctttttaaaccctttagaatatcatatatttcttctagagtgttactttctttctacaaaattattatctaatctttactctgtaatattacatttgaaaagttgcacattcatgtatgcatcatttcctaattttagaaaagatatatttcctagttaatgatatacggatcaattttccaaacaattatttgtgatatcttaaagaaactttaatttcagttgtccatgaaacatgtggtaatatagagagcattcctaggtaacaacatcaacttgtaatatatatattcctgaacaatgttacaagcatctaatgagcttcatagttcatcgtgcatgcgttgttgtagaggaatattaacagttggaactgtattgccatcaaactgttgtccgagcggcataacatcatctcctacaccatttgctgcttttccagctaattgagctttaatagcagcagtagccattcgttgcagtttcagaattccgatgcgttttgaaacaacgtaaacaacagcaaagacaaagagagaaaatccaactatgaggattatcctgttgatagtgccacagaaaacaagagttagttagtattattattcacctatagaatggtttggtaaaacagagtctattctcttttcaaatacctgtcaattacatcttgacgctgcattgttgaaagtagattacgggtcctcgacaacagagatctatgacctttgtattcactctcggcttttttaagtactccagtagattcatctacaaatgttaacatgtataataataataatatgtcagttttatgtcttaatctgttttcactaaggacttaattatctggcatattatgaatgacataccaaaagccacgagagtgtttgtacttcgttcaacctcctgtaacccaagtcaagagagtattttgatcacacattgtttataaattaagaagccgaatatgcaaacaagtgtaaatgcacaatcatttcataactagtttttttctgacctgaaccatcagctgccgtgaacgcctgagactttcagttatgctttcagcatcggatgtcacgccagcatttgctctataaacaaccacaaatgttagattcactggaaactaacactgaactctttttttagtgcatgatgcatttaccaataaacaaaagcataatacaacttaaacatgtccaagaggagtcccaattgaattgctggattttgtaggataaatatagcagagtttccaagatgtacatactgtcgtttacgtctgagaactgtagactctgttccaccaccgaggagaagctctctctacaatcattgaaagcactctttacacaaaaatttcaaaaggagctggctggtaaaaacagtggcagagagagagaatgcttaagccatgagactttacctcttcttgagctgctttcctcatgttatccttagcttgcaaattagcacttctcaagtttaccctcaaactgaccacaaacacagtgacaaaactcatattagtttcacccatttatctttccctgaactcatactctcactctcttgttgtaccagaattctaagtaactgagatcaaactcaatttcaaggaaatactttaaaacactcatatatcattgaaaaggatatataacattcctctcgttcttacaaactactacaacgatgactcaagtacccttatgccaaaaggttaaacgcacactatcacatcatttgtcctagagattgaattactcaactgcctaaagacaaccttaattgtacaaatgcaaggttcctatattctacttgtgaaatgttgtagattccacaagcagacagtaaaccaaatttccaagtacctgtgatattgattcttccacgtttcaaggagtgactgagtggattgaacctgatcatcagaaggaagctgaggtgcgagcagatccaaattgaattgaagggaattgagaagagagagaccatcctgagccaatccgttgagcctctgtaacgaaaacttctcttctcctccatctcccctccttgatttaccgtactgttgaatcgagataatatgtccaatcgtcttctcgtacgcttcttcccattctctcttcgtcttctccacttcaacaacaacctcatccatgtcgtaactgcaaatttcataaattataaaactgcagagtttagtaatcaaaagagatataaacaagctacggaatctcccaatgcaatctgctaatagctctctaaacatccaacacgtataaccatctaatggtttctgtatgaattatgatcgaatcactacaggaacggtatcagaagactcgattgatttgatgggatataagggtcacaaacttacattggttgatcgaaagagatgaagagcggagaaaatgagaatgaaattgcgaaactagggtataaggttgaagaagatctgggaaccagagagtgttggagatcaatattgatctgtagaagacacctcaaattttgatttctggggaagaagagaaataactaaaaacgacgtagttttagataaaccatgtctattctaaacccggttatcttgcaattgctatcattgtctggtccaatgtccggtttatcagttatttagttatatggtcatattcttattggttaaaatttctagcattacttattgatgaataaagaagtttactgctgagttttgttcaaagtacacgttaatcggatttatgaaacgacaattacacagactgacccaaaattggtaattgcggcatccgacttacccgaactgcatgccgttttgcaaaatctcaaaatgaaaaacggcatggtttcttagtaatctactctagttctagcaaactgacttgttcaattgcacatagagatgatcaactacaaacacagctaatgtttcaaactataagatgctgactacgtctgatgtactcaagcttgaggacgttccgaaattacggtgctttccatcggctaggttagccagagagtagccttgttcatggagttgattaatcaatagagtctctaactgacaagccatgctcttaccttgaaccataaggtatagaaaacttgacccttgcagtccttcctttgctcgatgcgcacgtattcgtccttcaagatcatcggtctgcagtttcgtaacagaaatcctcagaatcaataactttcgttttctgtctattctaagagaagttttataatattaatatggtaagtatgtacctgtccaatgtacaatctcttatcgggtctccgcatcacatacacgcatgaagaaccaactgtagatggaggtggaagctcacgagcaccaattgaaagacattctattgcttcaggctcaatcatctttttcccacagattttgacgatagcttttgctaagtccttctccaaacttctctcagagctgactggtttttggatctgctggtcattgttggatgaagttatgatttggtcgggtttgacaacttcagctgatgcgtcttttgcatagaccgagaggtaaagagcttcagctctttggataactgactcgggaacaccttccctcttagctgtttcaaacgcaagactctctctgcagactccatctgtcaatttccaagttggcttggtttgcccttcgacattttcggctcccattgctttatatgtgatgtttttcgctgtaagaggtaaactgaagattccatggagatgagtagatacaatacccaaacaaccacttgtgtcaagactctctaccacactaccagcgatacaggtgccttttgctgtctctgtccctcggcatatctcatctataagcactaggcttctcgaagtagcctggcttacaatagatcgtatttccgacatttctacctgatggcacagaaccagttgagaggatatcaaacattacaattaaagaaaaaaaaacagtttggtgaattctagatttgtatgcttatatatatacctggaaagaactttttccgtctacagggctgtcatatgatttcatgtgaagcatgatggaatcaaagtgaggaatacaagctgattcagctggaaccattaaaccggaaattccaagtagagcagctgcgcatattgatctgagcaaactcgatttaccaccaccgttaggtccagttagaagaaacagtgattgcatgtcaacggtattgtgaacagcggttccagaagatacatcaaaccaataaggtgacaggcctgtcagcttcattcgactggcaccatctaatggttttgcgccctatattaaaatatatcaaaataggtgcatgagatatataagaataagacagcccagcatgttttgtgatttcttagaaattgcacgcatctgtctacaaactcaacgactagcaagcacagttacctcatctaaactgaatccgacaagcgttggaaaaacccactttcgccttctcccttcactgtagttgtgcacagtacttagattaaaactacagaaatttcttaatgagaattgattaagcgcaaacttaccaagcatgggaaaataatgcttttgaaatgaccagaagcatagatgcaaagacaagaacatttatttttgtttgcaatttaacggataactcgcgcaacagttccaacacccgagcttttgcattctcactagcttcatggtatctgcaacaaaagcataacatgatatatcaatacatacccagtattattgaataaatttcttttggatggttcaataaaacgaggaaacaacctgactaaagcaatttccacctttggggtcgtaaaccattcttctccaaccttttttcctttcgagtctaaggcaggtttcagctgttttatttggtcttcccctgcagtaccagcccagatagatggcgtaaaccgtttccccttgaaccaaacagactcatgctctcttgcatatgcgatttcgcctttcgggccaccaagtgaagcagtggtggccttaattcttgatataatagggtgaaaatcctcagctacctacacatggatgttttgactcttacaaatacgacaagatcaccagcaccattatatttaagcaaaaaagtactatatgagcatctgttatcgttcaaagaaataagctgcaattgttgaatacttactgctaaagataaagcctcagctgatttttctacttgagtgatttcttcctctatatgaattcccttaacgcgacctcgccatgaagactccatatcataaaagaattcgttcgggacattgtcacatttacttacattctgatgactttcattctcatctaaagagatcatttcaccaattgtatcagacgcccaatgacattcgttgacctggcaagaaaccgaaaactacgatttatactcatactcataagctagttggattataaaaaatggcattcaaattcaacgcttattttctgaactcgtgaagggataggaacttatcatcaaggaaaatagataagaaaacaaagcagggagacatacactcagagtcatgtttaaatgcataaacttacaaaagtgtcaaagtcaattttcaaaccagtagccacccaggtaggatccatcaataatttcaggatttccacaagctcagcatgtctatgcatatgtaatacatcatcaagcacattttttattcgacagaactcaatgtagttggcttcccgttgctcaagaagcttcacaagctgcaaaaagatgcaaataatcacactgtaagagatgagagttccataagtggaacgacaaaagttagcatctttcagaagaattctatgtaggaagtgacttaaaccttagcagaagagacgcaggtaaactctggaattgaacatgttactgtgctcatgagcttgcacgtttctgcaaataacaatagtttgacagggacaatgagaagccttaatcataagaaaccctaaaaggaataaactaaggaaactctcttcaaatcaccttgaattttcagagcaatatcgtaagcaggagggttcagaagaagatccctaacatacctgaaaggataaaggcattggaagaagtagaggagaaaaacaataagaacgtaaataagatctttcacccaaacattacttacaaagaaggcagaccactgcacgtagatggaagtaacaccttcaacaaacaaggtattccttcagtaggtaaggcacctgcagaaccacataatatatattatcatgctttgtcattcataaactcctaaacctcctagtgaagcactattcagcatgaagaactatgccaaccaatttgtgtagccgttccaagatgcaacggacgtggccgattttttgaaggtacattgacatttctaaaggaaacttcatcatcaagaccataaacatctttgacctgagggggaacaatagaaagtagttgtttttcacaaaactgaaatgtcacaattgcatatttagtcagcagccaaagtccgtcgttctgacccttgataagagctcggaaagagtatctccttcaaaccattcaaaattcctgctactgcattctccccagagtagacccccttccccaaactctccccagcggcacgtccctgcataataaaaaattaacaagaattgtatcagaaaagaccacaaagctcaaaagtcaattaagttgacacaaaacatgaatcgtatttctcttgtaactgtctccagactctctaaagtatttgctagatcatatgctaccacctgagaatacttatgttcatgtgaggataaaatggcacccgtctacattctattattggcactatcttcaacagttcagagatgctaagacaatgtagaattgaagatagtattcaaaacctgatgcattgtgcctcaacgatgcatgtaagaaaagatgatgacagcgacgagtgcggagcttggtaactaaggcttcttctgttagaccatcatctagcgaatatgctttcatagtctcgaaaatagatatcatacaatacccccttgctgaacgagatatccctgtacttacagaaaaaatcaagtcatgtaatacttatatataaatttttaataggttgtagcgcaaaataatatatcactgactaacaaaataccataagaaatacttaccaacaacaggcataggatcaggaaagtcaagatcatggtcaacaccgacaagcccatatacataaggacttcctggatgtgcatgcctatatacagtacatgtcagacagacgaatgcaagaaaaaaaaagtttcagtgtattttcctagctaataagataatgaatattgcagcttgtttaatcagaaaattccaggttctatcatattacataccctgaaataaatcgacctttacgggagcgtgctggtgttggcccctgaacttcctccacaatacactacagtgaagaaaaaaacatgcagtaatttttatttaacatgcttgagggacatggtaaatggtaaggaattatttttctcaactcaccactgaataaccattgcgtgtcaggtcatccaaagtctgtcgaagattctgtagaaagaaaacaagaatttgtggcaaagaaaaaattaattgtagacaacgaaagcctgaagggaagagtaatgatgattaattgcagcagaacatatgcttgctatccaacaaaaagcaccacaacttgattccgtgtacgcaatggccactaaagtagctgtttatgtaacttgcccaagttctgcctcaatgattacaactctcagagactaaatagaatcaaaaaagattataactttactacaagcaaagattaagaagctataatggctgtgtatatttatttgcccccttaagaagatgtggctctcctcttgtttaacagtaattttctcaacacaataccagagacgaattagtctattttatcataggaacaaattataaacttgaatcacataaatgctcataatgtgagtaagcttgaaattcaaaaaggattgtgtaccataattgggcagccagcctttggaatactatctgatcgaagaccaccaaaaggattgagaccagcatattcaacaagtatacaagcatctattccaatagcctcataaaattctcctacctggagaaacaaatttcagaacagtaacagtcttcataagataaagacttcaaatgacattattctgctaatttttgttctgaagtaacaaagatcacaaaactcaatggaattagaaaaacaacaaacatactctgcagagcaaaacttcgcgtggaaaccttgacttaaactgcaacatctcccagttgaggtttccatcttttaaactgaaatgaagaaaattccaaatattgcatacataaaggccacaaagttaccgtaacaaactggactaaagtagtggactaggaataaaactaatggattgtttccaactaaagtacttagagccttcacaactaaagtagcttaagtcatactaagatacactagctacttttcatttgataaccaagctaaaaatgattaaaggctgacatctagaaggtgagatgaaatcttctaatagtctcagaagagaactgaccttccattcctcaagctagggtccaaaccaagtaaattggtgtacataagcctttcaataagctgaagagtagatggtttcttacatgtctgcaatctctgagtagacacagaatataaaaaatcagtatataacgaaacaatatcaagacttgaaatttcttaaccaaaaaacaaaacaagctttacctccttccaccaaaccaaatgagagagatctttgtcagtgagaacatcacttgacgtcttcactttcttagaagccgttgtgattcttttcaaagactttccatctctgagacaagatatcccctcagagtaccttctattactgtcaacacataacaaaatacaaaaaaagtttcataacaagattcttatcaagaactagaccaaacaccaaaatcaaagaaattgagttcaatattcaaaagtacaggaattcataaaatacaaaaaatctgaacttgctaacatattagagaagattatacaaggagatgagaggattacagtagaattggggaggagggtttgagggaagagtaagtgcgatatgaggagcggaagaagaaccgccattttgggaatgaaacgacggcgtttctggtagcaatccaatgcatctctctcacactctgaagaagaagaagaagaagaagtagagttttcacctttcaccctttttctagggcttcttttcccgccagaagacgacgactatgcaattcacaatctcacagtcctctaatggaaaacatgttttctcttctcttcttgtcttcttagtttaaaggtaattaggattttagccttttaaaaagagtaatttctcatttgctccctataatgtttcaaattacattcttgttcattaatttaccaaaattaatcatcggctagttttgtatctttttggaatgtctaacaaagaacccatctctatgaacacatctctaatctctcagttttgtttgtaaagattgtaatttctctgcttttcaaagaggatcaaaagttttgtaattagaaatcttaaaatgactatcagttgtttctgaattctatacaaacttaatactctaatgagtattaataataagaaaacaaaaccactaaatgtctagactcagtgcagtgtgtgagtgtgtgtgtttgtttggcacaacaaatacgaaacatctagaattacataagaatttgtggtgagtcaatggatttatcagataggcatgcacaaagtgtttcaccaatggctattttgcatgttgtgtctgcttctttaactgaactaagtacaaatcacaaatatccaatcacatttcatcttctcccttaacaaagactccataaagaaaagagaagaaaagactcataaacagagaaaaaaatggcaggagagagatcaaagttaacaacaaaccacttttataatcatcagattattctttgttactttcttatcatctcacaagtttccattgcctcaagcaacacgagtaatgtaggagttaactggggaataatggcgagtcaccagcttccaccagaaaaggttgtgaagatgctaatggacaatagtttcactaagctgaaactatttgaagccgaccaaaacatcttagacgctctaattggctcagacattgaagtcatgataggaataccaaaccggtttcttaaagaaatggctcaagatacatctgtagcagcttcatgggttgaagaaaacgttactgcttattcttacaacggtggagtcaacatcaagtacatagctgttggaaacgagcctttccttcagacatataatggaacttacgttgagttcacattaccagctcttatcaacatccaacgagcactagaggaagctgatctgaaaaatgtgaaagtcactgttcctttcaacgcagacatctatttttcccctgaagcgaaccctgttccatcagctggagactttagacctgagctaagggatgcaacgattgagataatcaatttcttgtattcacatgattcgcctttcacggttaacatatacccttttcttagtctctatggaaatgcttactttcctttggattttgccttctttgatgggactaacaagtctttgagagatggaaatttggtctacaccaatgtgtttgatgcgaatctcgacactttgatttgtgctatggagagatatagcttcttggggatgaagatcattgtaggagaggtcgggtggcctacggatggagacaagaacgctaatgtaaagagtgcaaagagattcaatcagggaatggtaaagcatgctatgtctggaaatggaacgcctgcgaggaaaggagtgattatggatgtttaccttttcagccttgttgatgaggacgccaagagtatagcaccggggacttttgagaggcactgggggatctttgagtttgatgggagaccgaaatatgagcttgacttgtcaggtaaaggaaatgacaagcctttggttcctgtggaagatgtgaagtatctgcccaaaacttggtgtattcttgaccctaatgcatataacctcgatgacttgcctgataatatcgactatgcttgtagtttgtctgattgcacagcactcgggtatggatcctcttgtaaccatctcactgctacaggaaatgtttcatatgcctttaatatgtattatcagatgcacgatcagaaaacatgggactgcgatttcttggggttgggtttgatcacagatgaagatccatctgatgaactttgcgagttccctgtaatgattgatacaggagattcaacgaggttgcagcctggatcttcaagagtgttgaccagagtcgcagccgcggttttagttatgttggtccttcccatcttgtagtaagtacctgttgtttgttatgtcttgtaaatctctcaagttttacttcctgcaaaagaatctttcaaactaaaggttgttcccttcgattagcatagccttggaaaatacacaacttcattaactagaagaaattgaatcacagaattacatattactagagtgatctgttccaaagctggaagttaagtaatataaacacctagagtctcagagtgggattaacagagagaaatgatatttcaatcagaagaagctggtattcatgtcagatttctttgggtgataaagtatcttctcaaatatgtgtttcagcttctcgtgccgaaccatctcgtcgaggattctatctttggaaacaacttcgttgttaatcggcttgtccttctcattggtagaagagaagaccagttcggatatgcgatgtttctcactttgcttacagtacttgttccactcagatgtgtctttgaccatgagatggtaaatgaacacagcacgcttttgaccaattctgaaagctcgacttatggcttggctttcaacagaagggttccaaacaacatcaagaatcacaactcttgaagcgccaacaagactgataccctcagaacatgcttttgttgatgccagtagaactttagatccactgtctggtttgttgaagttgtcgatcatatgctgcctgtctctttgttcaactttaccatgcatcaagagaatttgttccccttcagtccagtcacattctgcaatgagctgctccatgatcagcttcagagtgtcaatatattggctatacaccaacactttctctttcacggttccactgatgcggatgaagtcgataaggaactttgttttcacaccttcctcgtatttaagtctaagcctcttgagagttcctaatgttgctggcccaataaccaagtcttccttcttggtcggattgcagcacaaatacagagatgggtgtactgaaacagctgaaagcttgtgctcaaattcaaatgtgttttgagaagtgtcaattctgtcaagaattttcttctgttgaaaaggcgggttcaacacgacaacacagtctcttagacctggaaggctttcttgaaggatggttccttcatggacatgcacaaaatgagcaatcatagccttaagatccacaattctgttttcctcattcacccttccgtgttctccttcttggctacacttgctaagttcatgtatcctcgaagaaatcgtatctttatcagctggtcttgccaggcataagacgttagaaagttccttgaaattattctggaacagtgtccctgaaagaaagatacgcttttctgttctgacttcagtaagcactttccaaatgagactactctggtttctcggggtgtggccctcgtcaaggaccagcaaccccggcaattctaccaacatcctcctaaacacttgcattccttcagtgttcttatttgccgcgagcttctcatacagagggtagctaattccaagaatgcttttctgcttccaccacgaaactagcttaaccatacggatggaattatgatgcctatttccctctaaacgtgagacagcttcagcatcctcataccctgataactgcagactattcatgttataaaatggaatgtttacgttccatttcctgacttcgtcttcccaagtacgcattagagttgcaggagctatgaccataggatggctatttggaaaccgttttaagtatgactgaagaaaaacgacggtcaaacgtgtcttaccagttccagccttatgcgaaataatgcatccgccacttcccttaacccctacgctgttcaactcattaatttttgttgtcccagctaaattcttccaaataaattcaaacccttcttgttggtgtgggtacaaagtatctttgatgccagggacgtattgccagacagttccttctatattatccaaaggggcgacaaaactgctgggatctgaagcatcaaactcaagcctgttaggtaaagggtcaccctttctatcactacatttcttattgtcattaacactaggacgatacttgtcctgcacaatgcaggaaaatgaacatgttaagaactcagataagaaaatcaacaaatagtacaactcaatctaggatttcagagcgctataaaaatgttaccatggctggtgagatgtctttgatctcgacagccacatacgcacagtggacgcatttcaaaccgatttcatcatccaggacaaagtcgtgtgtccctttgctacatagcatatctccattctaatacatcagagagcaagtaatttaatttcatggtgaatcaatgatacaaaaaaaaaaggtggagatacgaaccaaaaagcacgcaacaagattgtcaggcatagcctgggcaatatagaagaattagtagtcttactttatcaggggtagatgagtgcattccttccaatgttagagcaacgttcatatcttcccacaagctgtctaattctttctcctcttctgttttctcgataagcacaggctcctcgcagccaaatctcaagtttaaaggaggtgaatcttctgtcgagtagtttattgtctcttctccatcacagagtttttcgccaccataaaaactctcaccattcaagtggttcttctccctcaccctatggaaactcctccgttcccttggtttcccatgttcatttaccttctcacttgagctctccctaactacaggatcttctctagaatcaacctctgctattttgtcccaggagaaaatatcttccttgaaaacgtctttgctctccaacatagatttagctagcaggttaattacatcgaagttatgcttcctacgaaaagtcctcgacttcttatgatggtatactttttcacttgggttcttttcgcatgtagcatcgtctctggtaccaccctcttcatcctcagaacaaacgaaatcactatcagagctctctacatcagaagaatctgaactttcccccacgtaatcagatgagtcagaatcattagcatcttcatccatatcactctcaccagaatctctatcttcgccactaacttcctctcttgaatcagtccctaattcctctaaagggtcttcctcatcatcagaactagaacttagacttacaacctcatcagacacataagtcttctcctcacccctcaaattagcatcatccagaagaatatcacaaacctcagaaccagcattgacatcctcgacatgctgattctctcccgcgatagttccaaggaaaacaacatcatcatcatcatccggagataaagggttctctttaccactcactttagcatcatcctcatcaaaatcacaaaccctaggagaaatcaccgaagcagaaccaacattgtcatcatcctctacatgatcattctctctctgaacagttccaacgaaaacaacatcatcatcatcatctatagggttaaaattagaagctttctcttcacatcccaaattacgatcatcagcatcaaaatcacaaaccctatcaccaaaatcaaacgatttcgattgtaaattcccagaagtagaaccaacattctcatcatctcgcttaccttcaggatattcagttctaacaaatacaacatcgtcgtcatcatccttcctccgccgtcgtttcttcttcctcggagaaggtgaacaagcatcacgcatgttaactctcctcttctcagtcctcgaatttacacaacccagagactgatcttcttcttctccagaaatcccctttgatttattgagaatcgagttcaagtaagattcagtcctcgaacgagttcttctagcaacacaactagtcatatccatggctgaagagagaaatcgaaaaccctagaatagtggatttgacgaagaaggaagaaagctcatgtcctctctcctctgttgtctctgcaaatttttttttttttgcctttggcggtaacgattcaactttctcgaaacattcaataaaaaaggtttttttttgtttgtttctttattagggtaaattgtaatatttgaaaagatgaggggctaagtgaaaattaatagataagtttgcttcatttctattggtgggaattgattgacatgagagtttcaaagttaaaggtggatgttactggttctgtcagtagatagaggtatttaataggggtcaaaatattagtggaaaaatgaaaagcttttagtatttcaaatatattttacaaattggttactaattttttttgttgtaatggtgctggtaaggacaaaaattctattatttgcttaggattctctcctttatgttttgatgtgagtatgtgactaatatttctgcaaacgatttagtgttgggttattagagaaagatatcttctggagaacgaaaatctggaggtgagatcattgctgatttgaattgtaaattttttatgaaaattttgtggtaatcaaatctaatggcgaaaattcatagacagagtcactcacagagatatgcaatttatacaacttttacgattatatattttttgcggtttaatctatcaaaacatgtattataacttaaatagaagattattattatttgtttgtttcaaaaataaaaagagtttgcggaataattagtagaacatgttagagttaatataaatatgatagagaatgagttaaatagaatgttaactttgacacttctaaatttataattacagtaataaattatacataccagaggctatatataaaaatactaaaaaaataaattatatcactttaatacttatttaaaatgtgtaacaatctaaaaaaatggtctggtagtatattacgaattaaattttattagttatataaaaaaaaatatgatgaagaggctcaattcctcaaagcaatttatgtgagagttcaattattattagatttctaaaattatatttttgagattggatttctaaagttctatttttgagtttgaactttcaacgagttataaaattggaaatacaaaatcttatggaatcgaattatctaaccgggtttaggttccaccgatcagactaatcggatcagctcaagttctaaaatatgtaaaagctcgtaacgagaactttcaaatttggggcaaaaaaacatgaactttctaaatgtcatttaaatctcaaagtttggtttgactttataataaaatggttaagttttgttgaccgagtcattttaggcatgtcgttaaatttttgttaattaaaagatgaccgagttaacttttcataatgtttgggtttagaacgataccttatatgtatttagaaagatacctcataagctttctgataccctacgttgtgatggtttttctctttaatgacatcatatatgtatataagatttatttatttcccaaacgaaaaattaactctgtcgtctttttattaacggaaatttatcgatatgcctataatgattcaatcaacgaaatttactattttattataaagtcaaaccaaaatttaagattttattaacattttgaaaattcatgtttttatgtcccaaatttgaaagtttgcaaaaaaattttgacatttttcccgatctaaatttaccatttaaacaataaaaagtaaaaggtcaaaatgtaacattttagaaacacaaaggacaaaatgataaatatcatgccaacgcgttgatcggtttttagctcttttcttccgatttcgttttttctttcttcatctctaagattaagcacaccttggcatccattttcgtttgaatctcaacgttttttgcttgattttagcttctgagagagtccagatccaaggaattggaggaagaataatgtcggcaaggcatgggcaatcgtcgtatcgagatcggagtgacgaattcttcaaaattgtggagactctaaggagatcgattgctccggctccggcggcgaataatgtgccgtatggtaataatcggaacgatggtgcgagaagagaggatcttatcaacaaatccgagttcaacaagagagcttctcatattggtttagctattaatcaaacgtcgcagaagctatcgaagcttgcgaaacgtaagttgttttagtgtttagctcatttgatttggtgagatcttgtgaatctggattagttaacctgtaatggctttagcttaggaattagaatggtgcttagatcgagaaccgatttatttagtggtgtgaatttctcaagtgcttatcttagtactcgagaatgtgtaattggtatggaagatgctgtattttgtgcataattgttaactttgtcgtttttgttgcaaatcagttgcaaagaggacatcagtgtttgatgatcctactcaggagatacaagagctgacggtagtcatcaagcaagagatctctgctctaaattctgctctggtcgaccttcaattgttccgcagttctcagaatgatgaagggaataactctagagacagggacaaaagtactcactcagcaactgttgttgacgatctaaagtatcgtttgatggatactaccaaagagtttaaggatgttcttaccatgagaaccgaggttttttctttgttccgtcgatttcttttcgataaagcttgagtatgcagtcgtgactgagctatgatttacttgtctggtgttgcagaatatgaaggtccatgaaagtagaaggcaactcttctcttcaaatgcttcaaaagaatcaacaaacccattcgttcgccagcgtcctttggctgctaaggctgctgctagtgaatctgttcctcttccatgggcaaatgggtcttcttcatcttcatctcagttagtcccatggtaaagtactattaaccgaataaccacagttgcaaatacagcatacttcttgaaatctggctaagaatttggtctaatgggagtccagaaagttgtcatgggtttactagaatgttttctgtaccatgtcagtcgttgctgatttaagatctggcttgtcaagaactcaagacgtttcataatctctgcttttacaggaagccgggagagggagaatcttcaccattgttgcagcagagtcaacaacaacagcaacagcaacagcaacaaatggtcccattgcaagacacatatatgcagggtcgagcagaagctctacacaccgttgaatcaacaatccatgagctaagcagtatcttcacacaactagcaaccatggtttctcaacaaggggaaattgcaatcaggttcgtcttcctcctgaggaaaaacatcaatatgtgttataatgtccaatgattcatagaacatttgtggaaaggaagtataatataatgttgctggtttatacaggatcgatcaaaacatggaagatacattagcaaatgtggaaggcgcacagagccaactggccaggtatctcaacagtatatcatcaaaccgatggctaatgatgaagattttcttcgtactcattgcatttctcatgattttcctcttcttcgtggcataaacattgagactaaaaattgattttaaagagtttcaacatctagacatggttcttttgtcctatcgtatcttattgacatgtaaagacttaagagaaaaaagggatcttatgctctgttcagattaatggagagatatataatgtcactttcatgtaaaattgctttcaagttttccaaacaaatttttgtgattctgcttctcttttcattaccactgccaaccattaggaattgtttcttattccatttgtacttcatttattatgtaaagacaaaaaaaataatttcattaccgtgtttatatatttatttgtttgtaagttaatcaatctacgacttgaaaatttgataaatatatgggatatgttcaaaagctgcaacacaataatcaccaattcatgatctaagcaatatctctgttgtttggttcatacgtttagctcttcaaattcaggacttaatggcataaagagcgcgtccacttcggtttcatctacttcgtctaagctcgctggtttccatttcggattctgcaacaaaaaacacactcatgaataagcttatagtaggcactacagagacgaaagagtgtgaaatgcagtgagtaggaagataaaaatgacagagacattcttgattttataaactatgttcatctttgacgtgtgatatatatatactcagcttcatgtttttgacccaactcaagaaattagaaagcacacaaaaaccaattgacagaatgaactaaatcattaaacattgagtggcaatgaacaaaaacctggtccttgtcagtcaagactgctctaacaccttcagtgaaatcactgcgcaatgcagatcttagagcaatgcggtactcagttatcatcacaccgttaagcttcaaaatggaaagaatagtaagcattacgaaggaaaaactcgtaatttatcggatacaaagcgtttgaactcactgttgccatggcgttgttggttttacccttggcacaagcaactttggagaagtacttgtgtgttaggtaaagagaaaaaggtgcccctttttcaatgccttggactgcttcattagcccattctgcaactgtacgcaaacattgtgtccaaatttctcagacacaagacaacgatttcaatttcattaatgtaaacagcaactaacagtagtctttcttagaaatcaagattggtaacatacaagcacaaagggtttggtatttcaatataaaaggcagaaaagaagtttctttgtcgaaaccttaagagactaatgcatatcatacctgaagcctcactgctctgctggaactttttcagctcttctattgtttccttaacagacttacttacactaaaagctgattctatctgaggcaaaagcatttggaggtgggactcagtttcaggatcactgctgtaatttgataaagttgcttggatgtgttgttggggatccttggaactgtattaccaacacaaattctttcttagagactaaacaaagtaatactaaaagctcctatatttgaaatatacacatgaaatatatcgaacaaagtattatacgagggcctacaggtcagctgacaaaatggcttctctgagtgaacctagctttccagatggtacataatgtgtcccaagacccacaaacagtgcatctgaaggtgtggaaatccttctcccagtcatacctaggtaagcacctgcagaatttgaaggttgaaaagttgctggtggataatgatactacagcaaattgttatgcaaattgttgagggtctcagctatatgaaacataccaacagatccttcgccagggctatgagctgcaatatatgaaaatccaacatctggaaacaagccgattccattttctggcattgcgaggaccgtcctctggaaatggagaacaaaacagtgacagaggtaagaaatgcatgataaatgccatccacacaacagtacataacaagggtttactatgtgcacctctgttatcactcggtagcgtccatgtccagaaagaccaagaccaaatcccattgttatgccatccattaaagagatatatggttttctgtatccagcaatcttgcatatcaggctatactcagctgtaaatacctaaaaggaagcaaagttatgaaattaggacatcataaacaagaaacatacattttgaagggtaatcaaatgaactaaagcaattgatggtgaataaaaattgtaagacactgaaggtgactacttcaaagaagggcagatccaagcaaaaaaagagaaagcatggagtaaatctctagaatcctagactaaagagtgttaccacacagattattttgatcaacagaaataaagaatagaccacctaacatcatcaaactagaagtttcctactacttcaagtacattcagtagaagtagtatttctctatttctgtttcagtaatcatcatatcctgacttatgggggaaacaattgcacaaccagacctctatcatatctgacaattgatttttggatgtaatctgcttcacatcaccgcctgcagataaactaagaccatggttataaaaatttctatccagtgtgaatttgataaagaaaactcctttgatgcaagaaagggaaacccaaaaaacctcacatagaacaaaacacagagtacaaaaataccaaagagttgcaaaatgacattttgtatgtttaaagaaagagataagccttgatacagccaataacacacaattcatataaaaaccttttgcacaagagacgtatttttgtccattaggatctctgcaacaactcctttaatatccattcctgcaccattcataaatggtcactctaaaaccttcccatggcattaaccaagaccaaatgttttctataagataagataagatcagatgcaacatactttcaacaaatttatcctacaatcttagaaaccagaatccactatataagcacactcaagaaaagtttcttttacctgcacaaaaggcccgagatgtgcttccttcgacgacaacacatttgactccaggatcatattcccattcatcaagcaagcttttgtacttcaaatccatttctgtaaaaaaaaaatcttcaataattgaacttgggttgtgaaaaagcttaattctttatgaaaacggacctagattcatggcgttgagagctttaggtcgatcaagagtaatgagagcaacgccatttggataaacatttcctttcacgaactcgtcgcttccactggccattactgagaatttccgacgatgagatacagagagctttgagaagggaataagaaaagatggagaggttctagagaagaagatgcgagcagaagccagagataaactcttgatcatcactgtgattcctaattccacgtttgtcggagaaaccaaacatctgtgactttgttttcttccaaccaccaaaagtactctgtgtcagtttaagggtccactaatctggagatatgtcgttcggctcaatacaaaaagcccaatagtgaccaataacagagttttgtttaagggtaaattgcaggccacatccgttgaccatgttttatttccatggattgtcaaagtcaaatgtggttttcaccatttgtcttttcgcctgcaaaataacgcttctgcccttgcgcttctctcttagcaactgttgaaatgtacggtttagtttagcaggtttagttacgtacactgttccggttcagttgaagattttttgttcacgttgacgcgattcggttccgttacaagtgagattattccgaagtgacatcaacatttaatgcccccaaaaagtttagatgtgactattgtcacaattaatgcaaaatcatcattacatcaaataatattaaaaaaattattaataataataaaaaaaaaatttgttgagataaagaagatgaacccaggaacaaagaattattgcgaacgtacattgctgctgaagaagtgttgatcttgtttttgtaccaagtttggagcattgctcgtgtaagtaatgaagttcttttaagaagttttttttatgtcatattaggatcttgattgtgttcgaactccatttttttatcagaatatttgcaaaatctatatttgtttgtttaaaatagtcaaatgataattggtatttaggtttataaatgtgtagtatcgacattccatttgttttttatatgtatagtatttttcagttgcatttaatgtgtgtctcctgaatttatgatgcaggtgggttacggatattcccgtatttaccatggtcggtgagtggaaatgcaaagaaggagaatggaaatttgaacctgaggaaggcatctttggtcgttgtgtacgcgttcaggaaaccatgacgtacacggactttgtccgtacactccgagaggctttcagtttgaagtccaccgagatcaatcccataattagctactggatgccgggtgaaatgtcagtgctgatagatactaaacgccctcctgtatacattgacagtcagatgggtctcgagacgttttttttggttcgtggtgggtatctttctctcaacttgttcgtctctttcaataatacagtgaaggcgttcgggaatactgtctctaggtctcatggtgaagtttctgaaagtgaccgtgtgtttgacagtgctacaaatgttgatgaaaataatgaggatgcagaggagcaagccgatgttgaagacgatacaacagaagaggatgaattggaggagggcaacgaagatgatgatgggtgtgatgattatcttggtgtggatggatctattgggggaagtaccctgtatcctaccacagacggtagtgaaggtattggcgaagaatacgattacaacaagaggaacgatgtaatagtagaagaatatgtacaaggaaatcttgaggaagacgtcagtctcactcaacagactgctcaacatccagggaaattcagtcgtttattggaaacgtgtacgtacacgggtgttagtgtacctggcggagatacaggggaattcagtcgtctcttggaaacgtgtacgtacactggtcttagtgtacctggcgaagaaacaatctctccattgggttacggtacacgctgcgaagggcaaagggattccaatcttatttgtatagacgaagtcaccggggatgaagtgatcgaaggtattggagcttcctcaactgggacacaaaatgataatggggtagttaccgcagctgaggcctaccaagtgtataatgaatttcctaagttacatggtggcgagttggcgaatctcggtaacgatgctgctcctgtgttcgatgacttactcaattttcgagctgatgagacacaggttgaaatcagcaccacaggcgaaactttgtttgttggaagtgtttttaagaatagaaaagtcctgcaacaaacaatgtctcttcaagcgataaagcaatgcttttgcttcaagcaacctaagtcatgtcctaaaacattgaagatggtgtgcgttgatgagacttgtcaatggcaattgactgctcgcgtcgtgaaggattcagaaagtttcaaaatcacttcgtatgctacgacacatacgtgtaacatcgactctcggaagaactacaataaacatgctaattataagctcctcggagaagttgtgaggagcagatacagttctacgcagggtgagccgcgagctgtcgacttaccacagctgctcctaaatgatctgaatgtgcgtattttgtattctaccgcttggagagcaaaagaggttgcagtggaaaatgtacggggggatgagatagcaaattacaggtttttgccgacctatctgtatcttctccaattagctaatccgggtacaataacacacctacactatacaccagaagatgatggtaagcagcgcttcaagtatgtctttgtctctcttggcgcttctatcaaaggtctgatatatatgaggaaggtagttgtggtagatggaacgcagctagtcggaccttacaaaggatgtctccttattgcatgtgcccaagatgggaacttccaaatattcccaatagcttttggtgttgttgatggtgagaccgatgcttcttgggcatggttttttgaaaagttagctgagattgttccagacagtgacgatttaatgattgtctcggacagacattcatctatatacaaaggcctaagtgttgtttacccgagagcgcatcatggagcatgtgctgttcaccttgagcgaaacctctccacctattatggtaagtttggtgtgtctgctttatttttcagcgctgccaaagcttatagggtcagggatttcgagaaatattttgaactgttaagggaaaagagtgctaaatgcgcaaaatacctagaggacataggatttgagcattggacaagagctcactgtagaggagaacgctacaatatcatgtctagcaacaactctgagtccatgaatcatgtgttaacaaaagtaaaaacttatccgattgtttacatgatcgagttcattcgggatgtcctaatgcgatggttcgcatcgaggaggaagaaagttgctaggtgcaaatcttctgtgacacctgaggttgatgagagatttctacaagagttgcctgcgtcaggtaaatacgctgtgaagatgtctggaccgtggagctatcaagtgacaagtaaatccggggagcattttcatgtcgttctggaccagtgtacgtgtacgtgtcttaggtacaccaagttatgaatcccatgtgaacacgctctagcagctgcaatcgagcatggaattgatccgaagtcttgtgtcggatggtggtatggccttcaaacgttttctgattctttccaagaaccaattctacctatcgcggatccgaaagatgttgtcatcccacaacatatagtggatttgatactcattcctccatacagtagacgcccaccaggaagaccactgtccaaaaggatcccatctagaggtgaaaaccgggtatgtactaacatcgttcattcatctacttgtattttgagtattaccatgcggagatttgtaacttcctgtctttgtcacttcagaaaagcaggtcataacaagaagacgtgcaaaaatccaatctagttccggtgacaagtttctgagccggccaatatagtgtacgcttctgtgttttctcggtgtacgtaagtttatatataatccacctgtaactatgtacgttgtgtacgtacgtttaaactctacgttcgtataactatgaacgtttttgtctgtgtacgtgttaaagttcatgtaataagggtacacagaggtggttgctcaatattttgagtaatttgaaataagttttttgaaaatctaacttattccccctcttaaatgaacggagttggagacatggttgggtatattgtggttgtgttggtatttaatggaaaggacgtaactgttgctgtttattgtcaaatcaacgttatgattaccctatatgacggttaccaggctattaccaaaaatttgaatcaagtgtagttgtagccgcattaataactgtagccgttccagatttcctctatttaagtctcctcccttccttaattttatccacaatcttcattctaaacccatttcttgtgccggcagttatatcattcacaaaaaaaaatttagtctttcgaatcgcttgttcttgctatccgtgagatggaggggtttcatacggtctcagaattgtgtcctctgatcactgggtggcgaatttatgtctttgtcgtgagggtcttcaagaaggttatatcgcccaacgtcttcgaactcggccttatcctggcagattacgaggttatttccgttaaatcattatgtgtttttctcgttcattcgcttaacttatatattaaactctctactatcatgttctgtatgtaaagaataaccgtattgaggccaccgttgatcgtcgccttgctccgttttacgaagaccgattcgttgaaaatgagtggaagacgatcacctctttcttggtctgtaagtcaactgacttagtcagagcaacaaagcatgaatacggcatactgtttatggatcagatcgtcgtcgttcatgccccaccgagatcaccaccagttccagatttcgatttcactcccttcgactacattttggataaatctgcttacaagaacgttttagtcggtgaggaggaataactctgacgcttcatttattacatttttgaaaatgtttgtttattatctttgtttctccatcatctagatgtcattggagcgttggttgatgttggcgcattgactacagactattacggtctcaaactgagtttcaagttaaaagatagatagtaagtgttcttttcatttgttttatttacaatgtcactctaaacgctaacagtccttatttctaacgtagcaatgaagtcttggagtgcgaagcccgcaatcaacatgcggagtacttggatggttacttttagagtttgggtaaaggaaattttgttgtcgcactcagcttttggcgtctaaccgaactgtctaacccgaagcttgagagccatggtgctatttcaaaggtggttgccaatccggacagagcagaagttgcggatatctcgatggtggttttttagctagagggaatgaaccattattctccgttttaatataatataagactacagttcaattaagttttctttcccagttgttgttgttgtttccataagaaccaaactacatttcagtcgttgttgtttcttgtttccgtttaaattttaatctaatttattgttttatgtacgtgccttgttttattgttcaaatcctctcgcaatgtacgtatagtttctggtgtacgctatcgtgtacgtatattagttttggtgccttcaacatcaaaaactgttagatttatacttatgttgtgtacgcaatttcccaatgtacgataaacgaagtttaatatactatatagtgtacgtacacgaagacatctagtaatacttaaagtggtaattcattcaaaagccagaaacataaaaaaggacaggcagtttatataaagggaaattcataagataagataaataaactggaacgattcaaaaaacataattttttaaacgaagcatacacatgtgttgcaaaatatgtgtgcatccgtcataccaaaagactcgagagtagagccgagtagagtagcttagaccttagcagctttgcttctagtagaatatagccatctccctggcgtaccagtagaaaaaacaaaccctgcagccatgatggaacgtgcattaccctacgcaactcggcgggtggacaaacctccaagacctttcccagcggcgagcattttcagtgtgaagctggctgatgtgatacatcaccatctctgcaaccgcgtggccagcttcaagggtgggtgtcatttcccagaacttttcgctgatagggaggaaatccaagtgattaccggtacacgtaaggaacaaaccggttgcgaagcaagcaaagggatcagataaagcgacggttgtcatgactgaaaggccctgagctactgtcacgaagttgctcgcttggcgaacaccttcaaggtaaaccgccgggatggatccacgttctacaagcacctcgaagtatggccagaagggagaccccggttggagtaacgacggccacgtcatgaattcatcgattgcaagggtgttgatgtcagaactgtagactaagttccttagcgtctctatgggagtctggctgacggggaggtagttgacaagtatgcttatggggtttggcaattggattcctaggtacaactcggttggaggggttagcggaggtaggaaaggcattgtttttcaaacgaggaggtctagacggatttgtgtattcaactaagtgtgtttgtcatgagttttaaagaggagaataaccatcaatgtaagtgggtgggtgacgtggatgtatatttagtgcatcatattagtaacttttaatttaaacaaattcctgtgtacctctcataatcgcgccgtgtacgtctacaaaatactcattacgttctctgacagaaggttgagttgacgtctgtttgtatggcatataagtggaacaatatggcttcatgtatagtgctatattaggggtcaacgcatttactaacaatcttttcaaataaacattaacttacttattttatctgccaaatcaattgagtacattgctcggtaaccgtgtacgtctaatagagatattaatgagagtgtgatggaggtcacttctagagtgtatttgacagcgagtaattaatttggagcgaaatcttctatatatgggttatacgacgtcaaacaaatttccttttgtcttcatttacaaatatcgtcgctcactatgtaatctttatagttggaattaaactatgccacgtgtacattatcatatatcgtgtacgtagatattttattattttattattttaatgatgtctcatattagagtactttgagctagtatgtttcaatcaattacaaagtggtaatttaattaaaaacaaacttccattactgataatcaacgtaaaaagctcacatattgttgcatggaaaacttataaatatgacaggatcgtggcgaatgtgagctctacaggatctggctaatccgtttagcacacaaccagatgtaacattggttgcaaagattattgaagagtctcgatctaatgtaacacacctccgcgcattcaggagtgcttacgtcaacacattccgggaacgaaaaactgttagcgtatgtgtattttaaagtattaccatatttctttatatcttttagcacctcctcacaaatgtcacgtgcgtcctccgattccaaagcataatggttgcttccgaagagccgaaggtagacaccacccatgtgagcattaccagcacatatgtaaagaattgcgcatgcaagggttgcagcggcgttccttggggcgattcgctctaagtgtaggatagctccctggatgtcagactcatgtgtaacgagacgcagtccttcatggtaaatagccgtggggttaccagcttgtaagcaccgttgaaagaaggatctatagcgatcttcggagttgatgtcatttggatcgtggcctgccgcgtagaagtcatcgggatcgtcgcacatgctgaaaatgtttgcatttttgaggacatccggacggtagacaatgtctcttccacgaggaccggattttaacataggtccgaggtaccaccaacatttgtcagccattttcttggctatcttcgcaagcaaatcgtcaggaatatttgggtttgtcatatttaggagtaaggtgtttcgagaaaatgaaatttgaacacttaaataagcatcattgaagatatggttgggtaagttatggttgtatttattgcaaaggtattaagtgattatgtgtattcatattgtcaaatcaaagtaatagtattccatatataatttgttatcgttgttatgagcaacctctttttaataacagcttaaaactagacgtgtacgttttactgacggtcttagtgtacgtccacatttacatttctacatttactcaacaaacagtgtacgttgtagtgtatgttttagtgaacgtccacatttacatttctacatttgcccaacaaacagtgtacgttgtagtgtacgtttaagtgtacgtccacatttacatttctacatttgcccaacaaacagtgtacgttgtagtgtacgttttagtgtacgtccatatttacatttctacatttactcaacagacagtgtacgctgtagtgtactattagtgtacgtccattcataaatatcaccatttatgagacaaaccaaagacctcatatgtttgcatgtgttattttttagtgtacgttagagttgatatctcatgctagtgaacgtccatatctagttttccgagacaaagaaaaaacctctaagtattatttggtagatgcacgtgtacggagttgtggacgcttagattttaatatccaaatttacatttactgcagtgtctaaatatcatatgtgaatttggcggaaaaatattcaacttgagaaacataacacaccttgcaaatttcttaagcaataatataatttcaacataaacataaacaatatagtagaaggcttatcataatttgaaacataacatagcggataacataaacaaacatataaagtagaatggaataactatagcatttgactaacacgcctggcacacgaccagaggtaacagcggttgcaaacgttttggaaagctcctgataccatgtaacaatataaggcgcaaggaggcatactaattccatggctggtaggataagagaacgtaggaccatatgtattgctgtatggagggtcaaacttctttatttcctcgatgaactcatcacccaaaactcgagtggcaaccgagtccaatggataatggttgcgggtgaagagctgtagaaacaagccgcccatataatcatacccagcacatatgaatacaatggcgcatgcaagtgttgcatttgctcgtactggagcatgacgctgtaagagcctgatggctccattgatgtttcgttcatgcgttagaacacgaataccttcgtaatacacggccgtgggattattagctgcaaaacaccttaagaaaaatgttcgatgtcggccttcatcagcggatccggagggattgtggcccctccagcttggaagtcatcgggcgagtcacacaaggtgagaatattggcatctttgaggacatccggacggtagacaatgtctcttccacgagtgccggctcgtaccaatggaccaaggtcggaccagcattggtcagccaggttcttagctatcttcgagagtaaatcgtcgggaagagtcgggttaaccatgtttgaaatgagatagtcagaggtcgtcagtaatttcttcactttaataaccactactgtgaatttggttggggcaattacggttgaaatgaatgtcatacttgtgttggtaagcgttggctgtcaaatcaatttatcacttgagttatgttataaagttaatatgcagtgtacgagacatatagatatgtacgtacacatttacattatgtaattataagtgaacgatgtgtacgacaatatgatagaggacaataaattaacttctgacaatctccaaattaaatgtagttgcaatcatatatataagtcaggtttgttcataataattggttgcaaagaaccagaatattgttcttggacgattaaaccaagtgcacagtaccggcctcccgcttgccgtgctcgtagatgtcaacagagtatttctgacggtagaagaccatatctgcttctcgaatggttgtcagatccgaaaaagggtgtccaaacgcaagcaactccaggaacttcatcgtgtatggcccgcaatctcttgtagttgggttttgagcaacggtaggacaacgcacatactcaaaaggttcaactgagtacggagaaatcaatacatcctggcacatcgctctgactaagtacggcatcatttcgcaaataggagtcattctcgccttcacagccgactcccacgtgtgcgatattaaagcgtcatacacagttattagccgttcattaaggttgattcccaaaacaacccaatgttcactcttccagttcatcggagcatacacaacatcgacatccttcatccactttatattgggttcacggtttatgtgaactccattagcaatgtcggatagtaatttaccccatttgaacccgttcttattaatacacttcttgaagtcgcccacccgcttggtaagaagatgcgtcagcatcatgtccaatacaatacatctgtttgctatcatctgttccccgttcttgtgccacatcaacattgccatcatttctaaatgctgaaatgttcaaaaaatatatcagtgtacgtacacttccacgaaaaatttaatcatctatgtacaatttataacaaggaatgtacgtatataaatgcaacgtaccgtactttcgacccattcaccaggtgttagaaggttcgcaaaaaagtcgttgggcacttttcgaaacccgaaaagagtgtgaatcctgtaaaatccagaaaaatatttgataacaaccttaaaaatgatgattgagatattaaataatccattttactataatgtacttacacagagggtcctttaatgatattgctgaattcctctacttttgaagggtcaaccacgtccagggggttgtatgagacatttccagccctgataacaacctctatctgttgagctggtacatcgggcaccaatactgtttttgccttaaaaccatgaggatgggcatcatcctgttcatagacaagttgtttcttcactttctttggggacgattttttttcttcttttgcttcgacagcagcagcattgtctgattcatcctgttaacaaatatgattgtcaacaacagtttcatacgtttttctatgtttaaaataggtacatacattatttttaggaatatcggtcttgtctgcttcatctgaccctgggttaggatcctcagtttctacagacccctcgacaatacacggctcttccatgactacctgtgcaagttaacgtacacaagtatatataatgtacacatataatcctatgtatgctattccgaaaataagaattgaaacacacaaattgttacctccaaatcagtggctgcagctaaatcacaaacggctttggtatccaactcccatatgacctgcataatataaattttatacatttgaacagtaaatagtacattttatttgttgcaagagttagcttacattgttaactacttgaaatggtgacgggggatcactgtgggtcttctatggtatttcaacttccatcattgtcactaatttggattctcctgccgcctcaacctgtagaatttagcatcggaaagaaactttttagtaatgtatgaaacaatatatatgtacacagaacatagtgacaaaaatgtacgtacacttgtggcaggtacgtgagctgtgtctccatcagaaggctcataagtttcttctgactcgctgccattagcttcagtcgatgcactggcatctcttgcttcttcctgaaacaaaaataatttgcaaagtcttatgggcgtacacatatggaaaaagaacaagtgtctaccatctctatgtcagcatcagctatttcatcggcccctgtatgggtaccaactaagccaggttcagcaacatcctttggtccattatcctgaaacataggctaccatagagttaagcgttagataagtgaagaaattaatgtaatagttatgcatatagtcatggaaatctgtatataacggttaccagaagatctacctctgaaactcttgcagacacattagatggaacttcttccatctcggtgtcaacagtagcttcttccacaggcctctcttcctgtgttacaaagacagtcccagacattgaacctaagcagacagtcttaccaacaacaatatttcctctatcctgaaacatagtttaactaacttcttaagcgaatatgtacgtacaccatttaaacagattgttaagagtattagtagacgacataccagatgggattgtgtggatccagcataaggaactattaaaaatccagtgtctaatatctcttcttcagcggcagaagaattcaatccatcatttgcagtaaaatcactttcattattagcgccatcctgtatcgaaccagacagtacagttatacatatggattataaaatatttagcaatgtacgtacatgacttacatgttcatcaatgaatccttgcatatcttccttattggaatcaggttcctcaatagtgtcaacagcaaaagaaacatttttcttcggctttgaaggttttcttcttccgcagtggtatgtactccagggacatccaaatcttcctctttggaattacagccaacagaaagtgcaggagtgtccacatcatgagaaacacgagtcaaccttgaagactttctcgttccagtgcttccttttgtagacatccttctcgatggcttcttcgcagtaaccggtgccttatccatagaaataggtggttcccgcgaatcatgggaaggtatggtttgttctggccttttgccttttggatcaagggcagcacgtatctggtcacggacaaagtctttcatatcttcatgcattggatacatttggtcttccagctccttcaaagacctcctcatttcaacaataaacctctcaggcacaggctctccaaaacaatcctcagcagtctcttctttatcacagtccatttcagatttctgttttttcataacaggttctttagggctcgggcccggtgcatttcgtttcctcttaacatctacaatagaccagttgctgctattaattggttttcttctaggtgcaataccaaaaaaatttgtaaaaaaaacatttatacttatacttacatgtctcttctagttgtggtgggcgcgactgctttggtactctagcatagcctccaacccattcatcctcctgccactggtgcccatctatcaacagtgcctcaatgtaatcaacccttggatcatcaacttcatcatcccatgaaagagatggaggacaaacattatcacctggtttcacaatatagttgacctcaacctacacaaataagtatgttaaccatagataatgtacatttacttattatgtacgtacatacacaatttaacacacctcatcagcagcctcacactccaaaatgcgagatgtccggattgctcgcagagaggcaagacgatggatagacctctcagcaaatgtcctgttaggtacatcatcaggtcctagcttagcaattgatgggattgtttcgaaagctaaaagctggagagctaatgggaaaccatggagtgcataagaccctacaagtataccccttattagtttctgagcatcgtaaggagtttggaaatttgctatcctccccaaagtacgggtaaaggacacccttccccatgggtatttgcagaaaaactccaggttcttagtagtctcgacagtcttcgaagtaggcctgttggggttactgtgggccgctaccacaccgtcaaccaaaataataagagatagtgccagttgcttccacccctccatgctttcctcctcctgcagccagctcaccaaatcagcaattgttggaaccgtgtccccaaacctctcatgaaacagagtcttccaaacactctcacactcaggtttcacactgataacatcatcaacgtctttcttcttgggatacttcccacattccagcccagttaagatactaaattctcttaatctaaatctgattggatgaccgccgaatacaatccacatctcattcaccttctttgtcactaactgacggcatattagtccaaggacaagcttagcattgaaagatgccttgtttttgggtattttaaaaagtttcccaaatggagaatcgagaagaaactgcatctctggtttcccctttagtacttttgctatgtgagaaatgtactccggtttagagtacgcgttcatcttcgtctcggaagggtaccggtctagagcaaagagtcttggtggtaactcttcaactgtaagatcttcagtcggagcaacacttggactacctgcaattaaaagtcatatactgttgagcaaacagaagtagtgtacgtacacagacattttctagattataactcaaaatcatatttttggcggaaacagagatttccaattctacttctcaatttttcatcctaaagatatgctaaattccgacaaattctaacactttaatcaaacaagctttacaattctgatacacccaaagacaacaaacggtaaattagagattctaacccagttcctccgttgcctttgtcgcagagcgttttctccgcggggaaactcttaatacacgcttctccttccctggaccatgctgcttcctcgggacttcgtcgttaactttattcccagccatagctaaagatgctatttcgccggaggttcaaatttcgccggaaaaaacagtaactttctcttggcttcgccgggaaaaacagtaactttctcttggtttcgccgggaaaaacagtaactttctcttggcttcgccgggaaaaacagtaactttctcttggcttcgccgggaaaaacagtaagtttcacttcatcggatgtgggagttcagtggcacaattcaactacccaacaattcgaagttatgtcgaattttgaagcaatggatactgaatttcgtttcgctttctgattctctctcaatctctccgttattctctttttcgttttctcggtttcttcgtttcagttttttttttttttgtctttttcaaaactgaaccgcatcaactaaaccgaaaccaactgctgtagggtttggtttacgccgtcaacttaaccgatacgaactgctgcacggtttggtttgtgccattattaagttttcccaaggtaatttggtccgaaattgaatgaaaagacaaaacgtgaaaaccagttctcactttgacaaacggtgagagcaaatcttttttcgtccacttttgtgaaaatttctttttgtttaattgatgattgaaaagaaaacggcacaaaccaaacctcaatctttgttttttcctcaatgtgagtattattattagcatcacatcttctatggaaagataccaaagaatgaaaaaaaatatatatacaaaatcatataagtgtatcatatatagatcgtagttcaatagagttaaaacatttcctcaaatctttacagttaaaaagaagaattcaaaaaaaaaaaaacatgtaatttcttgcatctttaaccataaccttgaccgggtcttttaatattgccggtcgcctttccctgtgtggtctgaccgtcagtgctcgaccaggacgggtacaaatcatattcactaattgggttactatataaatcttgagtctcaagtcccactttcctaaacttgttcatgccttcattgtcttggctcgagtcataatctgtgcttcctccagatgagccatacacattgctgtgtcccggtgtgattccttggtttagatctgatggtgatatgtttccttctagcacacgtgcaacctgctcgttatttttacaccaatcactcattcgattagcattagtaacattttaaaatgactactatttagcaaattgaaaaaaggtgtagctaagaaaacatgtttgtcccattgctagggctgatcaaataagcaaaatataaggctaggcatacataccaaaccaactgagatcgaacacggtattaaccgaaaccaattcggagcggcaaccaaaacgacccaaatataaatcaatctttgtaagttatattgttccgaagccaaaaactaaactgaactgacaaatgaaaatatcttggttctaggtttctaactccgtatacagtttgaaaaccggaaagcgtaaatgcctttagagaaaagaaaagaatgattaatttacctgatccatgcgaggtctacgtggagctgtggaccgaacacaagctgcggcacaagcaaccatgcgagccatctcttctttgtcatactcattattcagttttttatcaaccacaacctcaaagtttcctaattcagatacttggttaagcaaaggtcgtgcctgttccaaattattcacacataggtttttcttcattcaaaaatcacatcgtaaacattatgtgaaggttagattatttgcatgtaattatattacttacccaatcaaccaagctgttatctgcatggacattgtttacatcaatagggcgacgtccagttattagctccagaagtacaacgccaaatgagaaaacgtcagacttttccgtgagttttccgcttgaagcatattccggagccaaatacctaaaatccaaaagtttcataatatgtaaagattcacataaacttttaacaaaactgcataaatgtagatatttggtagcttcaagattatctttacccaaaagttcccatcacacgtgtagatacatgagtatttgtatcagaagcaatcttggcaagaccaaaatcagcaacctaagaaatagaagagagacacatgatacaaagatacttcatgacaatatcgtaccaaataacaaataaaaggaagaataaatcatacctttgcttcaaatttgaaatctatcaatatgtttgacgccttgatatcacggtgaataattttaggattgcctgcatatatataaatgcctagcgagtaaacaaacatgacctagctatatatttatttattttgagaaacaaatatggaattataccatgacctatatttattacacatgatcttatagacttacaattttcatgaagataagacaatcctttggcagaaccaacagcaatcttcaatcttgaactccattccatcgtaggccgtccctttcctgtcacaaattcgattcccaagaatttactaattgaaaacattgaaggatgcaagaaacaataagagagtttattttttattttttctaaccatggaggtgaaactcgagagtgttgttgggaacaaactcatagacaagcaatctttgagcatcggcgatgcaataaccgacaagagcaaccaaatgtctatgatgtactcggctaatgatcccaacctctgcttgaaactctctttctccttgagaactcccttctttcaattgtttcacagcaacttctttcccattacgtaacatacctttgaacacgtatccgaaaccgccttgtcctaacaaattggcctcagagaatccattggtggctctagatagctcctcgtaattgaaagtgccttgatatatgcctaagcctaatgcaagccctggtgatggtggaggaagaactgattgatccgagtagtttgagtcgtagtctccgctgctgccgctgctcatgaaatgcggtggacgtggtggtgcagaggagggagacttcggtggtggcactgacatcaccacgtgatctgatcgtcgtgatgcattttgttgttgctgaccaccgtaagggactccatctgagaaacgcatgaacataatatctataaaaacggtctctctatggatccatatacaagtttaaaaatgtagaaaaaacatgtaatagaattatcataaaatgcatattcatgattaatttccccaaatatatgaaaatgacgtatatgtaaaagaaaatgtagataatctagttagcacaactatattacgttctaaatgattatatctagccgagtagaagggaaaatatagttcaagaaaatgtagataagtcatacttcaagattcaatttattttaaatctttgttttacctatgggagcagggggtgcttcattgtctcttcgtcgtttcttcttacaaaggaaaaatatcaaagccaatgccacaagaagcacaaatcctcctcctatggcgatcccgaccatagctccctttgataattctttggaagattgtgccggtggagaagagcctggagtggtagatggagtactaggagatctcccgccagagggactcgctggaggtggagggctcagactgcctacccgaggaggaggagtgggtgttgagggaggtggcggagatcttggcggagttgaaggagtggcgggagagggcggtggaggagaagaaggcctcaagggagaagacggtggaggggaaggcgtcaagggaggtgaaggaatgcttggagatggaggcggaggtgaaggggtggtgggagacggaggcagaggagatggtgtcaaaggaggtgaaggagtgatggcaggtggaggagaaggagtcaagggaggtgaaggagttgtgggagaaggcgtcaagggaggtgaaggagttgtgggagatggaggcagaggagaaggggtcaagggaggtgggggagaaggcgtagagggaggtataggaggaacggtggtaggtggaggtggaggaggaagggcgggtggaagggcagtaggcggaggtggagggggaagggcgggaggaagggcagtaggtggaggtggaggagtaacgggcagaggctgaggcggaggaggaattgggagaggctgtggaggaggtgacggagtaccaccgggaggcggcgccgatgacatatcttcccgctagtaaaaaaaaataagcgacgggataaagaagaaaaaagaatgttaaaagcgggaaaagaggtctgatctctcttgccaccgagactagacttgagttttgattacttcaatctttttaaaaaacctttggtacaccgatatagaggagaatatacgtaatcttatttttgtatgagttatatagtttgtgttcttcttgcatcaaaagcgaaagaaagaaatgagagcacttactacattgacatttctccgatgtttattattaactatctaacatcaagttacaccaaaataatccattcaaactgaaacgtacggacaataaataagtattttgttaatcatattcaatcaaggttcttaataacagctttaacaaaaaaaaaaaggttcgtaataacaggccaattatatcaatatggttctttcagatatccagataatgtttttgctcttcagataatatatgtttatgtaaataattattattgtatcagggtcaatgtcgtatcattctatatatcttgtttaaaacatcccacaagacgcttaatctaagtagaaataaaaacagaagtcaacgactgattgcaatgatactttgtcaagtttggtttggtcaaatattttgtttttgtcaaattgatttaataaaaataccagtgatatatggtccgaacaaccaattttacttaatgttggtaatagtattatttttatttttgttaacttaggaaatcttaggtcgaaactctgactatgtaataatatatagggcttataaaacatcggacaaacaacgaacgttcaaacgaagaacttaatacacgacgtcattcaagaatggatcaagcttttgttgattttcaagtgtgtatgtttacaagaaggtcaaaataatttggtagtggacattggacaagcatgccaaaatggccaaaacaaagtccactatcaattgtctacaacactataacctttttcattatgtatttgtctttttcttggaatgttttattcaacaacaacaaaattatcgtaagaaataaaaaatttgacagtgtgatataaagaaacttataacatattactttcaatcctatgtttaaaaaaaaaacactaaaaatgaaaatcattgtgctaagaatataataacacattcacattacacaaacatatatgaaaaattctaatagacccacttcgttatattagtaatacgatattatagacaagaagaaactcgatcaaacgacgcaaagctcttatataagccttaaaactcaaggaggcgcctcatgacgccaagcagctccaaatgtgatgtcatctgtggaaaatgcccgatcgcgtcctcgatgatctccactgtcgatttccccttaatcttctcctgcatgaagtatgcgacggagacaggcactacgacgtcgtttcctggttgtatgacatggcaaggcactgacacttgtcccaaaatctctctctcgtcgctaccaaacactatcttagctaaggcaagagctgtctcgggcttcatcttcttaagggacttctcgaacctttggaccgagagagagtctctcgagtcgaccacgaatgaggagaaatcaaccgcccaagcttcgtagttggagccaatgctggtaatgatcgtgtcaatgtcttttgactcaaaccctcctttgtaatcctcactgtttatatacctatttgcatttcaatctagtaacgttactaatttgatcatctaaatatcattttctctttgcgcaaaaaaaaaaaatcattttcttttatattataagtacgttgcattgatatatatagtcaaacattatcaattgttgcattaaattatggccgactttctcacctataactataataaatatctaaagtaatcagtcaaagtatgatacttcaaacagttaactcccattcgataatttctatatataggagaatatagtatgttagtggtccacgtgatatataaagatgggttaagttttagtacttctaactttaaaaatgacaataaatatattgattcatcatatgataataaaatcataacacattttttctaattttcgatgtatctgtatgaaatgaatgtcttattgacatattgatagcatatgtagcatgtttacatatattcatctacgtatatatgcgtagactgcagagaagtaagagaagatgtgatcatatgtcatatccatccaacaagctagaagctgatcatgtccacatgttcaacacttggcaacagttacacttcattacatatagatatcaaccacataaaaactattaaatattggctaatatagtatattattgtaaatcattatttttattttgtctttttcctcaaacacatattcacgaaggaatcttgtacgatcggtcagactgtataaccttataattttgattgcatgtgcttagatttctctttcgaacgtaaattataaattctaaatcatcggtcttcatcttatttacagatatattatcatattttataaatagattcaatatataggcctaaatgatgttatacagaacagaaatagattatacatatgctttgatttttacttccaattatgattaagggtaagtgttatactaagagtgaagcgtaccttggagaagcagcaataaggagaagatttgtaaacaagtcgggccttttaatagaagcagcacaaccgatcacccccgacatggaatggcctacgaacacgacagggccaaacttcaactcctccataagagcaatgagatcgtcagagaagacgtctaaggagttatactttgaagggtcatagagagtttgatctttaatggctccagagaaaagccagtcaaagaccaaaactttgaaggattgggacaagaccggtattattttatcccaaaccgactggtcgcctccgaaaccgtgtgccaagaccatcgatctctctcctgaaccgatgattttggcgttcatagcggatgcaaggccggatatcttctgattaaccaccatgcttaagtacaagagttttgttagatgggacaactttgataagttgtgtgcgtatatataaaggagaagagagatggattaggtttatggttctttaattgacattcaaccaccgattttattaggctcgcattttggtacatccaaacatttatggccttttcaacaatggctgtatttgtattcattgtccatctacatagcatcttagaggataaaacaatatccatcataaataagaatatactactccatgtgaaaacgaaactctactttttggtagtattaaaaaggtaataattatttggactcgatatgaagtatatatactagttttgtttgtatgtgtaaagtttagagtatcaaagtgtctttctttttttttggtgtgtatcaaagtgtctttttttctatcaaacaatgcatttgttgtaaaaacaatatttttttcttttaaagctaatttattattattttcgaaaaaataaatgcattaactaatctgacatttagacgtcaacatgatctcaaattctcaatacattaacataaccataaatcttaattaagttatagtcaatgaagaataaagcacacggcaaattctaataaattgattaacatcaatccttgctaatcataggagtcatctacgaaacgtataaaatgaccttttgtcttacaataataacaacgcaaattaatataattctattatatatacatcattttcgtttctctcccttagactttcgcatatatagacacatcggaaaaatataaaatacaagcaactaattgtaatcaagtttctttctttaataacaaatcttcagaagaatggatatgaaagaaaacgatatttattgtaattaaatgttttcaatttatatagtataataaaacacatatattagtatacaccaatgactcattagctatatttgatatttcaaaagcagtagctgtgcgtggagtcaatatctcgccaccaaccggggaaactggtatttaaaagtgtataaaaacggagataaaaaaaaaaggtgtacttctttgacttctcttgaaacaaaattttctagctagctgcaaatacttggtttataaactggaatccatgctctttaaatttctgtgatgaagaggaaaagcctaaaaacggaataaaaaaacagtacacgtgagatgacttggaaaatcttaaaagactcattgaaaggactgaattaagtgtgaaaatattgtgttttatatgtataaaccatatatatataacttatataacaaagtaatgcgtctgtgtaacttttcataagaaaagatacccaacaaataaaaacaatgaacaatcgtcgaaaacctaatctagggatagccaataaaaaagcctctaaaatatcgaaaccagaacgtgtaaggtccccaataacttcgcttaaaactcaaaagtactcaaatttatgtgaggtttaaattggttcaaaggtaaaaccagagatatctgggcgagaaaaaaaaagacaagaagcacacaaccgcccatgaggaatctgaaggaccagaccccaaaagttttgttttgtccataccttgtcattttcttcttccaaatttggaccaattattattttacattaaactcagaaaaggtttgaaattttcctttatcttcacagttaatgatttagagtaaatgtgtaaagcattcgaatataattactgttttcacaaaaagaagaagaataatattttaggtgttgtttttgcatgtatggatacaaaagctagcctctatgcctaattgtgttagtatagagtgatcgatactatagaagctgtacttttttccgtagataactaaagacgaggggcaaagcgattctccacaagaagagtaattccatcatatgtatagcataacttttttgactttttgacctaaagaaaaaaagcatacttatttgactaaataaattcggttctgtataaaggctgaaatactggagaaaaagcttagttttgtcgtgtagtgatcaatgtatattgacaaaagagaagagactggaaaaaagtctacgaccaacttttccttccctttggccttaacttcactcacacatcattttttaatattacccaaatttgtccattttcaaaccattaagacgcgatattgtgcattttgagattgttagcttgtagagaattaaacttcgaaaatcctagttacaattttatttcatacaaggtgtcacagatccacaccataccgttaccttgttgatatacaagttgaagttgtccttagatattatgagcttgtttcacaaatcataaggtctaaaaaaagattgcgatatgagtttgttacaatcattagaataaaagaaaaagagagtaaaagaaaataagataataaatgaggaaaatgagagttggagagtggagagactagagaatacaaattgccttttgcctttaaaagccggttcctactctctttctccgaaataaatgtcgttagcattattatcgatcgtatctatctatacacacatgcgtaccaccacgtgttttgtgctataatcatcctataattcttattaccaatctctagatttgttgttacttgttttataaactcttttgtttttcggattcatttggcacaacctatccaaaaaaaaggtttaaatgagtatgttttaaaaagaaactaatgttattgccaatctgagtactccgaagagatcaagctaaaattgtaaggaccaaataacaaacaatctttgcaaacctttttagctcaaaaggaaactactactaaacacattataagattgaacatggtgacataaatacaaactactaattacaactagcagtttaaatatgattcgtatatcattgatactaacaagattagaaaaaaaaaacactatatataatgattgattaacaagtttcttgtatcttagaaaaaagaggaaaaaacatattgattgtttttagttttatacaactttgtacacataattaacctgcaaagagagtatttcgactatgaaaggaatatgtaaatcatgaaaggaaactatttatgaaagatacaataatataaacgtgagttgttctcaaaaggcattagcctctcatttcccatcgtatttaaatgggagtattgcaaggaaaacatatatgttggtgtaaatgactttcttggttatgcagaagaatgaaattaaacttcgaaaatctccagacttacgggttagcttaagtgtgatggcaaatccagccaagtcgttgtgaaatctccctgaacattttataaaacaaaataactgtttatttttcacatatcttgaagcttagtttgaaatttttgcatggtattttggtttactatgcaacaataaaacgggtttaatacgtataatttggtgaaactaactgttttttccttacatggtccactctcaactgttttaaagagatgaaaagttatcatcattgattacgaaaatgatatctaacttctcttatacgccccacatccacacaaatgccttaatgaaaaggttatcgcgtttgcgattagaacaaaccaaaacgttaccttcaatcataatttgcgatcttgttttggttagctaatagagttatagatcaactacgtcctagtccaaaatctgtggttataactgtagtttataatagtaaaaataaaagcttacagtaaccctcttttcatcattgtaagattcataacaatgctcttaatatgaatatacaaatttcattttcaagagatatcgtaaagcgaaaacatattgttcaagaactagacttcgactggagacaatggaggaacatctactagcctttcaatttcttccaactggtcatatggagcaatctgcagaataaccaaacccaagactcataaaatttcacatgttttggtaatatctttgtttatctagttttgattgtgatttctaagttgtatttatttatacctggctaaacccgtcgggccaggttatcgagacagcgtagtttcccattggtcgtatgtcctcaggttcgatatcttccgctacatcgccatatagaactttttgctctccagtccattcatcctgtttaacaaagatccaaacattgacactttgaattcttgttttaagttttaaaagaagctttaagaagaaacagattctcaggttgaatatctttcataccacactttgtgcagatctatcatttcttctgacggttgcagggtgcagtaagaactcttcgtctgagtttggtaccttcactctaattgccttgagatacttgtcgtatgtcacggccgttgatactgtttttaacataaaatgcacagaaaagaaagagtcttttaacttaattcatgcattgatactaaaagagaaaggaaggttttttgacatggttggttgtttaccttgctggcgtatcttggcgcattgttgcactacacatacaccaagatcctggaacgttctggcaacgtcacttagaggatccgacactacttcaggagttccgctatcccccgaagcagataactaacaatcaaaaaggaatttaagaaaaactgtttagaacaatgagtccagtaatattactgttcaatcacctgatataacaaaagaattagatgaacattccaaggacatcaaaatagcttttcattcctaaagtcaaaagctaaatattcaactgtgttgtttcatagaactcttacatcatatataacttatatacataccgttggtctaatggggaggtcaaagaggtgaggtatgccgaattgcttgaccacctgcagccaaagatgtattgtcagaagttatctaaatgtgtttaacgtacatgtcgctgttgaaatattcattttggtttcttgaagtaaaactaagagacagtataaagtcagctacctcagaacctgaacctttcccaaaagggtaataacgtttcccatcagcgtcaaagtggcacatattctccacaacagcaacgcaaggcacctactccgtaaaaccaaacaggaaataaatctcggaagttcatatctgtttgttgcagagttgagaagaaaaacaagttcacaagctccatataaaagaaaaaggagagtttatgatcaaagtctggaacagggaaataaccttaagttttgagaacatccttacaccttttgcaacatcaataaacgccaacttttgaggggtggtgacaattaccgctgctgtcaatggcgcaacctgataccaagaacattatagtcatagcatctaacagaagaatttaataatattcatcatatttcagttgctagcaaagttattcagttgttacatgcaagggaaaaagcattggcacatatatatttgcattactttcattccctacatatgcgaacgaactaaaagtaaagtagaaatggttgtataatattcaaaaccgaacctggcataaggtcagttgtatatcaccagttccaggaggcatgtcgataacaagatagtccagctctcccctgcatcaaattcctcaaaaagatttataaatgtttctggaaaaaacatgaagtcaatgattttatggaaatgaacaaaccattcagttgttgtaaggagttggtttataacaccagacaccataggacctctcataatggcacgcccttgtcctgcaaatccaaatgagactagcttgacgcccatgtattctgttggaatgatggtcttcttctccgggttctattgaacatatacagaactcgaaaaacattagtcctttgtgtgttactgctatcacaaggtgagtcagagaatattaccatttccaatatacggctctcaggattgaccatggttggtagacttggaccatagacatcagcatcaaagataccaactctagcacccataccagctaatgtataagcaagatttacagctactgttgatttcccaacaccaccctgaaatgttcatctaacaacagcgtgtcatgaactaaaagggacgctagaaagaaagatacagacagattactttctatgtcacaaagaggaaataccagctactgttccgtttctatcttttccaaaaaaacttgaacgagacaataaacaaagaacacaggacatcttattgatatcacatcactaagactactttggcagaagagtatgtagcattcgtatttacacagcagagcacatcccatattattaacttaaatttgagaagaaacttcagttcaaaaagaaacatcaagagctgtgtaaaaagaaattcattggaagatatatgtaccttgcaactagaaacagcgatgatgttcgaaattcttgataatccaaagggaagctgccctgcaaaaatgggcttggctggttgtgctgacattgtcacatttaccttcttcacccatggaagggctgcaactacctcatttgccttgttctcaaactacaaaagagtcgtaatccatccatcaaagatacactaaaagaactgattcattgcttatataaccaatgatatagctccaaaatcctcctaatgggatgaagttctatcagtagtaatatgataaaagaatagtgaatggtaatgtcatttaccatgtctttgactggacatgcgggtgttgtcagctccaaacggaacgaaacctacaacaagagaccaaacatgtttcagcagccttgaacaaacaatctaaaacagaacaaattggtgaaggataaagtattattattacctcacccaaagcttcattaatccccaaatctttcacaaaaccacaagaaacaatatctgtcccaaaatcaggatcaataatctgagacagagccttcaacacatctttttctgatgtttgagcaacactctcaccaacactactactagctgttttccaaaatgcataagttaaaaaatatcagaacttgcttagtctccttcgcgtataacgttaacaatttttcaggcggagacaaaggaacaaactttataaccttgagctgaagcagctttagctacagagagattctgagagacccgtttgaggattcttgtcctggagattgagataatggaagcttgagaatggagaaacttgtgagaaagaagcaatcttgttgtggaattgcttcttctttgggtctgaatctcgaaagaaggatgccgcaacgactgtggatgaagaagcggcattgctacaagagagagacgaagagagtggcaaaaaaaactagcggtctgtgataatttgatcgctcaactctttaaaagataaaactttttcaaagctttttattatttttattattattattcaatatatcataaatttttacatttgtaatcagatattattgttttttttactgatgtgtgtcaaattacatctaagataaatcaaaattaagtttttactgatgtatgttgaattctacaaaagtttcttttgttaacacaaaatgttaaatgtttcgaaattaagataaatcaaaattaagtaaattaaaacttaaaaagacaggaaagcagatttgattgaagtaaattcagatgattaaaatgttagatttagagaaattttcaaaaaaatagactaatagtagatctagcaattaatcaagattgttattgcaccgttctaaaactacaaatcttaatctatagttaatcgactctcgttataattgactaactatgcctaacaatattggttttgtgtctccatctaaaattactagaattaagcaagcattagaattcagtttgataagtttacctaagcatctaaaccgggttggcagtcatctagttattaaggctctcctaacaataattccagtaataaacgcatctcggattttacatattaacttataatcaaattttagttcgttactctagaactagctttaagaataatcaaaggagaagaactctagggataaatactaacagattatcgatttacgatttcatctaaatttctaatgataaactttaaacccaagaaggagattactcagacataattaaagaaacataaaacatgtttgaataagattacataaagaaatcaaaagtagaatggagtttaaaaaatatcttttctctataggtataaggttttgaaatttctgaagtagtatccacaaacctcaaagaatttggagagcaaaaaatgaaataaagctt

SEQ ID NO: 459 - DNA, 79706 bp, Arabidopsis thaliana
gatcactcattgactctctctctccgttacacttatgttctcgacgcgaccttccaaccataaaatactaatttcatttttattttcacttcatcgatatcttgtgacatgtaatatgattggcttatcaaaaatctttcatacgaattttcaagtttgttcacatctctctcccaagatatccgtttaggagcctaggaccgttacttcactttattattttcatgtggaggaactgtaatatatatcacaattttgttgttcttgttgattgtgtaaatagtagtactggatactaaagaacaatgagtatgtatctcaaatatttagctcaaccgttttataaaaatactatattattaccttaaaattgtttgttgctttatcagtattaggtaattatgagatgtcactgtttaatctatttaaacgttttatgagttacattaatgaaaaaaatctgaaaagttaaaattatacgaatacatacctgtctgactctacctactgaattttgtaaaacaatttgttatattttataagaaagttgatgttgtagtgtttactgtctcataaaaaacaatctctatttatttgatttgagacttgaaatttttaaagcttgttttaaactatactgtttttcttataaaaaaattgtattaattttttttataaatgaaactgttaaaaaaaattgaaaatttagagatcaaaactaaacctttataatcattgaaatatattggtacatctacccacaaaacaggtcaatcgtctaggtttaattataattaagcctaacatgttaatgagattcaaacgaaattaaagtccacaatgccaactcaactcaagtatcaaatctttttcttctttttttacttagcaggaataccaaactcaagtatcaaatcttttaaaatttattttttacttatgtcaatgtgggaatgaccgagttacttaagagttatgattaatattaattcttgtttctaaccaattcatatatcattgtcttggaagcttcttcatatcaatgactcaactcttaatttttttcgaaaatctgttcttacaaggtcacacaattcaattttttttttgtattgtaaatgtttatctcgttatatttacactaacgagatttaaacacctaaaatcaaattgtacgagactagtgttagttattcaatagtatgatgcattgatgcaacaaaattcgttgcgattatttatgatccttatcactaccatgatcatttccattaaggttatacttacttcctttttgatgcataataattactcaccaacattgaagcgtggtcgacattttcattggcaataagcataacattcatttatttatattaaaacacagaaacaaacaattattaaataaagagttctggcatttctctattttagtccacttaatttaatactatcatcttcaaacaagatttcatcattaataatttaaaaaattatacgttacatagtgtattaaatgaattatcgttgggatacactttcacatttttcaaaaacgtatgaatcataatgtgacacatggagatttcccacaaccgaggctcccatagtagatgcttatgcaattcatattcttgcagcttaaactcttgcaagttcagtaataacaccgtgatatgaaaaataaaacttagccctttttaatttttgaacttattcagattaattaaaagcatacgtagcatatttaagaatataaagcagagaatcaaaataacatattgtttcaatggcacccattttagctagtcgatcagtaactgcattcgcagatcttcgaacccaccaaaaatcgacagcttcaaatcctttgagccaatatgacgctaaaggtcaaaatattatgaccctaaatgtcagaaattgaccccataagtcataagttaaccgacaccaaagctgatattcgttagagtttagactctccttttcttaatgatcgttagttttagttgggaactcttgggctatcggttaaaattaaataattgtggtcctcttggcccattagtgctgtccaaactggcccaatatgacccagtggatggtcccaacaaacgccgcgacaaaactccgtcgctggctgaggcaatgttcaccggtggtggtagcttttcttctactccgacccggctgaaaatgcaaatccctaaccctagacacggccatggtttataaacctcatcaatttcttctacttatctcttctcaaagctaaaccctccaagatattcctctattaggtgcaaaaatcaggtaaatctctatctgtccgatttgaaaccctagatctgcctttcttctctcttcttttgcttttctgggttttgctcaaagatgggtgacagcgaagatgaaacaggatacccaaaaaagttttactctttgaatcggcaaaaccatccaatgtatagtagaccaatacctaagcgtcacgcgtattacaatgaagaagaagacgaagatgaagtcgaaggagaagaggaagatccacaaggaggatacattcgtggaaatgagaggtttcagaagagacagaaaccaaacaaagtagtttctgggtttgaatttgctggtcctagtgatgctaaagttgcgtatgattggagagagcaagaagcttttgtgttgcttgaagtttggggagataggtttttgcaattgggtagaaggagtttgaggaacgaggattggaatgaagtagctgagaaagtgagtgaggagctaaggatggagaaatctgagacgcaatgtaggagaatgattgatgacttgaagaggaagtatagaaaagagaagattaaggttgagaaatcaggtttaggttcaagtaaatggtcgtttttcaataagttggatatgttgctttgtgtttcgcccaagtcggatttaggtttagcttgtggtgttgattcaggtgagtttgtgtttatgaacactaaggtttatttagataagtctaatgggtttgatgagatgatggatagtcctggtgattctgaagaggaggaggatgaggatgatgaggttgagtacgagaggaagaaggttaatgacgctgcttcgtataagatgttggcggattctgttgagaggtttgggaaggtttatgagaagatggagaagagtaagaaagagcaaatgaaggagttggagaagatgagagctgattttcagagagatttggagttgcagaagaagcagattgttgatagagctcagagtgagattgctaggttacgtgaagaggaggagaatcatcatggtggtggtgatgatgatgagagtgaagatgaagaaatggagaatgattctgatgttaatctcagtgatgagtaagttataaactatgtaggtttgtgttgtttgtagatgcaacaaaatatgttctgtttttttttttggttttagggaattcagaacttaagtcttataagttttgtaatttgtgtttggtctttgcaactttagtcgaggttatttgcagtttatcttgaaacttaaattaatgcataaacatatttccttcttaatatactgtttgtgagtatttctcttgaccaatctcatgaacatacatatattatataccatagctaaaccgacagatacatatataatcttgttataatcgaggaaacaattttttgatatataagcattttttaagaggaataaacatcagagaagcaaaagacttaacgagcttcagatagtgttatgtcatagccatttatttgggaacacagtaagaggatttgatctcatgccataagcaaaacaaagtgtcgtagtcatcttcgccaatgggggcattgttgtgggcgactcgagaaatacccaccaatgacttgagccagtcttcatgcagacttgagaactcagatcttagctcacttgacttgaagttttccccaattgatctcttcatggcttgagcagcacctgatgctgtttcaaccacttggtttggtattccagccatgagtgccacttgaagtccgtagctctcaggacaagctccctcggttaaacggtacaagaacactaggtcttgatcacaaccacgtggttgataatcagatcttgatttgaatgcgcaagccatgtgtttcgaggtgacacgtgggtgagacgcgaattccttggtgagagggtggtaatgtgttgcaaagagcatccgacattgaactttctctaccaggtgacgaaaaacctgatataaatcaataagtttcagcaaaatgaattgcatgtttttgttgatcaacaagtataagttgaaggagaagagcaggttaccgagtatgcaatggcgtatccatcgaaagtactagttcctctgcccagttcgtcaaggattactagtgaatcctgagttgcattctgaagaactgacgctgtctcagtgcattctaccaaaaaggtacctaaaaaaaagcaaaaccaccttgtccaatcagacaaaatctgagtaaatagttcgaggaattggtattttgagaacaaaacttactctctcctgtcatgattctatcagatgcgccaagccttgtgaagatagtatccacgagggagatttcgcaagactcacacggcacgtagcagccaagctgcagacagaaaacagaatttattattcatgttgaagaactgattgcaaagaatagagtaattatctaacgagtatacaaacttgggcaaagataacggccagacatgttgcacgaagaagagttgattttccgcccatgtttggtcccgtcagtaacaatgaccgaggatgaatgctgccactgcttcttctagcctcgccaaggagtatatcattcggaacaggcaattgaccatcggctgcaactgcaaatggatgccatagtccttggattttaagtattggcccttttgttttctgattctgatctgtagcttctgattcgggaaaaataacaggcctggccatgcttccagcagagagacttgctgcgattgcaaaagatctcaggacatctaggcagcttatggtgtgaatgacctcagaccattgagttgctctttcgataaaaagttcgataagtattgtgagagtttcagcgttttcatctgtcacatcttggttctggtacaagattaataagttcaagttagaaataaatcaaaccatccaaaaacattaggaataaaaagcaaatccctttaggatcctcggggtgtgagttgagatctaagccatatgcattgctttgagtagtgacagacattttgttgtaaagtatgaaagatagatgggcacctgataatttggaaagtcgctatctatggctgcttcgaattgagaaagaaataactctagcccgctttttcctactaatataggaagtttacagagtttataaagcaaactcatcatatttgattccttctgtagagccaacaacagatcaattccacttctgaaccctttcacaatttgcccaaatgctttaacctgcaatgcaataagttaagagaaatgtaatgaataaccagacattgcaaaagaaggagaacagtctttagctagacccgtaatgttttagtcctatactactcatggaaggcattactcagaaaacttgtgattgatacttactcgttgtttcagcacttttttccccagaagagcaggcaacacagaggctgatgatcgaacgctagacttgatgcgtccgagcagtctttctaagtctggaagtttgtggagatactggccagtgatttgcatactttctgagtttgccgtgaattcttcaactacatcaagccgtttattgatgctttctacatctttgagtggatggcagatccaattccttaagagtcgcttaccagttggactaacacagttatcaagatatttgtacaaggtccctacataggtaaacaaaaatcggctattacttactggagatccgtacgaagtattagaatttttccttctatgtctgccctctagttgaagttatcaaaaaagaaatatgcacttgcctgaaggaccaccatcacagctattgttaaatatctcaagatttaccatcgtctggccatcaattctgagacaacccctgtaaacttggtatggaaaaatatccccatgcttaagtacatcttctagctgcaagtagatagaaactgtaagttatgaaaagttcctttgcttaatttgtgaaaagcaaaaactaaacaagccaacacacctttagcctagacagatgattaattagctctccaagagcactaagggcaacatcacattcatttagaccatcaacagcacagttccatgattcagaagaacctttaaagtatccgttagattctattatatttctaactccagcagcatctgtatcccccattacttgtggtactggagccaactgtaccgccgtagaccctattagattgaaacataaacatcatctacattagcaatgtttaagagacctatcattcggtgagcggttaaattgtcagttagcttgcctactgaaatggtacctgtcaacgtatatttccttagagccttttgtgcttctcttgatagccctgcaatatttcaacatgtatgcactttaaattaaccagtgtcatttaccttaaattctgtttaacaaaacaactggcgatacaagcagtttacctttactgtcatataacacttcctttggagaaacctggaaaaaacataccaaatggtgattcagaattagttcctgcaacccaaatatatgcacaggaagtcacatggtacacataagatacagaatacacttgcttacctgcatcaataacgctccaagagcagcacatgatgcatcatcgctgatggacccaacccaaaacctcaaggcagcacagtcaacaaaagcaaatccatacacagttgaacacttttgtagctccattttgatctaaaataaagattcagaagaaaaattgacatcaaaccattaggcaatgtaaccaaaggcaattcctgagcagctacttaatcatgataatgtacagcttggatcagctatcattttctccagcacacgagacaaacacaacatagacaatggtcattaagaaagagggggatgcagtaacaaggaatgatattacttgacatgcaattgcagactatgatcattgtaagaaagtaggggattcacttaaaaagattgaatttttcaagtgcaaagaatcttaaacagatcttttcaagggaacctcttgcatataaaacaaagcatcaaataatgattttctaattccaaatcctttacacagcttgatggaagattggtaaagaagagtgtaatttttcaggacttggatgaactgaacatgataagataaataagtaaataacaaacctcttttatagcaagaagatggacggcatcaggcccgatgtttccctcgcttgctgttgatggagttaatacctgaactagcttccttggaattatctgataatcagaccagaatagccattgagttaattacagcatgaaagtaatgtacagaaaaagaaatgatcaaaaacagtctgcaacactctccttgacctatccaagaaaacttacagtattagcacctctggcttttgcttggtcagatgtttctagctgctcgattcgtccaactttatatctttcaaaagaaacaacgagtgtgtcaatacataattagtagaataggaaagcatatgaatctgcatgctagtttctgttggaagcatatgtaactatccagtttcaacacaaggcttgaaagcctccatgagagacaaaatgagggtaccacatacaagtaaacatatattatccgtaactgttactacagtgaactagcaaaggttagctgggtatatatgccttgccagtgagcacacaaatattgtgcaagttttgtttgttactccttgatgaaaagacttattatataacgaataagaaaacatcctgagttctcaggatcctaactaatgatgcttgaagtgatttccatttcttaaatcctagccgaagtagcagtaaacgaattccataaagtatgatggttcccttacccacgagctaatagcttttgcactgcctcatctatcccactttcagagataccaacctgaaacaaaaggtggtgtcaaaatttatagacacaataattcaagcaggccagttgtttcaactaatttacctgtctgcattttcccacaccactcatggtcatcttccagtcaagctccttgtgacctaattccgcatctagctcatacagctcataaaatttcccctgagaagagcataacgtaaacagatgtaagtgaacaaatcacattgaggaaatggattgaacactagattaatagttactaaccactttaaagaaaagcacaatgtccatatattcactcttaacactccaatattgcttttgtgatgcagacattttcttgaaaacatcaggtggtatgtgtaaggtctttctatcgtaaaggggatcatcaggacgtcttctattggcatccctgattcgagaagactcaagccattcaaatttggttccttcgtttacttctttcttctctccacaaaccggatcctggagcattttcagccttttgttagagtccaatacaggaaccttatcctccttaaaagtcatttcatcctccagaactcgcttcaagcgagaagcacgtggacgcatccctggtgtttctggaccaggaacatcgccatctactcctatatcttctactgatctaagttcagctctcccactgaaactaaaagcatggtttctttcttgagttttaccattattggaacgaaattgaggaataacatcattagccttcatacatagagatgaatcattcagcggaacaacatcttctcggctcctgaaaatttgtaaacaacgatccaatgcagtaatcagaatctctccaacgaatacaacaaattacacgaatcttcttcttccagctaaagataacaaaattaagagaatcgaagattagtacctctctccagaacaatctcgatcatcgacttttacaaacttatgcataatattggagaacagggacgaagcatcaccggcggattcagccggcttaaatccagacggcaggacacgacgcggaaccttctccggtggagtatccgttcctctaacctcatcgacagatttcgaaacagcaaaacgtacagaagcgtcgcctttagcatccccttccttcacattaaatcgtggtcctccgctgccgcccccgccgctagcagcatcgccggaaaccaaacccttcgtagtcgccgccgtgggtttttggaagaaagacaaaatcgatctctggcgctgcattttttggaattgtgagagagagtgagagagaaacgatgttttgagctgagagaattcgaaaggggggaaagattggcgccaaaaattttcgccttgcgtcgtagaaatggcggaaacgatactcctcagggctcaactttttttgttgactgttcactctttgaggctttgatgaccgtccgatttatgttctattattgtataccgttggatctttctagccaacgagtcaatcaggcattggtattcggttcggctaaccccggtttcgaataattcggttctggaagtaagggatccgaattgaaaccgaaataaattttacgaaaatttttggttagcttaattttaatgataactcataaccgaaccgaaaaccaaatttatataaaaccattgagccaaatcggataatatggtgtaccacgaatccaacccaaaaagcattggttaactgcaaatcagataatgacacgtcgtcaatcatctctaagaacgttccagagacgaaaatggagaaaaagatgatcgaattctccagaaaccaatcttcgtatatataaatatcacaatcctctcaacaacattcttcatcttcatcgtttctcaatttcaaaactcagattaataaaattttcgcgttgttcctttctctcaattcatcgacgatgccgagcagatacccaggagcagtaacacaagactgggaaccagtagttctccacaaatcaaaacaaaagagccaagacctacgcgatccgaaagcggttaacgcagctctgagaaacggtgtcgcggttcaaacggttaagaaattcgatgccggttcgaacaaaaaggggaaatctacggcggttccggtgattaacacgaagaagctggaagaagaaacagagcctgcggcgatggatcgtgtgaaagcagaggtgaggttgatgatacagaaagcgagattggagaagaagatgtcacaagcggatttggcgaaacagatcaatgagaggactcaggtagttcaggaatatgagaatggtaaagctgttcctaatcaggctgtgcttgcgaagatggagaaggttctaggtgttaaacttaggggtaaaattgggaaatgattaaacgatgtcgtttatcttgtattttgttgaccaatgtaaaaagtaaaaaaaaagtcttgttgttttgtttgataaatgaaaaaacaatatatatctttcatttcttttatatatagttatattgatgacataaaaccgtatacctttattgttagcaaccaaaaaaaagctttaagcgcggtaaaaagtacggtacggttttgtgattggtaactgttaaaatgatatggaattgtcaatcaaaaccatcatttttagattttaacatttttgtggggtgaacacaattagagtttcagttatataaatcagaaactgtagtttatagtttataatattatctatatgaaaaaatgctatgaaagtataaaaatattattattatttagcacaaaattttttttaacaaaaacaaaaaagtattgaacaaaaaataaaaagtggttgcacaaaaagaaaaagaaaaaattcaagccgccttattatcattggattaagtttttttctatgtgttatggacaattttattacatccaaggggaattgtgaagaggcataacgacggatttggtttgtagatagttgtcgagagcgtccatgccactttcacgacaattaccactcatcttgtagccaccataaggacagtcaagatcaaacccgaagtagcaattaacccaaatgattccagctttgattgacctcgaaaccgtgttgatcaagtctatgtcttggcttagtattcctgctgcaagaccgtatttcgtgttgtttgcgcatttgatcccttcctctaccgtcctgtgaaagcaatttacgatattcttagtgtaatggaacgagtcaatgatttgagaagagaagttagtttttgtttagggtttacttgaatttcatcagtgacatgactggtccaaagatttcatcttggtatatcttcatatcctcctgtaaaatcaacataaataacaacagttacatatgcagctaatagtgtatgtacttatactagcctaattttgatacttatatgcataaaaatgacaaacgtggttacaaggtatcacgttttttagttaactttagttcttagatgaaagaagacaagtgtgacttacagtgacatctgcgaatatagttggttggatgaaatatcctttgtctccaatggcttttcctccagttaataaggtcgctccttcgtttttaccgtgctcaatgtaagatagaatcttctcaaactgtcttttatccacctgaaagaaacccaaaagataattaaacataatgtaactctaaatctactcaaattaagatcaatcaatgtatagtttaattagtctatatttttacttgaggtccttgtcgagcagtggaatcaaaaggatcaccaacggtccaatctttagccttctctactaacttctccacaaccttatcgtatataccttcttgaacaaacacacgagagctcgccacgcaaatttcaccctgttgatacatcaaattaagatgttttatatatcagtatcaccacattgttatacattgacagaaattggaatgaacattatggataccttgttgtaaaagcaaccgagaagcgcaagatcggcggctttgtcaatatcagcgtcgttgaatatgagaagtggcgatttcccgcctaattcaagggaaacttttttgagattacttgcggctgcggcttgcattatcttccttccaacatctgttgacccagtgaaactaacctgatcacaacacacacagaagattcaagtttcacatacaatcaacaacattagtcggcgcgactcataagaagatagatccttactttgtctacgtccatatgggaggcaatggcagctccagcagttgatccaaaaccagttacaatgttgagcacaccatcaggaattcccgcctgttttctcgcaataatgtttagattgttaggtttctatcgtttgattacgtatacgttttgctttattacatgttaaactagtgtgttgtccttttagacacaacctaaccttttagtgttttaagtaaagcaaaattcttaccgttttaattttgcggttaacaagtatagttatgaaaaagtttttaatctatatcaacttacttcttttgagagatgggcatagaacaaagcagagagtgaagtctgttcagctggcttgaccaccatggtgcaaccagcagccatagccggagccacctttgtggcaaacataatgcttgggaaattccaagggatgatattaccaaccactccaattggttctttgagggtgtatccgaacaaagattgacgcgtcattttaagagtctcgccgtggattttatctgctgcacccgcattgtatcgaaaatgaccggctgtggccggaatatcagcatattttcccaactgaaacaattttccaccgtcaaccgcatcaagtttagccaattcctcaatgttttcctctattaagtctgcgaatttgttgataagctttgccctctcctgatcacatcacatccaccaaacttgttaagtgagaagattaatcatacaaatatcacaaaaagtagaagaggaatagtcacataaataaaaaaagagagtaatagtccaatctaaatttgaaacatacaagagttacaaaacaatcctataaaacttttatttgattataaataagtaatgtgaaacttaagtacaagtaaaagatatgttatactaatatgggcaaaatgtttttctaaactacatgaaagtgacatcaaaccacaaaataagtcaactttctctcgttccatttctataagtttaataacacgacgctgcgacagttaccaattgcgtagcaaatcaaataaagagtattcactcagaacaagaccctaaacatttaatgatccactatgtccacgggaccacatcaatcaacaataataaaattaaaatcaccaataatttaaagaagaaaaaaatgagtagttgtgcaataaaaaaaaacatgagttgaagaagaaacgtacgaagccggtcatgcgaggccaaggaccatggtcgaaggcgtaacgtgcagcgttaacggccaagtcaacgtcttctttgtctccttcggctattgttgcgatcacttcaccgttcctagggtctatcgtctcaaacgtcttccctttaatttttagcccaaataaaccaaaactaagttatcaatatatgtcaaatcaaaccatttggttcaatgttcaaatcatgagtccttcttgtataggtaagtacaaaacattagctttatcattcaagcttcttaaaagaggaaagaaaattagaagaaaattatgaattttgtagttgagaagaaaaaaatctcagggtagaccaacaaattcatgtgttttatagtggaacatgtttctgtactccggatattcatttattttcataccaagctaaatttttgtttattaattttgattttttggaccactcaatactcatccatcgactattcacacaaaaaaaaaaaaaaaaaacttgccaaatgtgttcttggctattgatataaatatatgggtttagagaataggatttgaggaaattatgtcgagaactagaaccaaaatcgttaaggatcttttttttggtgttaaagtcaacgtttgaaattgtgaaattaaggagtaaagaagtgaagtaaaaacaagaaaagaacctgaagcagcatcaatgaactggccgttgatgaaaagcttggtgaatttgatctccggtaacttcaccgtcgtggctccgttgcatttgccgttctccatttatttttctttgtatttctctctctctctttctctatgctcgtagaaggacagagaggttatctacgtatttatatcgaagtgtctcgattcacacgtcagcaaaggcagtggatttttctgttaagtagctaggagcgtgcatgcacgtgaagagattacgggttctactccgatacatctcttattgttgtttcttttttaattaaaccgagttttcttgccacgtttgatcaaagttgcgaaatgtaaaaaataaaattaaaacgtatgagaaaaatcgatttgtatgaaaattctacatcttaaaaaacgggattgacccgcctatcccctatcatacgtatatgtcttttatcgttttttatcattttaaaaatgttcaatttaaataataacttttcattgtgttaatgtcgttgaaaattttaaatctggtactaatacgtatatgatttttctactataaaatttacagaaatacaaattattaaattacatataagtatattcctaagtaatccaagtttcaagattttcacatattaaaaaggaacaaataaaaaatatgattataaatgctttttcttttgcgattaacaattttctatctctaagcaaataatatttcaattttcattgttgaagtttagaatttatcattatttactaaacaaaatgtatacaaatattttttgaaacacaggaataccgtttttgttcttgatatttttacagatatcaaaaatttaaggcatacaaatttttatgttgctgatgtaaaacaaaaagaaaggattatatttcatccgtttctttttataagatgtttagacactttcatttttttcatattatttgtttttttttaccttctagacaaaaattatatttttttttgataatttatacccattcaaatttttcagtatttgttttcgttggttgaattaattcttatcatgtataataaaccaataccatttttaatacccgactgccaccatctctagaccaaacacttttgggctattggtttcatccttgtccgagtgccaaattgctactttggtaaactcaaaagacttgttgactaactatgcttattaacacaattaaaaacacttccaatgggtcgcccacatgaaacttttataactaaactatggttatttatagatttttttcacagaaagagttacattaaacgagaagtgaatttcaatgataactagtcaaataaataattgtaagcctttcttgtgcaccataatttggaaggaaatcagggggagtacaataagctacacttatagggtacatcatccttaactgaaaccaagaccgaccattaccaccacatgactcccacacttctgatggttcatggatcccaccctcatatgatagcaagtgcgctatttggagagtccacaaaacttggcgatatattctacatatcaccactagatattcgttcgtaatttgttttcactcatataatacttaaaataaatttggagatttccatctaaattttcttttcttttttttgttaaaaccatctaaattttcttctaactcattgtggttttctgaagatgatttacagaaaacataaatgcgtctttggtaatatatgttgttaaactattctcatgaatcaccaacttttcagaaaatttggtcttaccatcatcctcactcacataaaccttatcatcatcattgtgaaccaatattgttaccccttgcagtgtaaacccatatcattgtacattcacctaaattcctaatgtctttaccgttattgtttgtggctatgtcaattattattattattatttttatatttttctcattcatttataatttaatgacagataagtaaaaaaataaattagattttcatattgttttcatgacgataaataaattgatatgattttttccataaaatcatgcttattaaaaaatctaataaactaagactggtgaaaatgctgatattatttttatagattaagtcaaaacaaaatatttaagtttcttagagttgaatctccaattgtcattttatatatccagcaagttgaatacaaaaacttaaatgtggtatttggttccccgtctacatcggtcatcgatggcattattctaaaattatttgaaaagttcaaaaaacgagtcacattgtcttgtgtgtgtgtcaaatagtgtcattttgtttttgttgaaaaatatactcttttttttttttggacaaatgttgaaaactataaaagtgacaagatctgctgccaaagcttacataatttttattatgtattaatttatatctaatgttatacacgagcatttcatttaatttattttcgtaattaaaaattgttaaacacaggtttttgtttataaaaatattttttacaattttaattatttttggccgtccattattcatgtaagcatattacaacatttgaatagataataacaaattgtaaaattttatttttgaaataaactattttctaataaatttagaagtaaacggcggtcatctcattccgttcagtgcaaactaaattggcagcttacacgtatttgggaattaaattctcgaattcagaagaaaaaaaaatatttgcttgaaacatgaaatgttaaaacaaaagaaaaaaaaaacaagcaaacaaatcagttttttcaaagagatgctaaaattatggaggtagagtgggtgtaggtatggcgtgccccttcgatcgtttggacacttatcgtaaaaatcttataaattttgttccatgcaatactattttaaagttaattttgaactacattaagcatgaaatgtagataaaacattaaagcttcccaattttttgtccaaaaaacattaaagagatatagctgggaaactaaaggaggacatggaagataagacgttgggctgctggagtgctggttgttccaaattctatttattaattgtggccactgaaaatgaaatactacaattaagaattcccaaattccagacaagtgtggccttcaagaattggtcttatttgctacactttggtttcaccaagacaccgattactcagccccgttcatttactcattagagctggccagaatataacctacagtaaaacatgtactataatgtgtcagaattagaattataactaaaaatattaatccattgatttttcttgtgttttgtgagataatagacttccgatgaaataaattagatccaaaaagctgattcatttattttttttcgaaaatagtgataaattattattttaaaaatagcttttgtatatctagtgcgtcatgagttaaaaatgatagatttttcgctatcagtaatccaaaattttgatattttttgataaatcaggtgattttgaaagtttcctacacctaaaaacgaatcgtgaaactcaaaaaagcatattagaattcaatgctattagaaccatactaatcgtaacgaaaataaattactaaagataaatatcgttcatgtttggtcatacgtgtatatatatatattttttatcttttatgtaacacagagatatggagtctgtctatttttatctatgacgtctatcagtttaatattcgatcccgattatcataattgcattgtttttttttttctcaacctaagaataatcgcagtgttttgttctttgtcaacgactaattgagtttaaaataaagttaatatttgagagcgacgtaccaaaaggtgaagaagacatatccaaagcgactattcatattcgtgaatagagatatcatctagaataattgaccaaagaaaagatatttatgtcgttatcaaatatataaatatacataataattcgttatttcaaatattatttccacctaaaagtttattatagatttggacgtttttttttccttttcagaagaaaaacaaataaaacagataggtgtatggaatcaattcatccaaaaagtccaaatgtatggattttctttttatgtatgccacaatgtgactattcttagcctggttaagaattctgtttttcttaaaaacaacataaatggaggcatataaccaattcatccaaaaatgaataaaagaatttgtaacatttgagaataaaaaaggttaattaatggttagaaacataaatcatataggtacgttgtggctaatcttaagatcataaaatgttaaataccaaaagaggtaacgtcagagtctctgagccacaaataagtacagcttaaattgggcaaatcttgtagaagcagaattgcatatgtgtgtctggttaaaattcgtgtatagcttaaggagatgatacgtggaagagtcagagacatgagataatagtaaagagtaatactaaaaatcagtaactaacaccaaaatggtccaacaatcacagagaatgacagtagcaacaaaagtcgtttgttgaaacttgtcttcttctaaacgtacacatttcctagataggttccactcaaacctattatcattctatttcagctctgttaatctttatttagtgaactcgagtgttcgttatgtatatgtgaaaaaacttcgaagtgtcctcataataaagtaacagtcccgactaggcattgtgaaacaacactatatgacagaaaatgtgaaacacgactaggcatttcttgtcaatgtacctaacattattgtttctagtagatttctctaaaagcacatgtgattttcaccttctcacaccaaccagacgcttcttgcttttctcagtttctgatcattcttatgtttaataaggctaatatatcaaccaatttctttaaccacaacataatctttacataaaaggagtacttgttgatcaaaatcatttgaccaccattacttagttttcgacatttgaaatggaatcagaagcgatgaaacaaaatacacaatgtcaacggggatataagaatatataaattctacagcagaaacatattcaggaaagctcgctggaaacacgatctgggatcaccaatgatccatcttccagagatcttactgcattgtggccaaagatgaaaatagtacggccgttgcaattttgcacttgacgaagttaagtagttttggaatatgagttcagaagttaagtagatgaacaaacagaagtagtaatatgagttcagagcttccactaaagcgctttcggtggggttgacaatacttctattttatctttgaaatgaaagaagatctaaacatgtctctaaggcaaaaaaacaacaacaataacagttagaaaaaatgaaacctcttacgaccggttatcgggttggtcctcgtcttccttttcagggtcatcttcagtttcttcttctttcttctcttcctcttcttcctcttcttctggaggatcataaggcataggaggaggcaacggtgacttcataggactaaactttgggaatatatctggtctcctccctggctttggtctctcccattcctaccacaaaccccaaaacatcatttacataaaacaattccgatcactaagcaaaacgatagcccaatctctaaagaaaagaaaacacagcatcgttgtcactagatacagcttctctctaattgattcatacataaactcaaaagttctgtaaccaaagaactctctacacctgataagtctagcaagtaatgaacaatgaaagcttcagatagataagactcacaatctcatctgctaccaaatcattacctaaatcaaactgataagtatgatctacacaggcacaggacacgaatctgctcatgaaaatttcagattccaaatacaatctctcaagtatatttgtgacttaatttcaaatttctgtatcaaaattgacattacaagcacagtagcaatgtgaaatttcgacgaatctgtatgcaattttctataaggaatcgaagcaaagagagagactaacgatagggaaatcgagaggattgcgacgagtgagcttctcttcctcaggagccatagccaccacctgtaactgcttccttgtcttgcggcttagagcgaagcgttgaacggcgatgaaagagcacgagaagccatggttgattcgagagaaaggggaaaaaatagacggagcagctctgtttaacgacgatgaagatagtggcggagagagaagtggccacggcggcgaaggcgatgccgatatagaaagcggcgtcatagctccgcctcgtgttcttcgatggttcctatctgttccgtcaaacagttcatattattttctttatacttttaaaataaatcaaaattatcaattttttatttatgttattttataattcattccatttactttagacattcttataataaattaaattaaattaaatttagattaagaaatctgaaacccgaatcaaaatttttatattgaatatatgatacaaaattttgagttttaaatattttaggtaaattcgaatccaaatccaaaaacttgatccggcctgaatctcaagtcttaaaatattcaaaccactttttaatttccaaatctgaaatacccaacacgaataatctgacctgaacccaacacaaatagtgaatactcactcctgttaaatttgatgttatttttgaagtgtttgtttgcattttttttatttaagccgtctaaaatctttaaataatatatttgaaatttaacatgaaaaatgttattctaaaaaaatgaaaattaaattacaaaatagcaccatataataaaattaatttactacatagtccatttttacaggtttcatcatttgcttctactgtgaatttttaaatgaatacttaaagaaaaatatcataaagatatgtcgaattttgactaattaatagttcttgatgctatctgatgttttaaaacttcctcattggttatgtatcaattctcaaatctttgaccagtaccaatgacatgactagactcgccaacttatatatgtatagaagaacgaatatatggctaagtactaactactaagtactacgacgacaaagaaataaccattcacaagtctaaattatttttgctcaaaaatttaaaaatgatgaacgtttctctcaaactttcatttctggtttttattttggtcatcatgtctagtaagtattttttaatttatttaaatttaaaataaaagtcattaaaaatattttcaaaaatattttctatttggtgagttaaaacaaattcagaacatttaataagtaagtatactaagaaagtgatgaatgaatagatcttggatcagaagcaagggaactagccggtgttaacgagatattcgaaattgctgcgcgaagttcaaacaatgccggcaccgctagggccttgcagcaagccccaccttgcaagagggatgttgattgtagctttgaatgtcccaagggaggattctgcaatgatcgtcttggcacatgtgattgtttctaattgtattatttgatttctaatctacttttatcaataaagtttatccatcaattcttaagacttgatactaacgaggaaatgttttcaaaagatcggttgtgattacctttggtgaacctataatctttttcaacaaactatagaatattgactctttggattcccacacaacattaatctcctcacgtttatttgcatagtttctctcgctgaaaggcaaacctcgcagaactgactgaggaatgtatggtgaacccaagatctcgtttacaaaaccatgcagaattgactgagacttacaagttgatcccaataactcttccatcaatgtcaaccagtttactcaccaagattatacatacaaatggtctgaaatcactggcggtcattctcttttccaaatatgcggtccacacaactcataactcactatttagtttataagactgcaaagtttttatgtcgaaacttacaagatatggagtttggatgatttaggttgttcgtttcgtcgccgcagctatttatgttcgtttagttgccgcaactatctgcggtaaaacgcagcgttttgcggcgaaaatttttggacgccgactaattttagcgtcgataattaaaagctgcggttgcggcagcaaaacgaacaacaacctgcggtaggtttgtcgcagccgcagccgctgccgctgccgcaaccaccggcggtaacgaaacgaacatgcttcattaacttgatttattcttttattaaaaaaaattataactaactgcataaacttaaatatcaactatgtatataatgatacattatttatctatacggtaaaaaaaaagaataatattacgcactaaaattttgaagaagtgctactacatgtaaaactaaaatcagattataagaatctataatctaaggattgaaatcagattatgcacgctatatatagtttttatgataaattatttttgtacattatatattcataagactattccgcatattccacaatttcagccaagtaaatgttataatttacaaattattattattttcagtttttcgagttttgttaaatccaaaatcgttaacaaagatatttgaaattccacatgaaaatatgctatagttaattgctactaaatttacaaaatatcaagcaccatagaaatatctttttatactttgttacaaaagttatggtctgctagcttttctggtcaagatacacatgaccaattacagaaatattgttttgaattttgactaattaataagatctgactaatagtttttgatacattgtttacccttcatatttggtaagataacatctccaatcttgaccaggactaggcaacagcctgaacaattgatttgccacattataaatttatggctaaaagactacgaatacatagcaaactttcacgagactaaacattgaaaaatccaaagctcccattctaaaaatttgaaaatgaagaacgcttctctcaagctcccactcttgatcttcattttggtcatcacatctagtaagtttattttttcgtttgtcaacaattgtaggaagttgtttttgttacaagtgacagaaacaagaagtaaaaaacatatgaaaatcatactaactgaatatctaaaatatcgtgaaaacatattcaatcctgaatctttttaagtaataattatattgttttgcaatttgacaagttttaagagcgtagtggataattcatttctaggttttgattcatttttggtggaaaataacatttaccaacgagcaaaattttggtttgatcttgatcgtattaacttttagaacttttattagtggatggaaatttctaaccttaaagccattttgtttatgcaaatgatggatgagaagatcttggagcagaagcaagaaagctgaccggagttgctgacgtaattgttgaaggtgaagccgcaagtccacagtacggtatcatcgatgagaatgacactttgaacaaatccccatcttgcaagagggacatcgactgtacttttcagtgtcgcaggggaggattctgcaacctaatccttcaaaaatgtgaatgtttgtaataatatttacaatcgcattataatctaagtttatcaataaaagttatatatcaattcttcaaactatatactctcttatgtatttcaagattgataatcataatcggaagtcaaatctaaaaactcaatatactcgctttaattgttaatcattctgtaacccctaaaggagggagtagagagcgcagggaggaacatctttacttgttaaagtttatagacttgaaacgtattctctttgccaatgaatgataatcttgacctcaaagaaactgtttcttcttcttcttctccacagtccatagtcatcattttctagaacaataatggattcattgatgcttcttccaagccccaacttgtcgcatcttttctttattcatttacggttccatatcagtttgcagaagtaccttattttcgcgtactttgtgactctccaagttgtctgtctcactggctaaaccactaatgatcaagttaaaatttttgagttaatcaccaattgaagacaatacatattattgattaaagtattagggaataattaaaaaataataattagataatctatatattcatgttaacttttgaaattaatttttcaataatgctttgacaaagcttttcgttaattattttacgtctttttaatgtttcaaaaattaaatatggaagaataattcaatgttgctaaccaatatattatttgcattagacattagtactaattttagatatttttgtctattttatttatattttcttaattgttctatcaatattcataaatattttatgatacttttcagttaaagtcttaattattttgacagattctaccacaaatcacaaaaacaaaaattaaggtagattcatcggttaccatttgaaaatgtaaaaatttagtcagattcagctgaaaatcactaaaaattcagcctgaatcaacaattcagacgaatttagaaaaaatcattggttaccatttagatccttagtaaattttaagacaaaaaaaatccataaaaagtcgatgacgtatcgtagatattttaatattttcactgaaatttatttaaaagtgatcccaattctaatggtaatagattttccacccctaacatttggtagtaattaattctgcaaatctttctttggcatggactttccaacttacatatatggataaatatgtgctaaatacaacgacgaaatagcaacctttcgcaagacaaaaaaattgtttcaaaattcgaaacaaaaaattgaaaatgattaacgtttctctcaagcggtcactcttgattttcatttcggtcatcacatctagtaagtgtttatatacatatgtaatccattttcaaaaaaaaaaaaaaaaacgaagaagcatatttaatcctttcgaccaaaacaaaagcatattcaattacttattttacaacatgtgccttgttttagcttttgaattagtatatcgttttagagtaacaaatattactagagaaacaaattcaaacacccttatgaataatgaatgaatagatattggatcagaagcaagagagctaaccggagctggtaagaaactcgaagttgccaccagaagttcaaattacgcaggcactgcaaggaccttgttgcaagcccgaccttgccaaagggatgttgattgtaactttcaatgtcctagaatccaaggaggacaatgcaataatcaccatggcacatgtgattgtttctaattgtattaatcacattctaatctattttcatcaataaaatttatccatccattttcagattttctaatctcattttcatttcaaggttactaatcataagctctaattataaataacatcctgatctacattgacaacaacaacaaaaaaaaacaaaaaaaacagttttcatcacttatcaaggtctacatttgaggactctcctctttgccagtgataatcttgacctcgaagaagagactctttcttcttcttcttgtccactatcatcactgtctagaacaacaatggattcagccattgatgtttcttccaataccgaattctcaaactcacctcgcaaacttcttgcatcttcattttgattcatctccagtttcatatcagtttgcgcaagtacctcaggtttgctaacttcattcaactctccaagtggtgatctcagggacagttttcggcttagtctattgttgtcactcttcgcagcagaagttcgaaaactcgccaaagtatcattacatggctgcttcagccccagagaaagcttctttccattcaaatttggttttttgttttctttgcaagcagctgaaacaccacgtgtgagctcttcttcaccacacaagtctttcttttgagattgagaaggcaatgcaagagataacttcttcctactccttttaatcccatcgtttccaaacgaattcccctcgccaaaaccaaccactgcttttcttttcccattgccatcctcttgttcatctctccctgcagtctcacgtttcactgtatgtgctatgcttaaagaagattccactgtcaacttaagcttaacactatttccactttcaccagacttctcatctccatgattctaaagaaacaacatcaacatttacttaaaagctccactcaacacactatataagtataactaatttatgcaccttaatttgtaagctggtgctgcatccatcagctttaaccttagcatacttctcagtcatctctcgtgccttataatcaaaagtttgtctattgtatttatactccctgctctgtaaacaaacaccataacaaaaccttaaagaaacaaagtcaaaatctcaaaagaaaataagtctgtttccttcaagtagaaacttactacttcacacatcaatccatcatcaggatttggttcactaagcaacaatctcatactcgtcaaaactgtcgagatattcaacgatggttgccaagctccctatacattgttaaacatgattcatatattccatcactagtgttgaatatagctatcatgaagaatcaacaaaggcatggaggaagatgatgaagcaaagtctaaccttgggagggagatttagaatgtcaaggcaaatccggccactgttatcgatgtttgggtgataaatcggtgtagcgaacgacacaattggtggctgaaatggatatctaatagagccaaattcacattcagattcaaatcatcaaacaccagaatcgagtttgatagattacctctcagggatttgaatcttcaaattgaagattccattagcatatacagtatcttcaggaccttcgatttctggaaaaaaatcatgaatatcaaaacagatttgaatttgaaaattgaaaaaagaggatatgaagaaaagctgacgagcatcgatggtggagaaagtggagaaatcgccggagccattggcggcggaagagagatgtggaaacgaagcgccgtgaggtggatcggagaggagaagctttagctctttctgcattctcaggcttaatctcgctgcttgagccattgattcagaaacttcttcgtcttcacagctttctgaaaaacaattgggggcaaaagggattttgcagtgattggcactggcgggggaagatattttggatctaataaggtttaattttcacttttaacttatgggccctttgacaaaaaaaaacttatgggccctttgacaaaaaaaaacttatgggcccaaaaccaatttggcccaatatagtgtatacatgtgaaagtttcttaagaaacatttgtgttgaacatatataacaagtacagaaaaacaaaaaaaaacatccgttgatcttctatatttcttatgataataaagattataatcatagtcttgtaaaaactataataattgttataagtacaataaataaattatttgatttgcaatctttgaacaaagtttatactactaataatatgataatattattgaagattaattgtttatagctaaacaacatgaagatgtgaagatagaaaccacataaccttattattattagtatgaatttgatctaagaataataataactcaaatatattcgatctataacaattttgtgtcaaaagctttagattgattgttatttggaagcatcttctaatttttcaaaaggatgaaattttatcattttcactctctataaagtactataaactcaattaaacgacataatgaatcttggttcactttctattattgaatcttggatcaacttaattctaactagattacatacgtaaatctctttcttccatcacctatgtttctcaaaaaattcgacaactctttttaattttgattttgatttgaggatcatgaaatcttttagtagtattcctctacatatttgtcttcttgaaagattatatcgagaaacaaaattggtataagctttatatatttcactcaatttaaaacatgaaacgcttctagacactaatatcgagagacttcttctgccaacggtttccggtgccggaggagctctagctcaccggcgccgtcaattctccgattcgcatgttcagtttcttctttgtatgtctagcctcattgcttatctttctcttttcagtaatttttcccctcttttaaaactatctcgaatcctttcaaacctttggcttctggtgagaacttcaaccaacatcaaaaggaaaagatggtgtctggcgatacccatctatcaccttcatcatgcaacacctctgtggaagtcatctataacgatgctcttgcgttttcaatctatggtagaaccaccaacttatcgctttgagatctcgttatcccgagcatttatcttaacccaagcaatgtcgcacggcgagacacttctctgggatacgacttcactttttggattgactaggatcctctggttctcctcctctgcctcacctcacggccaaaaccagcaaacgtcgacctttccttcaccggagatggacgcttccctctcgtcatctccgtacaacagccgccaccatcacgaccttcatttgtctgaagggaaattaggtttacagctggtgggcctggttctttttggcccattaaggtatcgaatgcccattagtaaagatgatccaaaactgcctctcctaaagcccaggtctgatctgaactattctttatccatctttagtcaatctctatatcacttattggcttcaattgatcgtggacatcatacgaaccataatgaactagtgttgatatggttgcataagaactcccttagaaccctgcccttagtttcatctaggactttcgttactggctttatttgtttgaagaataatggtatcatgttcccaactccaacaagtcgatggtgtgatctttgtcacccaagcgccaccatatgtatatctccgacacatttaggtatctccttcaagcaatcctgcatcagcagtagagttaaggctcatatctctcggatctccaaagaagttcccaacctttttgagataattactgaaccttcgcctcacgcccttgtagttaaaggattgaagaaaatcggcattatgatcacgtctccaaggagcggtgattaccaacgcttcttcaacctttcccactcctatcctctgattactgaattcaagcaaaagcgattcaacattattaagtttagtattcatgatcttcaaagcttgggaaagaacggcattatgatctcgtctccatggagtgatgattaccgaagcttcttcaaccttcttgaccttacacccatcgttacccacctcctcggcgatgaacaactccagtttctccttctcgtgtcggcgagaacatcggccttggaaccttattcaacgtcatctcgtctcttgacagtgaccaatttgttgtccattgattcgttcgtggaagatccttcgactacccgtgacctcacatgtgccatcatgccttatagtttgtggctcaaagctctcatgaattttatgtcgtttcacattatctatcatatcttggttttggggaatgcctcttttaattatgttttaaactttgtgatctttgaatcactccttcttatatttgttttgatttgaataaatgaaaacaaatctttgcaaaaaaaaaaaaaaaagattatatcgacaatgatattgtttaaatatatcagtctacatttatcatcttctctgttagactcgtcgttaaatttctatttttttaatagtttacacagatgttttcatattctaactatttctttatataataaatttgtatatctagtagacggatcttcaaaaaaaaaaacaagttctccccacatattaatatcaaaaaaattcttaaataccttatcagcattttagatttaattatgagcaaaataaatgtttagagatatgaaacttaaataattgtatcttattctcaacaattaacgaataaccaatttggagacaaatctataaactaataaatcttgcttctctatagggtgcgcttttgtccctgttacgtatgaagtgacgtataatcgtctactaaactattttatccgtacgacatcagtttcctataatatttgtgtgacactataataaaaatgaaaaatcatgttcgtcgtatacctgaattaagcaacgtataatgaataaactttccataaatacaaaaatactcgattagtggagtgtgcatcgccaacaaaaaagattctacgcaacgtgtcgaatcagtacttgttcctgagttcctccgtcactaaccagtgcggaccatgtcagtatccaagcacccacacgctcgtcgtctcttgaaaacatctcacacaaatacacaacggctcggactaataacttgccatctaagaaaagctaattgacctaaggctttgtggcacctgcatgtaaaaagcaaacacgaatttgccacgttattacaaagcataccacgtcaccgtctcactgttacactatctcttgttctcctttatttcgctatggacaacaaaaattataaggtggggaagagatgtctcaaaatacttttttatcgtcctctcaatttatgtaactgataataatcgaaatagataaatttaattgtaggttgacaaagcgctaattttaataaaaacatatattagtttggaaaattttgtcgtagtaagtaattaaacctatcaatcttgactaataatttcaagtatcccataaaaatcaaaattgtccttaggttttgaaattgtactactgatagtacgtaattaaacaaacaaaagctatagcttgtggattatagctaatcccatttggcgatgagagtaatatatatattgttcaaataaagttgtaattaagattcgattgaaaaggtaaattatagtttaagaaaaacaaagagaggagacaacaattaaaaaaatgaaaagtggagaactgtactctcgcctatacgaggaggtcattatctccaaggctctcaaggattaaggaccatgctttgattctataaatgttgttttattcaaactatttatattattatatcatacgtaatatgtggttagcatttgacccacgtccccttaattaagtctagattaatcccattaatctatccaattaataattaggaaaattttatataagattgctattggatttctcggtggtggtttaaactataaaatagtaatgcctttgatgcgtgtgattttttattggaacttattggttttaattcttaacctagcaattatatttgtagtagtttatgttaatcattgtttaataatactcctataataactcttgcaagtagcaacacttgtgtggctatttattccagagtccatggatatgtatgtataagaaaataggagtgcttttgcagattgaagagtttgtctataaaatcatgtttacttggcatttagtgttattgtttgcaattttttattttaaattagtcggatattttaagttaaaatctgaatacacagcatgttccttctaacgttttttaacataattgtaaactaaagaaaaattataatataataaattaaattataccctctctattcattgtagaagatttgtttgtttcaccaaatgtgttttttttttataagttgctctcactcttgagagttttggagtattttgaagaggacgaggttcttttgtgaaaaagtgaaagaaacaaatcatgtcaagaattagaaagaaatcatgacaaataattttgtttgtgcagaaattacaaatgaatcatagatatccttctaattcgggatcggaaaccagttgaaaaatcgatggactaagctttctatattgggactagcttacccttagaattagtcaagcagcttaaatcatctatgacttaaaattataattaagaaaaaacaatgcctaaatatgcatatatttcaaatgtatcacataacttgtgacataagaaaatataaacaaaacaaaaagggcaaaaaagacctgaaagcttagaggcacacctgcataggtcccacagttcactcgtgacaccgtaaaaggcaaaacacgaacccgccacgttatcacaaaaagcaagccacgtcaatatagtctcactgtcaactacacttaacttactattttcacatctcattttcctatctttatataaaccctccaggctcctctttaatttctttaccaccaccaacaacaaacatataaaccataaggaaaacagagaaagagagagatggaggacgacaatagtaacaacaacaacaacaacaacgtgatcgcacctttcatcgtgaaaacatatcagatggtcaatgatccttccaccgattggctcatcacttggggacctgctcacaacagtttcatagtcgttgatccactcgacttctcgcaacgaatcttacctgcttatttcaaacacaacaatttcagcagttttgttcgtcaactcaacacctatgtaagttaattcataaccgaaactcatacatgaaactggaaacaggggattacgaactaatgatcctttctttatttactttaggggtttaggaaagtggatccggaccggtgggagtttgcgaacgagcattttctaaggggacagaagcatttgttgaataacatagcgcgtaggaaacacgcgcgggggatgtacggtcaagatttggaggacggtgagattgtgagggagatcgaacggttaaaagaagagcagagggagctagaggcagagattcagaggatgaaccggaggatcgaagcgacggagaagagaccggagcagatgatggcgtttctttacaaagtcgttgaagatcctgatcttcttccaagaatgatgctcgagaaagaacggacaaagcaacaacaacaagtttccgacaagaagaagcgtcgtgtcacgatgtcgacggtgaagtcagaggaagaagaagtggaagaagatgaagggagggtctttagggttatgtcatcatcaacaccgtcgccgtcatcaacggagaatctttaccggaatcattcaccggatgggtggattgttcctatgacgcaaggacagtttggtagttacgagacgggtttggtggcgaagtcgatgctctcgaattcaacgtcgtcgacgtcatcatctttgacgtcgacgttttctttgccggagagtgttaacggaggaggaggaggaggatgtgggagtattcagggagaaagaaggtataaagaaacggcgacgtttggaggagtggtagagtcaaatccaccaacaacaccgccttatccattttctctgtttcgaggtggcttttagcgtttagcttcacatgatatatgatctttagactttattattgttatattattattattatttattttttgtgtgtttgttcttaattattttatgtataaccaaaagaaagaaagaaaataaggacagatccatagttgagtcagtagtcatcgtttgtagaaagttttgacagtatataatttctgattatatttgttaaaagttcatatgttgactttgttttccttttaaaagtactttcaggtgacttgtgtaatatattcacacttgtaataacaacaattttgatcttcttcactacttcagtgttttgatttttgaataaagtattattgtagccttatatctttgtaataacaacaaaatataggctttactttttccactttaagctagtaattaagtctatataccatttcaaatttatcgttaatggccatctttaaactaaaccatatcgagtatttgactctttctcttgaaacacttgttctcaaacacattaacgaatcagttgacatggtatatagacttactagcttatataacccacatgcttaaagctgatcataaagtagaagaaacattgcctatatataacccacgtggttaaggcgacacaagtcggtcgactgataacaagtcaacgagacatccattcaagattcaaacgtatcatcaacacgacgctccactttcactttcatctaaaattgataacatgacattgttaaattttgagacgtgacagttagccacgggactttggtcggccaacaacgtttcgaacactcattgggctagagagagagagagtataaaacaacgataaatctaaattggaccacctgatgtctctcacacgaggacgcgtggttataccagataatcgcaaaatctcttgtaagatgttcgggtccatactttgattgtcggctctacgatacgctcatacgcatacatcatataaagttactatcacaattttgttttgttgtttatgattgattttttaacacttcgataatacttatgttttcttttgttaaaatacttaaataatattattaaagttgtaaagattcgtaactttataaagttttatgatcttttactcaattttataaattaagtattcacttattacttttttttttttgttaaaagacttgtttacttatttgtgatgtagttaagaattatcttttatattaatttatgaataatattttatatgtctttaaaaaaaaaatagcgaaaaatttctccaacttaataggagaacaaagttgaataattttcttcttaataggatattgaatggtctagtatccattaaaaactaagtcggcctaaaatattttcattttatactattaattagctaacaacatatactattgtttatcaaagaaacaaaacatactattggttgtggattagctaaccttatttagtaataagagaatagtttttcttgtccaaatcaattgcgtaagactcgacataaatggaaatatatacttaaaaaaggaaaagagagaatagttgtaagttgacaaagggcgaaccatctcttgccggttggaggaagtcattgtcacttaggatctagcgaatcaaggaccattctttggtgctataaattgtagttttattcaagccatgtaacttttttggatttttataatgcacctaacatgtggttaacatttgacccacgtcctcttaatttaaatctagctacataattatgcattacttaattggtaaattttgcattaggatattggttttcttggtgatggcttaaacaataaattagtgtatgttagattttgattggattagaggtttcaattcttaaccaagaatcttttccccttaaaaagtgctttctttttatgaaaattattgtctctataaccaaatacttcttggcttcttgcgcacttagtgccaaatcatttgtttatagtaacgtcttatccaatcaatttcaaaggaaagggaaaagatagaaagataggttaattgacttgtttccaagatatatattaagttcatttccatattcaaataaattcccaaattattgtctaaaaagttactaagtttttcaaatattaggttttggatattcgattttgatcacttgtaaactctttctgataataaattctggaaaaggtctcaatgagtccagctaggtgatgaaggaaaattcagaagcacaatcatcttaagggttgtagaactatggtgatgttcccaagcatacatggtctagtggtagaagaagttttggtgtaagggaaaacttttagatccgagttcgatttttcttgtaaacaaaaacacaagtctgttagttggggtttgacctaattggtttacatggtaatcagaaatgcatgcggcttcactaccctttgacattagtcggaaagcattccaaactcggaatagtgacaattcgaggaaaagtccactccaaaacattttggtacgtttccatccggactaaccggatcaaccgatagagtttatcaaacaagaaaaaaaacaatggttttgttaaacaagaagagaaggaagtaaagttaatcatttgatcgtcaaaatatggcgtaaaggattgtatgcattttggttaacttaagatttgggatcttgaattgatcactttcaaactctttctgataatagatatcgagactatccagaaaagatttaaggcttgatcaagtgccaaaaaggttttcggtatccaatatgatggaccaaaatcttgtatttgaatatcgaatgtgtagaaggttgacaagtttggttcgaattcgaagttcgaaccaaacgcaacacttttacatgaaaatcgttggcaccataaataacactactatgaattaaaagaaatagaaagacattttacaaaaaaatatgagaaaagtgaaaagacaaaatatcaatatagttttatacaacagaaatagatttgatcaaacaatggaagttgaaaccaaagcctctcctcctacaagatcttgagggggacaaaaacataaagaatatatgatgtaaagaattgaatcaatacaatttgtaatactaaccaattattagccatcagaagtttcttttcactgcgagaaaactcgaagcccggcctctagatcctccaacttgattgtacaaatctcttcagtgtcaacacactcaaagctaagtcggagatcaagattctccctcgcgttaacaagtaacgtgtccaccaatcctccattcatctctttcctctgcttttccgttgtttctgcctctatcagtgacgctatctcctgcaaagtgcaggactcatgcaatctgaaaccatagaacagagtgtcctctccttggttgttcatcttgatgtgtagtatctgcgccagttccttggcactgaagtcgctgaaattgaaaaactttgtgacccttctgcaaaacccttcgtttgatgcgatcacacgcttcatgggctcgctgtatcctgcaaatatcaccacaattttccctgtgtccatgactgacatgatttcttccagagcttctagaccgtagtccttgtcgtccgccttttgcatcgggatcaatctgtatgcttcatccacaaacagaattcctccctcagcttcttggatctgtccagaaattgaaagttttagattcttgaaaccaaacccacaagtaaaaccagaagattatgaacagtgttttcacctttctcctggtctttggtcctgtatggccaacaaactcacccaccaaatctgtacgctgtacttctgttaccttatcagttggtaaaattccaaccgtgttaagcagcttcccgagaactcgagctaccatggttttacctgtgttttggatcaacaaaagcagtcatgtattggtttgatttaaagacagagatgtataatcataaaccattatcctttcacctgttccagggtttccaagaaatgccatatgcggaggtcttcgggttccaatatttagcccaagagcccttcgcctttcatctaaaagcattcctttcgcccatttcctcagttgtgtcttcagctcacttaatccaacaatatttgataactcatcctcaagtagttccatcttggcttttgtcttaccacattgctcaagcgcacttcttttcctctgctcttggagaaaccaccgcagtaattcccgtaacttctcactgccttgcccttgaggcagatggtccaaaggagtcatcccttcctgtaaatacaaactcccacagctattacacaaacaataccataattccctaaaacaaaagaaaccaataatctcagaggtggaacatacattatcttttgcactgcaatctgcgttatgatcaagcagtgtcttaacagtcgagatctctttagcagtaattgagtaccataccgcaagatgcaacggtgtcataccattctacataaaaaccaaaaccaaatcagtccaaactatcgtcatagttgttacttcccaccttataatcaatcaaatagaggaaattacgctggctttagcttcgataaaagcaccactctcaaggagtagctttgcagcttcattacaaccgttcttagctgccatatgcaatggagtctcaccatactaaacaacattgaaaacgatcaatgacaaatcaaaagctcaagcaaagaagaaaacagaaagcaaaccaaactcacagtattcattgcttctaactcaactttatcagatccagtccaagcgagaagatacttaacaatatcaacattaccattaccagcagaaacatgaagtggcgtatgatacatctgcaatactaatcaaagtcaatacaacacacatttcaataaagtttgctttttatagattcacatgcatatacaaagcttgaagatcatgaatcctgtcgagattcgaaatcagaccctatctaaaagttcaaattttgcatccagattccaaaattcagctacaatctaaatcgacccaccgaatcaaacacatcccggaatcaaaatgcatacataaagaaagagtcaagatttggacattacgacgggattgcgttcattgagaagagaaggattgtctttaagaagtctctgtaaagcaataagatcgccggagagagcacaatcgtgaattgtggtgggtctagcggatctcagccgctgccctccaccgttttgtcggttcatttctcttcttcttcaatcctcaacaacaacaagaagacgaagaactcttttcttccaccaaatctaatctcttttgggaaagattctctcgagaggattttgcggagaatcaacactatcgaagaaatagattagagaatgagagtacctccgcgtcttcctctttcgtcactagtcttttctttggcgtctcttctttcttcatggtatttgaaaagactaatttacccctacctgactttttatgtttttttactttcctggcgtcttcctaaacccagctaagctttggttgccccattatttcattgattaacctaatcatataatcactattacaaattacaattatatttctcatttcactcttaactaacttttttaaaataaaaaattatagctacggccgtaaaataccttatagattaaatgagaagtattcttaaaatttcattatcttttttaaaacaaaattatcatgttgatgtatcatttttggagaaatttttagtctatttaaataattatctaatttttagtagactatttaaaaacttggccattagtgttatatataaataaatcaaacatataggaaaacgaaattcaaatttaataaatcaaattttgaagcaaataaactattcatgattgtttgttatttaaattagaaaaaatacgttgatttattaaatttgaacagtttatttgattagaatttaaaaatatactttaatacttcagattttctataataatacaattgatttgatgatttgattgaggtagccaaatgttactgatccattcagacacatatgcatactacacataattaattattttctttatttttttatctctttctagttcagaaatttcaaattaataactttattttatacgaactttacttagttttatctttgtcggtggtcaactacatcatttgttttgtaatctttcatgagttttcttttgatcagtttgagccattattgtcgatcatactacaacaactcatctctcttacgagtcacagtaatggattgaacaatgtgaagatcctcttaaagcttgcaagtcctcagttattgatcgctcttatctcccatttacccattgtgaagcagagggagtatacgttattgtttcattcaattctttgacattatagtgaatattctcttctttttgtagttgccatttgcttcagattctaatagcctctcacaaaccagatgttgcgccaatgttggtccaagagatttccggtttttttccccatttcgccacacacaagtatgcaaattttctcgtaagacctgttgttgaatatggagctggttctactgcctcattcgtattgcgtaagctctcttgtgttttggaagcttgatggatgactgctatggaaactatgtcctccaatctatcatccgaaggtacgtgataagctccggaagcttatctaagatgaaaagaacagaaagaaatggagggagagaagtattgcacctttacggtgaagaagaagagagataagagagaaatttagattgatattgttgttgatcgttttcgatagaaaaaatgtttatcagctacacggagtacaagccaacacatcgccacacatgcagactttaaaaatgtctcgttagctacacgaaatattgacatcacatacgaacatacacgacatcctactttgaccagaatccggcattacccagtattaaccggtgttgaccgatattgaccaaaatttgataagaagaagaaaagtttaagtagaagacaataaaaggaaattgggcttaacactaagcctaaatcaaagccccactaaagcccactcatcttcagttttggtttgtatcagtatgctgcctttgctccgagatatcagatagagaggctgaacttgaggctaatgtttgggatagggaagtaactaaaactttggagtacattcgtaataccaatgtttgaggtatgagttactgaacatcgtagaaattatcattagcttcatcttttttattaccaaatctcgatctactaacatttttaccggttgcatatctatgtccttcatgtaacttcagttctgtctacttcctcaattgaaagtgaaagtaatccctaaacatgaatcttcatcagcgaataatttttaatttttttattgttttagaaaaaacaaatctctccttaaattttgttttcttttagatacaacattatttcattttaaccatgtatagtatagttaaaacaacgtaattaactaaattggtaaatataccgggcgtaaaaaacacctaatatatatttagccacatgcacaatacaagatatatatgttgcatttgcaatctacattttttttttatcgtaactgtttctattaaattgagattaaaatataatcgaaattcgacctatgaatccattaagtttaactggatatactcaaccatagatctatttatatttaaaattttaaatagttccacctattagcacacaaattaattagtaataactttatagttgtattagaaataaataactaactgctagaaattcaatgacaattataaaatttaattgtttatgagagaccacagaataatatatattgaaattaatgaaaataaaatttaggatatatcagaataaactcaagatttgttgtccgaatctctatttttaatatggcagcttcatgtttaggttgataaaaataagaatataagtgggtggatatagaactggtaaaatagataaatcaagagtagctaaattagaatggtgccaattcaactaccacagactactgcaacagatctaacccatttctacatttaaaaagatgtcctccctcttacttcactccttcctttaaagtttcttcaacatttaattagaaaagagttacttgtgattcttttcaaactgtaaaaagaggtaattacgtttctccccaataataaataaatctctttgtttttcttcaatattgtaacaatttataaatactaccaatacgtttatttcacttaagcttattgtgtatacaatatgttattggatatttttatatttaattttaccttcaattctctaaacaatcaatatacaactatctaagtatgtttactagcaaataaataaagacggtggaaaagaacctaaactcaccaatgcgtataaaataattatgatgtgagcgggtattgatttttaaaaatagatttttagttttgaagataattttgattctaaagaatccaaaaaatataataagatatagatagattaagaaaactatgaattttttttggtgatttaaataaagaagaagaacggcgtgtttcgacggacaaatgaaaaaagttgaacgaaatttgagaactacgaatatattaacatcttcttaaccacacacaacaaaagaatatgtaaattctgatcttttagatggcattcacttctaaataagaaaatcgaaattttctgaaagaaacctgaagatttgaaaccaaaacctaaacttttcttcggaactatataaaaaggttgagtattattaaagtatttttcataatgatcataaacaaaaattgtaatggaaagatatattgaaccttgcactaccaaacaataaattgaattctacttacaagctaagatcatcataatttgactatcaataatttcatgctcttttatgcagaaagatgttaagatcgaaatcattattatctgaaaacaaactagagatcaagaaagcagtactactgatattatcaataatttttggttataaaactgctacttttgtattctcaactttttgattctttagacatgataactattttgagtaacggacgacaaaatataatatcattttctcaaaagtagttttgttaccatttgtattttgtagcaatggtaattgatggttgcctgcttaaagatactttaattattacatctacacatacataatccaactatacacccttaaatataaccatcccttggctttagtcattaaaaagaaaaaaaagaaaaaaaagcctaaagccttttcagcatctatttaacataaagcaagagcttccggaggacaaatcaccaaactcaaagaagacaaaagtaatacaaaaaaacagatctgttcacgacgaaaataagagaagatatggttcttagaagctcaatctccaacacaagaaaactcttccaaaaaactatcgacaacttcaagtcattcttcttcaacaacggtacttatcacaaactaccaaaaacacctaacaacacctctaccaatattaataatgatcatccaaactccaacatcatcacatcatcatcatcatccatacacaagcaatttcaacctaaacccaaagactatgtgactacaaacaaagcttcgagtctacaaccgagaataggagacagagacgagacactcttttcccaaccaaaggttaatctagttcgtacaaaactaaaggagatggagaaaatgatgaatgatgatataataagtgatgaatattatgtctcagatgtaatagaatttttgcattgctactctcgtcttcgttacactgcttacctcgacgtggttgagaattttttcatggaggtctactctgatttctttagccctcatcatctcgtgggcacccgaacggctgtacaaagaaggtatcccgcggttgttggaattggatcgtacggtggccataaacattgatggagaggttcaaatatgataagtgattgttattatatttgttttatttttactttttctgttttcttcatatatttgtttaactttgtgaatcggtgattgtacatggctatacttagtagtgttttacttttataattttacaaataataattgatgaaccttttcttctatcttttttgttggtttcggtaatccagcttttaatttttgtctgaaattcacaataacatttgatggatctttttgttttttgtcatcgagtatgtataaaagttgacctttgacgtgggggttttaaaaatagaaaaaaaaaaaaaaactgaagacatggcgcgtagtaatagatgtgtaccccaaaatagttccattgtccaaattccgatagaagaagtattcaaaactcaactcaagtctcggtggcagcagatcacaatgtcatctgcttcttctccaccgccgccgcaggttttcgtcccagagccacttttttccgaacccccgcctcctcccaaagcacccgttaacgtttccctatctccaccgcctcctccgcggtctccctccacatccactccacctaggttgggaaatcgaaaccctccacctccagcgagtccctctggccaggaacctacaactccaactatgaccccaggcttttctctatcaccgccgtctccctcaagattatcaacgggagctgtggtcgggatctccataggaggaggagtttttgtgttgactttgatttttttcctttgtaagaagaaacgaccaagagacgataaagcacttccggctcccataggtacaacaaagatctccattagaagaataaatggattcctgaactatatattgttgctcatttcctatgaatcaaactctctttagggcttgtattaggcatccatcaaagcactttcacttacggggagctagctagagccaccaataaattctctgaggccaatttgttaggagagggtggatttggattcgtatacaaaggtatattgaataatggaaatgaagttgcagttaaacagttgaaagtagggagtgctcagggtgagaaagagtttcaggctgaggttaatattattagccaaattcaccataggaatttggtttcccttgtcggttattgcatcgctggtgctcaaagattgcttgtctatgagtttgttcccaacaacactctcgagtttcacctccatggttaggaaaacaaaacaaaactctcttatggtttcttgcatgcttgaatgctttaaaatgagtactgatggtttttatttgggaattgaatttgtggtagggaaaggacggcctacgatggaatggagtttaagattaaagattgctgtcagttcttccaaaggattgtcttatcttcatgaaaattgtaagtctaagatcatttttaataaatattggccatgtttgttaatttgtcacgcatgtatatatattcgcaggcaatcctaaaatcatccaccgtgatatcaaggcggcaaacatattgattgatttcaaatttgaagcaaaggtacgatttatctttctttcttttttaagtttccattaagacattgtgattatatgtaacttggtacgattattttcgtcaggaaacctttgtgttttgtgtctttattctatcttttaggttgctgattttggtctcgccaagattgctttggatacaaacactcatgtatctacacgtgttatgggaacctttgggtaaagatcatcttgaatctactaaatatgtacatttatgctcattttgtacttatttttgtgatccttatatcatcgtagaaattactgaaacttatggttatgggattttaggtatttggctccggaatatgctgcaagtggaaagcttactgaaaagtctgatgtttactcattcggcgttgtacttttggagctaataacgggacgtcgccctgttgatgcaaacaatgtctatgcggatgacagcttggttgattgggtaataaatataactgcaaataatttagccttcacatgattttaccatttgactgttgaaaatgatgcaaatgctacgtgtgcatggaagtaggcacgaccattgcttgtacaagcacttgaagaaagtaactttgaaggtttggctgatataaagctgaataatgagtatgatagagaagagatggctcgcatggttgcttgtgctgcagcttgtgtccgctatacagctcgccgaagacctcgcatggaccaggtaacttaattagtctttaattttcttagcaaaaaaaaaaaaactgtctttgttttaggggttgacatttggtttttcagttttgaaatatgtaaacggtagaaccaaaatatgttcagtttttgttttggttggttatgaatacaaaaattaccaagacataaatcagattttagttttaaccaatatttatatatcttataataaaatatatttatagtatagagctagtgtataccaaaaatatgattttgattttggtcattttggttggttcggtgtttatgcctatatgtattttgttgtatacatagtataatatatttaaacaacattacttgaataaaactgacatgaccgaaaagtggggcacatgtcttcctagccggaatgttttgttcagtttgcaaaataggagtcaattaagatgttaataatgcgaacggctaattggtgtaaaaaatgagcaggttgtgcgtgtgctagaaggaaacatatcgccgtcagatctgaatcaagggataacacccggtcacagcaatgtatacagttcatagaggaagcacatattatgatacgagaacaatgtagacgtacacgaggaagtttcggataaaaatggggcacggtgggcgagtacagtaatccaactagtgactatagactgtatccgtccggctggacgctcgagcagtgagggtcaagccacacggggaaatggattcgagatggggaagatttaaaagaactgctcaacgttatggtggagattctctttaaaaaaagagggaaaaagatgcatggcttttttgcattttgtaaaactgtaatgatttgatatttgagaaaatagattaagtctgatgtaattgaaccaacatctatatgttacattttttattttttttggtgtctttctctaggggttgtaatgtgctcaagattgaggttggatattattctctcattcttttctattttctctgttatgggtttgatgctgaaatgttgaatatcagtattgggatttcttcttgattttgattgttcttgttggaacttttcctgcagcattgaagatacatatgtatcatagtaaaaaacaacacacaattgattttgtttattattcgttttgattatttggagcaattgataaacatgttttggatgtgatggtgaagttaattaaagatttctggttctggattcgctttttagtactcgtattacttagatgatccttatacttggtgttattaaaaacaaaattaatgatgaatatcttttttctaacaaacaaaaatttactttagttgtctttctttttttcaatcctcaaatataccatttatgtaataatcaccgattacaaaccaagtgtttatccttctaactattgggttaaaccaaatgtggagttcaattatctaaaaatagcataatcataggaaaacggatagcaaggataagaatcaaagaaaacaattctcgatgcgttttctctctcgggtaccattttcgaggacaacttcccaatcaaactttccgacgtcggtggagctcttactcaccggcgtcagaagatcccaaattgcttcaatctctattatctttgcatcacttttgtaacccttttaagcttttctctccatcttcccgaccaccacaacaaccttccattaaatccatcttcaattctcggagatcacttaaccatacccttcaacgttgcttcactccgtcgatctacttcagtggcaactgtcgacgattattaccccgccctagtgctaacgagatctctcacttccaaatctgcagttcctcaacccaaatggtaccgtcactcgtcgatcttgagtctctggaccacttttgtgccacaacttccggtgaagtttcattccactctgatcttcaactcaccgaagtcctgccgccacagtcaccaactcttcatcgcagccacagagacactagggttcctgttattgggcctcccccatttcagcccatttctctcttggcccattgtcataagtgacgacccacctcctttatctattaggcctaggttttggctaaactttcccctgttctttctctgtcaacgtttgtgtcgattgctgaaaataattgttagatgtcaattaatccataatcaatcatcgttgctctgctggtacaaaccttctttgagaacctggttattagagtcacctagggattctactcttgtttctagatccttttatcgaagccatttacaaaggttgagaaagtgcggcattatgatcccgtcaccaaggtgcggtgattaccgcagctttctcaccttccaatctccgtctcctttgttcactgagttctctcttatgaaatctatcaatttcagtgataaattccttatgctcatgaaaaccttgaagcttaggtcttgtaattttctacttgtgttaaaccaaagactaactttgtgtgacattcttaatctccatagtcaaagacattatgcgagagagaatccacctgttttgttgcagtttcacacatatctcttgcgaatcctggttattgtttcagcgatttttttgagtttgactacagacccttactccttctcaacgtcattatgtcttgtgacaatgaccaattttccacttctcggatcgaccgaagttgtgtctccgatttaccttcttctcgtatgtggcattgtgttctacaacttttgtctccgagttagcatggttttatcatcggactattgtatttttatctttattgcttttatttttgttgtactaaagtctgagaatgatattttcttaagctttgtactaagtttgagtgattgaacgaaaacaaagtttattgacaaaaaaagaaaaggaaaacggatagctttcttggctgaactatagcaaatgcaatttgcaatgttttaagtcgttaaggtactaactactaatctcaaaagatgaaaaagattatataagtgaataaaatatcaccgcaaagtgtttatatgcatactttatctttcaaacataccagtttccgataaatatacaacaaaccttgtgtttacgatgtaatggtgttctcaattaaaaaagaaaagagagcacttttctatataacaaatacaagttgagaaaaaagccaaaattgactggaccgaagctgtaggagaatgggggcgataggaccaagggagagttacaattttatcacaagcttgtgtgtgtatgttttgtttcttttctttaaatttggatgttgacagctttaattttttcctaaaaatatacactagaaaattagagaatatttagaaggtgagaccagcgaatgtcatgccacaaatcatgttcataatgttataccaaataatcataatgtccccatgtgacgctttacttttctatattatctcgtaaccccactcatacgttttagaagaattttcacacaactaagataagttgatttttgaggcaaaatattgtttattttttctatcaataaatcttcgtaagactttccaataagagaacatttttcttattcctctcgtgacagaagcaaatcatcccatccacacaaagtcacaatccaagacacaagcccaccaatagagactccatctcctcactaaattcatctacaatagtaattcattattgctattatgttactataattgctttaaaattgtttcctatgaataattgaatatcataagcaatatgaacaaagaatgatgttcaaatcaaaattcgaagataaggatataaagttataatcgtgttgagtcatacacttcgagctaaagtttttctttaaacaattgatttagctaccacttaatctagttggtactgaacaagtaacaacataagtagaagataaagagaagagaatatcttactttgggactattagccatgatgtccacgaccaaatcggcctcctcaaaatcaatttttgtctaattttgtaatgtgagactttataacttttccataatatatagcggacgttattattttactcaaaattgtatgtggcttccatttgactactaaatgaacaatattatgaaacaaataaaatgaacaaaaaagttgaacaaaaaaaattatttgaatattttatttagaaaaaatctgttcaataatatgcaaaccaaaatatctccggcatgtgtaaactaaattgactatactaatttaacaaattatcaccgcaattacgccgcgttgaatttgtttttccttagatttggcgtgggtcatcgaatgtttaattaaattaacataaaaccaagataggccattgaccaaaatacaataatattttcataaaaccttatattattttctgaagagcaaaaacattatctgagaatctggagataaaattgacgtgacattaagaaccttaatcgaatttgattaacaaaatatttctttgttgcccgtttcaattttagtggattattttggtgtaacttgacattttagataattctattaataatagattaggggaaatgtcaatgtaataggtggcctcgaatttgtgttggtgcactccagctgtcttccttcgctttggagcaagtagaatcccaactattttctccacacttaaaaaaccttaaattactcattctcaatcttatattttctataaacgcaaatattttatgaaattttatactattaataatctaattccctaaatatatatatattttgcattttttacatcatatctttttttgcctaaaattttatacgagaaattttatactattaagaatcttattgcctaaaattaaccacttctttttttggtgttctatttcatgcaccgatattaaaaatcgtaggaatatcgatggccaaaataaaataaaatggaagaggatctaaactttgtattttatactggtcctagtcctagaaaatcgaattattcagtgttttcattaaatgcatagttcaacatattatttggcatgatagattgtctgcaaatgacacatcacttttcctttctgcaaaaataaaagactctataaagtaactttagaatttattcagttcctcaactcgatctagtccctttaattaagcaaacataattatttaaacaactcttttgagaaaacattttttctctttggtcaaataacaaaacaaattaattcttatttctacattcaattaaaaacataccaaaacatctattaacttcttaaatattttttctcaaatttgtagtccaaaaaaaacacgacgcgtatgttttttttgttgttgttgtgtaataagaagagaaagaacgtaaaagaattgacgcggacgaatcgtgttagacccaaaaagaacagctttcaattccattgtccaaattccttatcaaaaaaaaactctactctcggtggcaccagatcactcctcctctctcttctcctacctttttcacattctcttcttcttcttctcgtgagaaaaagaaagagagattctttattcattagatcgaagcaaaaatgtccacagcgccgtctccaggcactactccatcaccatctccaccgtctcctcccacaaactcgacaaccaccactcctcctccagcagcctcttctcctcctcccaccacaactccttcttctcctcctccgtcgccgtcaactaattcaacctctcctcctccttcttctcctttacctccttctcttcctcctccatctcctcctggatctttaactcctcctcttcctcaaccttccccctccgctcccatcactccttctccaccgtctcccaccacaccctcaaaccctcgaagccctccatctcctaaccaaggaccaccaaacactccctcaggatctactcctagaactccatcaaacactaaaccgtcgccgccgtctgattcttccgatggattgtctaccggagttgtggtaggaatcgccattggaggagtcgctattcttgttatactgactctgatttgtcttctctgtaagaagaaacgaagaagaagacacgacgatgaagctgcttactatgttcctcctcctcctccatctggtcccaaaggtaaattcaaagatctcaacttcatgaaataaaaatcgaatatttaaccatagttgttcaattctgatacgaattgctcaaatctgatacttgattatgcattgttatctgttaaagagattacctttgtggaaaagtttcaaactttacagagatttgatgttgtttatcagctggaggaccttacggtggtcaacaacagtattggcaacaacaaaacgcgtcacggccgtcagataatcatgtagtgacgtcattgccaccacctaagcctccatctccaccacgaaaacctcctccgccacctccaccaccagcattcatgagtagcagtggtggttctgactattcggatcttccggttcttcctccaccatctccagggcttgtgttaggcttttctaaaagcactttcacttatgaggagttgtcgagagctactaatggcttctctgaggctaatttgttaggacaaggagggtttggttatgtgcataaaggtatattgcctagtgggaaagaagttgctgtgaaacagttgaaagctggtagtggtcagggagagagagagtttcaggctgaggttgagatcattagcagagttcatcacaggcatttggtttctcttattggttattgtatggccggtgttcaaagattacttgtctatgagtttgttccaaacaacaatcttgagtttcacctccatggttagaacaaaactaaactctttcttttgattttgttacattgctttgttgttttcagttagtgatgatttgtttgggaattgaatttgttataggtaagggacggcctacgatggaatggagtactagattgaagattgctcttggatctgctaaaggactttcatatcttcatgaagattgtaagtctaaaaccttaaaaattatgtacagatgtttgataaatactgtctttgtttgtcactgaggtatatatataaatatttgcaggcaatccgaaaatcattcaccgtgatattaaggcgtcaaacatattgattgatttcaaatttgaagctaaggtatgtttactcgatatgttttgtgaagtgtttttgtaatttgtgtcactaaagctcttctttctttcaggttgctgactttggtcttgccaagattgcttctgatacaaacactcatgtatctacacgcgtgatgggaacctttgggtaaaaatcatctttaatctactaaacatgtacatttatgcagtttgcttaatgcatgtgatccttgtgcaacaagttctgaaacttttggttttgggattttaggtatttggctccggaatatgctgcaagtggaaagctcacagaaaagtctgacgttttctcatttggcgttgtacttttggaacttattactgggaggcgccctgttgatgcgaacaatgtctatgtagatgacagcttagttgactgggtactttactatgactgcagataatctaaacttctgatttttctacaatttaactgttgactaaagcaaaagctatgtgtgattgatggtggaacaggcacgaccattgcttaaccgagcatctgaggaaggagattttgagggtttggctgattcaaagatgggtaatgagtatgacagagaggagatggctcgcatggttgcttgcgctgcggcttgtgttcgccattcagctcgccgcagacctcgcatgagccaggtaacttaatccttttctctagagaagagcatattggtttggttctgtttatttggtagaataatatgtttccgtatggttttaaagaaaggttttgatatggtttttgtgagaaagatcggttcagttatgttcttatgcctagccctactttttgttacccatcatcatactatctaaacaacaccgattgaatatgtcaaaagaattggctgcagtttcttttgttttcattttgccaaggattgtcattttaacatatgttaatgctaatggagtgagtgatttgctgtacaaaatgagcagatagtacgggcgttagaaggaaatgtatcgctgtctgatcttaacgaagggatgagaccgggtcacagcaacgtatacagctcatatggaggaagcacagactatgacacgagccaatacaacgacgacatgataaagtttaggaaaatggctcttggaactcaagaatacggcacaaccggcgagtacagtaatccaaccagtgactacggactgtacccgtctggttcaagcagtgaaggtcaagccacacgagaaatggagatgggaaagattaagaaaaccggtcaaggttatagtggaccctctctttaaaccataagagtggagaaattgcaggttttttttggattctttttcttattaactgtaaagatttgaggaaattgccttactctctaattgatttactacgatatatgatacgtttaaaattgttttgctttggtttcttctttagatgttgtgatgttgattgattctggtttgaatattattctttcattcttttttctatttttcttctgaagaatttgtttgttatgtcttttgagcttttggcctagtttggttaagttccaacaaactgttcattatacatctacaaagtagaaacaagcacttcacaatacacaacctctacttcttataatttgaccatagaaagaccaaaaaaatcgaatgtaattgtgttattggcagtggtgaaagtgaaattacaaattacaaaaaccaaaatttcaaagtaaaataagactaaactcgaagtgacacaactcgcgagttcgctcgttcgtaaatggcgcgaggtctgtctctatgctccaatggaagaaagtcttcgactttactctcaaactccatccctagggtttcaatttccttttctcctaaaacccttttcacttgttcatatccacttcaatcccgccacccaaaattctcacaacgattgttctgtaatcacgcctgtgtcccggagactgtggacgaaacgaggtacaaggagcttttcaataagagaatggatatggcaggacttaaacctcacaaccgaattggtaattgctattttaaattcaattggttccactaaaccagaaacagtgattggataaaattgtgttgtgtgtttcagctttgggagtttcaggtggtcctgatagtatggctctttgtgttctaactgcaaaatggaaaactgaaggattaagttgtgttaataagacagatggttttattgatggacttgttgctatagttgttgatcatggattaagacaagagagtaaagatgaagctgaacttgtctgttctagagtttctcaaatgggttagtttttagagtaagaacatttgatgtaacctttttgagtatgttttagtaacttgaggaacgtttataggaatcagatgtgagattgcaagttgtgattgggttgatggtagaccaaagcttggccacttgcaagaagcagctcgtgaaatgaggtatgagatgatttcgaatgtgtgttttcgacaacagattgaggtcttgcttatagcgcatcatgcagatgaccaggtaaaagggtctttgagaatttagagaagtaaagtgttatgttgagatgttcatgaaatgttgtctgaagttggatgcaggctgagttattcattctcaggttatctcgtagtagcggtgtacttggtcttgcgggtacagcttttgcttccgagattttctccagaaatctgcagttagatgcaaaacatatgaagaaccaatctattcgcttagtgcgtccgctactagatttatggaaagaagacatgtacaaggttctcttaaaactagaaactcaagaatttatcgttttatggtttgttgacatcaactcttatcttatttcctagcagatatgtcaatggggtagacaagattgggttgaagatccaactaatcgtagtcagttgtttgttcggaataggattcgaacatcaataggaaatctagaatcaggcaagtctatcaaacatcaaaccaaacttgttctctaaatcttgatgactaatataagttattgttttccttttcaggtagcttcaagtcagagctgcaagcagtcatttctgaatgcaggagaacacgttcatttgttgataaagtttgtacagacttaatacatcagaccgtaacagtgacagatgtaagagcattttccagtttaagcacatatgtataaactgtttctggatcgggtaagtgtgaaaattcatctctgttttgatgttggaattagcagaaagggtatgctattcttgatctagagagacttaatccttcaggagttaaagacatttgcctctcaaagtatctctttgcggtcctgcaggtgttacatcttgagtttttttctttggtaaagttactgccctttgagtgttttcttgactattctttgctctcgaatctgcagtttatctctcaacggcaaagaccaatcagaggaaacacttcaaagttgcttttgaactatatccgcgcaattccgtgcagggtaatcattttcaaagttgttctgtttctctagattttgatctgtactaacatttgcttcatttggctactcagacatctctaacagctgctggttgctaccttagtcctgctccagggtcgaagggtaccaaaattatagtctcatgttctgttgactgtcctttaccatcaaagacagaactcttgaacatttccttcaatgaaactccatctgatgaccttggacaaatcatagcagacgcaaaatcgttttctgaccatgtggctccaaccagcttgtttgaagtccagtttctggatgttgcatctgaatccgtattgagtaaagccagagagctcaatcttctcagcgaatcgacgtatacaaccattggtctactgcagagggatgaaactaaacggtttttaactaaaacagaagagaaatcagtggaattagagcatggaaccaacattgcagcttcctctgataaagtacatctttgtctagggcaaaatctctacttcatgaaccgttttctcatcagatggaacctaagtgaccaccaatgtaatgaagcagactgcagaaattgtccagtgagtactgctacatcaatggaggttcggcacatggttgaacccgactggttatatctagctgagctttcaaaatgctcaacctcaaatcattctatttcatcctcacaaaaagctctcaggtccttaaagttgatcccagccgctgcaagaaaaagccttcctgtcttggtcaatcactgtggattactactctgcataccagtatgtgaaatcaccattttaaatcatttgttttgtcggatttaactataagaccatacattgattctcgtctctgtgttttcaggctattggcttcagttattgttcatgccttgaggcatctgcagtgtttcttccaagaataccactcggaggcggtcatagctcatttctctagtctagccatatcatgttgcattcattcaatactaacagacatttattcacttgtactgaattctcgtgaaacgaaataatatttgattcaagaatctgtatcctaggcaacttccgttattgaaaatcgccaattacactcgtttttgttttcattcaaagtttatgacagggaaaacgatcatactccgccttggccacctcgttcttttaatggttgaaatgatgaagtaaaccattgcttccaagctgcgtccttctgttgctcgacccatgagaggaaggcactgtctactaggcaaaagatgttgacgtaaagcaactggtattgcacgggaacatatctgaagtttgcaatctgaagaagtggccatgctccgccttcaagagctagagccggaagaaaatctctcttgagtccttctttcacttcagctgtgttctttcctgtggcgaatcccatgtatgtgaagaacaccagtagatctacaggtccaaagataagaccatccattgcaacttttgcagctacaaaacgtgttgactttggtacatatcgaagcttcagttttatgaatttatccaagccttcgtacctgtgcaaccgcaaatagaacaatatcaggtttatcaatctaccatagacaattctttatcagtatctgattcagtgtcactagtttatgtgagcggtaacacgaggaaaagctataacgaaatgatctgagatcagaaggaaacaaaccagaagtggccaacaggtccgacaaaaccaaatccaaacatgctcgtgatagctactcgcttccagttgactttgaattctgcatcttgcttccacttgaccttaatttctgcatctgcgtcagcatctttatttgtttcctgttatattgaacatggttttagtgcttgagccaaggtaagtcaataaaatctcaatatatagcctaaactcagaaacaatataccatgacctctaaaggcaaatgaattttaaggattgtctcacagcagaagatgttataagtaaagaagtatcgcataatttcataaaaggtaagcagtagactagagctgctaatccataacggcatgaacatgtatcaccaatggaccaaagggcgatttatattgcaatgttaacatgaaaataccacaccaacaacatagagagtcacaaaacacattgtctccattagtatcttttacgtattggtatcaccataccatataagctctcttctgaactgttcaaactttgaaaagaactctgaagctgtagtagcccacagttctggcttaagcattaaaatgtcttcgattgttggaaaaaatagccattaggaaatcatggaatctcagcaaacaagtaaatggacgttatactacaagaaatttcacacagccatagagagagcctagaaaagaatccgagtgctattgctcaattacaacttaggcaacacaacctaaagttccagtatctatctaatagagaccataagctaacaagaaatcacagaaaactgtaaacggagaagacgaactcaaatccttgaaagatttagcagcaagaaggtgagaacaacgggaaaatattccaagtatcaaagaaaaactccagaaacagcatcaaggtctaaggaagaactacataaatcaacacattgatgaagcattaccacattcactgaaatgtcgcgaatatactgatgcacaagaaccaattgacgcagatatatcacgaaacccagagatacatagatgcaaattcaaaaacctaaaactaatttcatcaatccgcacgaatcggagagaaactccaatttgaaacttcaatcgaaggtgagagagagagaaggagatcggaaaatgactaacggtgagacgaagaagacgacgtttcgcagtggaatgagtgatgtattgagcggtgacatcgccaaatccccaaagaaatccagaactgatgacctgagttttcacaggatgaaccgtcaggcatcgctggtaccatctccaaagcttcaacattatgtaccagccgtattcgccgtcgccgcgagagagagagattgggacctgtcacctgtgacggagagccgccgtggaagaaggcgattgtgattggttagaagaaagaggttgatacagtgcttaagctttcttcttaaacgtcttcttctctttttaattttttaatcacttctttttttcgagtcaacagtcaacactacaaaaaggctgttgcaatatcattgggcttttaccaatcaacattttctttccggcccattaacatttaacattctaatttaatttgttttttgtgttgacgatgaagaaaattgggtcaaatgagaaacctctcattttaacctctctattttttaggattttaaacccccaaaatttccctatacactctatcttgcggcggaagaaatctgtaatcacaaaggaaaaggttaatagttttttttctttctcttttttaaatattttgttttgtcgtcatcgaatcttttcgtttagggttatctgatgttacatcaaggttaaagaaaaccgataatcacagaagcatatagaaatcgtttttgaaggtacatcgatcatcgttgagacttactacgttacaacgatcatcgttgagacttaaacaatgacgaagatgtctaatctccctaatgatttggcggaagaggtgctctctagggtttcgttaacatctctgagaaacgtccgacttacttgtaaagattggaatactttatctaaaggtgagagctttgcaaagaatcaccttggttatcaagcaatagtagcagcgaaggaaaaagagtttatgatggtcctgatgatggattttagggtttatttgattcgagtcaacgttcacaatgacattgagtcgtgtattaagcctgaaggtgagcttattagcttgggcgatgaagtcgatgtatctcaagtctttcactgcgacggtttattgctatgcatcacggaagataacgaagataacgctaaggtcgttctttggaacccgtattgggggcaaacacggtggatcgagtctacaaataatttccacaaattggacatgtatacgtatgctctcggatacaagaagagcagcaaatcaagccgcagctacaaaatcttgagatttattgatttttctcccacttgttctgagttcaaaatctacaatatcaactctgattcatggaaggttcttgatgtgtctccagactggaagatagattcttatattcgtggcgtgtctctcaagggaaatacatactggattgctagagagaggcacggatacggccatactttcttagtctgttttgatttcacaagagagagatttaggtcgcgtttacctctgccgagtcagccgtgtgttttagataccgtgagtctatctagtgttagagaagagcagcttgctgttttatttcagtgctcaagtacattggagatgcagatctgggtaacaaccaaaattgagcccaatgcggtgttgtggaacagcaaggtgttcttagctgtggatatgcactcacttaagtttcagtttcaagttagagcttcgagtttctttatcgacgaggagaagagagttgttgttgtttttgataaagaaaaacgttatttagcgtcctctcgcaacaaagcttacatcgttggagtggatggaacctgggaacaagtggaccttggaatgtctgtagacaaatttgtttacccacttgtgtgctcttatgttccaagtttagtgcatttttgattagtatattctacaaaacctgtaatctgtttcttgcatatttatacccttgttttttctcttttatcatgttgattgaacaagattattaactctccacaactaggattctcttattgctctgatcatgtcagtatctgtataaaagtgtccaagccattgtgttcctttttaacagagaacgcaactaccgacttctcacaacatatcaaatgccaaatgtgaactaatgtaaccaaacaatgttttttggataattcacattgcacaaatgcttgtatctgtagtttccaattttcttaaagggtgttttggacatttcgatctttttttttgatatggtaaataaaattacaaacaattatatttttccgagaaagccattgtttcagttgatgatggtgatgatatctcttcacttctctactccgccgctagcttttctcaaatctgattccaattccagatttctcaagaaccctaatcctaattttatccaattcaccccaaaatcccaacttcttttcccccaacgtctcaatttcaacaccggaacaaatttaaaccggcgaactctgagttgctatgggattaaggattcaagtgagacaacgaagtctgcgccgtcattagactccggcgacggtggcggcggagatggtggtgatgatgataaaggtgaagtggaggaaaaaaacagactttttccggaatggttggattttacctcggatgatgcacagactgtgtttgtggctatagctgtatcgttggcgtttcgttattttatcgcagaaccaagatatattccttctttgtctatgtatcctacttttgatgttggagacagattagttgcagagaaggtattgttttctttatattagtttagctttgtaatcatgagctttagtttaggaattgggaagctatggtttagttttatcagattacaatgtcaaaggttacatctttagagttaaagatagttttttagtatgagctcaagagattctcattgattggtttttggtgtttgttactaagatgtggtgttgatgtttcaggtgagttattatttcaggaagccttgtgcaaatgatattgtcatctttaaaagtccaccagttcttcaggaagttgggtatactgatgccgatgtatttattaaacggattgttgccaaagaaggtgaccttgtggaggtatgtatgatcatatttttggctcttggcttgtaatagtgaagctgatggttattttgatttggggtaatgtgtaggtacataatgggaaactgatggttaatggtgttgctaggaatgaaaaattcatcttagagcctcctggttatgaaatgacaccaattgtaagtattatcaaaagaacctgaagcttgtggtttttcttctttttctgattttggttgcttcaacattgtagagggtaccggaaaattcagtctttgtgatgggtgataaccggaataacagttatgattcgcacgtatggtgagaagcctatttgttcatctggttttagaattttatcacaggatttagcttcttcttggattgttccttattgtggaaaacttgtgttgtcttcaggggtcctctgcctttgaagaatattattggacggtcggtttttcggtattggccaccaaacagagtaagcgggacagtgctagaaggtggctgtgctgtggataagcaatagaacatattgtaacgttttgattcggcatgtcttcatttgaaacacttgtgcagataaaaacgaaaacaatgtacctttttatgaaggagagagttgcacatttgaattagattgcagattaatgaggaaacaagaaattcttatttgcaaaatggagatatgatgaaaatttgtttacttggtaacgagtttacaggtcttgtgagtgaattctatgggtttggaagtcttggaggaggagatgaagaaagagcatgatacgtgattctcgtgcttcgacttgactagcttccccaatagattacctcttgatctgatctcaaactccagcttcactggaactttacccttcttgtcggaagctgctaagtgtggtcctgctccatacagaggaacctctgcgccagtgagctttacaattgatatgtgcttactctttcttggttggtaatagctctttagcttcacaaccagaatgtgaatatcagattacgatgatgacagtataggagcaatgagtgagatctgaaaacagagagtacctgaccagtggcgagtgtgagagcagagaaagtgagtttgaaggtagaagaagagacatggatgccaaagtaaggagcaggactgtctattgtcaccttcactgaactgttaaagcttagaatcttggtggcgactcctgttctgtctattccttctccgtaatagaagctatggatgtcaacgctcttaacggagacgataggagagaaaggatgagaagctccccacaaaacagagcaaaaaacagagaacacaaccacagtacctaatattaccaaaaccgctctacattgtcccactgataatcctctgttatcatcataaacctcatcttcattaatcgtgtatggcttctccggccaatacatattactcctccgggagcttcctttccatcgaaatcccataccgcttgtcccattagaggtacggctcgaagaggagagacgtgactcactgagaatggtgtagtttggggtatgaacctgaataagcgaagcagaggatgaggatttttcaccatcgtctaattgggacacgcttgaaggactctctacgtagtaagcttgtttaggtgatgaaatagataggtccaagcttgttctttctgattctgacgttgcatccatcatctttcttttggtttatcaatttgtttgtgttttgagattcacgtaaacattgaaaatgggagatcgatacatatgtcttagaagataattgaagaagaacacggcgtagagagtggatatagaacaaaccctttgaagctttcttttccatttttatttgtttttgtttataaaaccggttttaacggattttattctttctatttccaataagataaaatggaatgtaatccttttttgctaagaaaaatggaaaaatatgacattatattataactatacttgaaaaaaaaaatccatttttttacaaaagctatgagtaaataagaatcaagtttttatattaaaaaaaaaatgaagaagcttctatgaaatacaagttttgtgggtaaattttacaaaggtggtgttgtaggaggaaataaaaaagaagcaagagaggtgtttcctatgcctagacttgactaagtttccaacaatattggctcgtgatcggatctcgaactctaacttcacgggaactccaccactgttgtccgaagcaactaactcggctcctgctccatatagtggaaccttggagccaataaggttgatcctagatgtgtggttgctttgttttggttggtgataactcttcagccgcgcattcgcaagtgtgaattgacgagagtatatgaggctgacggcagtggagctaacatggatgccgaataatgtagaaggattgtgtgttgtgatcaccactgaacatttaacgttcatgatctttgttggaactcctgtattgtctgaaccttctccgtagtaaaaacttctcacattcacaccctaacatatacaaatacaacacaaaatcatcaaacacttatagaacgtagaccaaggtgcaattcattcaaacacaaattgatgtgttttgcgtttataattaaagaaataaatttggctctaaatattaaagttaaggttatatctttttatagcataaaaattgtattttcatttggaacaaaacactttttagattatgtaaacacaaacacaaacaactcaaggtctagttatgaaaccacatttgatgttaattttgtaagcgaaaacacaaaatataatataaatttttttaatgaaaaacacacaaaattctgtttcttctgaaaatgtggaaaacgaaaatgcaaacacacaaactaaggtgaataatctttgctatatatgtaagtaaaaataaaattaccttgatgtagacgattggaggagaagattgagaagcaccaaagagaacagaacaaagaagaaaaaagatactcaatgtcgcaacaactcccaaaataagtctacaagtaacaatggagactcctctgttgtcctcataaagatcctcgtaccgtccatcaccaccttcctccttatcagccggccaccatatcccgccgtgatatttcctccgtcccttccaccggaaaccgccaccaccgccattggatacccggctagcaattgatgggtgtgacggcgactctgtgggagtggtttgatgagtagtcagtgccaccgaggaagacttgtcggagtcacgtgatgggctttgaacgtagtaagtaggacgttttggtgatgataggtcgaggcttgtgacgtctgagtcagattttgggtacatcttcattttttttggttaatcttttctttaccaatgtttgttcttgtgctcataaatattggtatttgtgtgtgcatggggacaaaatagggaactaattacaagcgttaggttgggtaagacaaaggcccataggttaggtgaccatttgtcactagttttgggtgtcagttacatagtagtacgttctcaattctgcaagtttgacatttgtaaccgaaaaatttgagtctttctttttaattggttagtgtaaatacgatgttgtgtggaaaagtaaaaaagaattagaaatgtgaagaagttagattcgttttaagtaaagctagctttggtgcttcttcttaattacatactacaattctaaatattttcacattgagtaaaacaataaacaagtgactgcttttagcaagagaaacatactgcctactatgaattaagtgtgatcttataaatcatacttaaaagtaacacttataaagtataagaaaatctaaattttcaaacatcaacagggatagaatacaagaccatagagtggtagaagagaggatcgaccgtgagaagattgattgcgaggataggatggcaccaatcacacctccccaaaatctcgcctccctcccacctttccaacgaaatctccgcacaccaaatctccaagatcttaaaaccatcacaacaacattcgagcttttcccaaaagaccaaaacattatgaccaagttcggtcaagttggtcaattgggtctcgggaagtaattcttcaaggtttaagctaatattgtacatgatcttgtaggactcccacactttcaccattttcccaccaaagtagaccactctcgattcacggagctcctttgacagaaactccaaaccaaacacttccctccaatctatccctactgcgtcacaccaatccaactcccctgcctcacaccaatatatacctccatcgttaccacaactatatatcaacttatctattagacaccaatccttgctacgctttgaatcttgattccctttttcccatatactcttgctcggcaagtagtaatagcttccaacatcccatgaatccaccacgtatatcttttcttcccgcactggctttggaattgacatatcagcccaagtttgtgtctttggatcgaacacttctccccagtcgtagtaatgcttgtacttgcagcctccccacacgtttatctttccgtccactacactgacttcaggggaaacacgagccactctcatggaggtcacgtggtgccacttatgagaccgacaatccaagaacaagacgttcaacgagcgattgccatttatcttttcgtggctgagagggtaacgaggggatcaaatgagctcgattcacattgttcccagtggaaacgtctacagttgggaggaggatgcaccaacataaggtttcgtcagtaggcatgcagaagcatacgtagaggaacttctcagcgtaacctatcaacgatcgtgtctggtagagctcgggtgaaagaaccattgaccggcagctcttggagacgagagataaggctgcatggtccaatcttgatacgcgggccaagcaaatcatagccaccgcttctggcaaagattgtagaaaccctgaagatgacgacggagatgcctctttcttcctcctcttactatgtggttccacttcgggagcctcattggacattgtcacacacttctgactttgctcgattaacttaattatataattaaagtattgaacaaaaggttttacgagagtgatgagttctcctttttggattagttttagctttaggtttagggcttttgaagattgagaaggattcaaagagaaactaccttctaataagatttaaaagtaaaattagggatacgcctattgtttttcggttatatatcaaaaacgaaatatatataattttatccttagttttaatcaataacgaaacattcggttttaaccaaaccaaataatttatagcttacagtttttccccacaaggccacaaccaagtaaaaccatgattccctaagagcatctacattgcacaacataaggaaatgtctttaattacaaataaaataaaagaaaaaataagaaccaatgacattgtgccacataagttaagatgtctcaaaacaaatgtctttgatgtctcccaagagacacaattctcttttctgcattaatttaaagacatttacctttttattttattcattaaaatctaaagacactcacaatttgttatgcaatagaggtggcataaggctttatgggttatgttatgtattcttattgtatttttgttatatttttattatattgactttcattttttttgtcactaaattaaaattatattcattaacttgatgtggaaccaaggaagtacacaatacccaaacaagggaaaccaaagccgacagatgaagttaaagtcctcagagtcaaagccggaggaaaaagaaaatatccccggaaagaaagccctaaagaaagggaaacaaagaccctaaaaccacaaagcagcaaaccagagaccctaaacgaaagatgatgtacccaaatacaatagccgaagcaacaaagctaaaatcctaaaaaacaatagtcacaagcggcaaagaaaaactcctcctcaaaagcacctgcgaagagatttactacggctgcccacagccaacccgaaataacatctgccacctcctatcatgaagagagccaatctctcgaaaccagaagcaagaacttcataacccggcaagccaaaccacaagaagaaacttgaaaacgcttccggatgcgacgacgacgactgaggcgaccaattgcgtctagatagaagccttcaaaaagctaacagaaaagatctgaagcaagtacaaggagtgaagcctaacctctcgagaaccttcatcgagaacaagcacgacgaaagaaggaggaagctatcaaacacagaaaccaacaccaaggaggagaaccaactgccaacaaagaagactaccacaacagaaacagaaagaaaagggacatccagttgggaaccaatggctgaagcaaggagaccaagaggcggaaggaaaggcatggtctgggcacaaactcaacgagaacccaccaccacacaaacaatggcatagaaacaaagctaaccacttgaacggctacaagatcacctgatctgtccgctccaaccgaatccataatctcaaagttcggttgactttctattaatcctcaataatattgactttctattttcctttatttttttacatctattttgtttcatttttaagaaaaatgtttattttccccatttttatggcttacatctattttatttcggttatttattcgatttcggttgtattctttcggttatcaattttttcaagtttaatttctatttagttattctgaaagttcgatttgattttagttccgtttcaattctttcggttttaaaaaaatttagatactttcagtatgttcttttatactttcaatttatctacagtccctttttctttttttggcccatttgggttttgacttttgaatacaacaataggcccataaagtaaaaaacgtatggttcagtgactaaacaataactaaattaatgccacataacaaaccattaccacctcgtttgggaagactcactagttggcaaacaagatacaagttatcaacacctcacatagagaaaccaatctgttttcctgaagcgtttgctttaatttagtttagtagcaacaaacccaattgcctagaaaattatctatgactaactagttttcacagttataagtattctaacaaaattctctaatacgtcactataagttttagagacaaatattgtcactttctcgaatatgtcaagattaattgaattgtgaattaatagattaatcaaatgtcccaacaaaattaaactttagtaaccgatattcaaattgtatttctgggttgatctagtttagaaaaactggccaaccattcaatatcacaacttctcctcgatcagtccgtacttttttatccggatttatcccaaccattcgattacaacaaaattttaggaaaagaaaatagttacttaaggaacaatttgagattgaaaaatttggataatagatgaaaatagagaggaaagggtcatcagataggagcgaaagactatgctgaagatgttaatcataatagaatttatcatctgaactatgcgttatcaatcatcacttgatccctttcaatttcctcttttctcatcaaataaatccaagacaattttaaaaccaataaccaaaaaacaaaatcggatttagacctcatagagaagattagatttatcaacaaggattaattcagacatatgcttgtctataatcatttaaatcataggccactaaatcaaccaaaaacagaaccaaagaaataaatacgaaatcggatttgaaaggtaattgaaaaaaggcctcatagagaagattagagtttatcaacaaggattaattcagacatatgcttgtcaattttgattaaatcattggccaaaaaatcgattagaaaaagattgaaaaacaaaaatcaataggactcagaatatgggtggtgatataacagaatggtcggcaaataggctttttacggccgtttttacgacgaacgagaccttaatatcaatcgtcactgtccattacttttaccaaaaacaaaagttttaaaccagaagaagaagatgaaaaatgaaaaacagagaagctaatcggcggagatctaaagaaccctagagaagttgataatgaatgtgtgattactttctcacgccttttatacagagaaacaaaacaaaaattgagagctagggttttggattctttgacaagcttagctaagatgttgacacgtggtacgtctgacggttgtgatatgttaaatcttccgttttttcctgtgaaaaacgacgtgcagtttcatatagatacttttaaactacatactgtttcttgtagaaaaccgacttttatttccctggcccaaaggcctgtcatgggtccattgaactaacacgcaatgtggatcataactattcactagcctacgtggcctttttcgaattaaattatgtcttaaaatcttgtgttatttgatctttttgtaaatcatgattaaaggagattttacaatttggtattattaaattaagattaatttcttaaaaaaaacaaaggttactcaaaattacatatcttagaaatatttgtatactaagtctttttaaataaatttcaaaagaatttcatgaacaaattattagaaacaaagtttaaagtatactgcaaatatactccacacacatgaatttttaaaagtaatatcagatttgaaatattgaagattgtaaaacgtacgattaactttatatccaagattaagtggtcaatttgttttacgtttttagatatgtttgatatatttcaaatgcacctttggagtttggaccatacgcatattgtttgataatttgatacacatagttaaacgtattaaatatcctctatttttgaaagtcaagaaaaacaaagagaacatttaaagattataacatgtacatttgagatagttatcttcttgttaagagttaaaaactccttaagctaaagacttctctatccgaggaaggaagagggtgtgattacttcatttactactttgctttcattcctttttccctatctacacttttatgttctctataaaagtatctcacaaggattttcatgattaatgcctatctttgggacttctaaaaccgtttaaattctctaacttctccaagtatgagagctttttcggcgtaaggtttggagatttagtaggtttatcgcctcctttggaactattatcattccaacccataaaatccaacaaggtcttggagtgtgggtcatgcttctcggcttcttctcccgagttagaagatcccgctgactcggaatccgtctctgttgttctcccaccatctgatgtttcttcagccaataaagtttgctttagtgccaatgtatctgtgtaaagaacatcttctatccttgacatcactgtgtaagccaagctctcaagtatcctagagtaactttccaacaccgcttgcccaacgtcctgtatccattgataaaagatcagttttcttataaccaaaacaaaaatgagttgtttcttgccattcaaggcatctacaatatatgagagcttatcattatgattgatttaccttgttaaactgaatcttggagatgtcaagggaagattgaggaagaccgggaaatttttgtttgagcaagaccaagattgtttctgctctctcttcgaacaattctctcttctccaagctaactgctgagccccacgaagatttggtgtcctttgtgtgaagcttcctcttccaaatcacaacagatgcctcaattctgttcttcaaatccaacactttgtgctctgtcgacatgtccaacatcgctaagaactgctcaggatcaaaccattcctctgttatgctcttgtatatcgaatccccgaggctggctcttccgttctgtcaataaaaatcaaatcttaagagccaaacatagaataacaaaagatagaaattgaataaaaacgtgacattgatttacctttgggagagagtcgatgtagctctcaggtatttccatttctgagaggacttgagcattgatggccattgcagctttttgaacttgtgtgactgaatctttttggaagtaaagcattctccgagatggttctgataaacctccaggaggaactttaaccggtggtagccaccacttgtcgtttgtccgatcattccttgcttgctgcccttcttctgaatctcttgagacataccaaaactcgttgtgtcctctgaaattgtccaatgtatcctgaacatgttatcattaccattaatccaccaaacgctagatataagccggattcaatacagattgaatggagagacttacgatgagcatggcgtcaagttttcgaagagctggaatgttcataagaagatcacctctttgtcttgtcaccataatctacaaaaaaatggttaacattgtaacttattctaaagaggtcgcaaaaatgatattttcttttctttgggaaactcaaacctcagtgcaaactccatctttgcttgtttgttgagaaggaacaaactcgacaatgtgatcggtcacggataataaccaatcaatctctttcttccatctcgcttgtctatcttgcggcatcggttgtagctttgtttgttctccgaatatagacgctgcaaatcatcataccaccaacacaagatttagaaaccaaaaccctcatacttacttgcgaaagaagaaacttaaaaagtataaaaagaagattaccagcaagatttgtgatggcattggaaagagccagagcagaagatacgcctttcccaccaccggacatatcttctccaagaagcaatttagcgaacctgtctttcatcatctccatatctgcaatactttatgtgattattaggttttttttgaaggatataagttattggaaaaggaaagaagatacacacctgcttgttgtctctcagatctttttcctggccgagtaagaggggaaatcattggaaggctgctctctacggggctttctacgaagctgtcggagttttggctttcaggcgtgttggattcgacaatatgagaatctccgttctccacgacaatagtttgagattgttgttgtttcgtcgaagatgaatcaaacattcttttaaagttgaatgatttggaagcgcttagtcctcgttccaacgctgcaaccatggtacgacaacgttcgcttgttttcttgccccgcaagttaaagccctttattcctttaaaatccagttgatctaaagatgatacaactctaagatttttgttaaaagcataaaaagaacaaaaaaaaaacctcttttatttggaaaatgaaacaaaattcttaagaacaaacgtttgttttcgattttaaggactaaatgcatttcaaatataaaaatagtaaatcaaaatttaggaagttagctatttccatgattggttatcttctcttttgtgttagaaataaattgatggtttgtgataaaagtgacgttccacgaagtacggaaaagacaataaaactccaaactgattcaactttcttatgggagatctaccattcatcaaatagagtatttagctatccttatgtcttgcatttttcttgttctgcttttgagtgtttagaatttacttaagttttggtttatttggctttgaaatcaaccactgtgcaattgattcattggttacatttccatgtttatgtactatggaatgtcttcttcaccactagagctacataattcaccagagaaagacataaaacttgtcagatatcaaagtttatatgacaagtttagttttcaaatcaccaaaatatgtttttgatcttgtcaagtaataaagaagccattgaccaggcttgttcaaaacaatataacatgaataataaacaaacaaggcaatgtaagaaattactagtaatctcctccttttcttttgcctcctgctgtaggattcctgcatgtactagaccttaagtattggatctgcaccgaacttggaacataagagaacatttctccgaaatccgttactttgaagaacatattctctcttaccacgaaagatatctcgaagagatgattgacaccatatgtaccacaacaaatgctgctttttctctttatcaatgaagaaactgcaaacttcaaacacagatagaaagtacgtaacaaccaaacacaagtggaatttcaactttaaagaatttgctccacgacactgcatttggctcaatcttagttgtaatccatgtctccatcacacatctatccaaacacctgcccaaaaacacctcaagctactcttctctaacacaatatgaaatcacataactattggaatcaaacggcagatgcagacgtgatccaaatctctatgttgtaaaataaaaaaaataaaaaaaatcgtcgcctttacgatcaacaaagtaagtatttctcttcaaagaaacgcctctttttaaacgttatataagaattataagtaatgtcaagaaccctccacgaactagacttgaagaattagacttaaaatcatagatttcatgccttatattttgtggttgttcttgttgtcgtatcctatagcataccaatctgattcatgataattatttttgggtttgatccatctggtttgcactagcttaccaacatatgggttccataccaccagcctcgaggaatccttggtgactaataacaataagccgtgacaatgatagactagcttagatatttgaactcgacagaccatttcacctatctcctttatagatgaaaagtctttgatgctatggagactgaatctagtttgtgaaatatcagtcaaaaaagaatattcacaagtcatggttaccagaaactccttggtagatttaccacaatgcttctttgtaaagctctcatctttaaatagtgtgttacatcgtttgcaagcgcatccaatagctcttccagaaattctcgaagtcctagagagtatctcttccaccaaaaaaaaatgacgatcatctctgatctttcgtaggatttggtagaagagattctatctgggacttcgaaaacttgaaaaaaaattaggagttttttaactttttttttttttggttggtaggagttttctaacttttacggttcattttataaagacaaataagaaaagaaagttaaaagttaatatttaacaatatatagaaatatctaattgtcttcaaggcttacaaaacgtcaaaattttaagagttcatattattttcttacgtttttattttaagttcagtttgaaaatgacgttactcaaattagtaaatcaaattaagtaaagcttttattttctcctaattatgaataagccgtttaatattcataaatcagttgttttctcggttccaatatgtcaatgacccaaggagattttttcaatttagatatgattatatgacacaaagatggagtggtaaattggatggaaatatgaggaaggtgaaaaggtggggatgtttatgatacaaagatggagtggtaaatttagagatgcagaaaagaaatggctatagatggaagacaaagacataagttaattagaaaataactatgtaagagaacaaattgaaaaattctcaccaagataaataacaattaatgtttcaagccttgaaatccatctccataaagctaataaggaagaagaagaatctatttgctttgccgtcacaactatagacactaaatatcctgactggggaaagcatattattattacctatcttctttagagatgatggcaaatctttgatgttttggagattgaatcttttttcattggcaaaatgtggtcagtattataatcacaagtcatgttcaacagaaactctttaccacaatgcttctttctgaagctctcataaacactaaccgaacaaaacccaaattaacctggttatttgtagtgcatgtcgaactttcttttgtttgtaagcgaatttctcatactgtaactaaaaccaacacgcaccttattggcatggttgaaagcagcggagaagtcttataccattttgtaaattcagaaatataaaaagttgtcttggtctagtggtaaaagagagaaaagtctcatgcaccaagtgtcgttagctcaattagtaaagattctaggtaaagtttataggttgccggttcgagtgacgcttgggacaaaactaatattacatgctgtggtttcgggcctgggaaaattacgggcttcggcccagaacctcctgatatttaaaaaaaaaaaaaaaaaaagtctcatgcaccttggttctagtagcattggctacgggggtttaaattctaacatgatctttccgaatccctagattagtctacagacttacaaaagttagggatgatctataatataaaaaaaaattatgggaaatttacatatactgactaagctttttcaataggcaatgtggatctaaagccaacactgcacatgaatagtctttatttaactttctatatatgataatgaaagaaaaaatttcaatgacttcacacttgcccacaaagtaagcaaataggaatttatgcatttatagctgccacaaaggcggtcattgtttgcaagaaccatgtgactatattaataatacatacataagcacttctctcctttctcaaatttaaatcaatactaatttgtagaagtcgaaatacatgactttttcatacgcataactgcataagcataacccatttcccaaatttcgaattcttttaaattattcttcgtacacatcttcttattaatagatgaagaaaaaggttagtcttgaaattcaaaaaaaaaaaaaaaaaaaaggttagttttgtggtaatttttaatattcaaaattgaaatgtttgccatttcttgtcccggcttcggtgcatgttctgaagatattttcgacttttgcataccctaataaatgtgttcaattcaaaaactacatacattccaattccttactttaaaatttagaaagtaacaactatattaatgctaacgaattattaaggtcaaatatatcgtcccactaaaagtttattatggttttggaaatgcaatgccaatttcatgaaaattgactatatatagtttgagatggaaaatatcatagacctgaaccttctaataaaacatcgaagatttttaaatgcatataaattctggtgtgaaacctcaagtcaacacgaatcgaattaactatagtgacccataaaatgtttactctcgaatcgattggataataaacgataaataatggtgatgttcttcaataaatgccaacctaatcatgtgcacaattgtggtgaaaccagacaaaaagtgtcattggaatggaattctccaaaaataggaatattaatgtcttttgttgtttgcaattcttgtatttattctccacttctttcaccctacatgattgcttacaagttacaacacatcaaaattatcatttgtgcaaacccttgtaaaattgagtttactgatggagtgtaattttgacacaaattacaaaaacgtttaattatacatatatatacaaatgtctgtatttagtaaatgactgaaaagatgatattgactcaaattcaaagaaaaatatatttgagttaaagagaaataaaaaattagtttaaaaagtcacgttagaaatatagaacgaaattttttgatagaaaaaaatatatgtaaaacgacttttttgtgaaatagaaagaataatttatatgtatttgctaaatcacaaatcatcacataaaattgttgccatttaattccactagcattccacggatcacctattaaaacaaagctacgaatatataatgaatctgatattgtattctttattaccggccgctttgcagctgttaaattaattaaccaacacgagtttattcccacaaatatatttttctctttcaaaagagaatattctcttcattttaataatttttctactcacagtttgattttctcgccagcagatagcactgtaattaaattaaacaaaccgattttggtacgaacatgaacgatcttatgtagtagttaattacatgattaaaatacaaataaacagaaccgaataaagctaaaacttgattagttatagaataacggaagtagttttgtcctttattgaaaacttaaaaacaccgttcttctgatgacgtgtaccttctcttcatcttccctatctcttcatatagtgaaaaaaaaagattattcaatgtttctttagatttcaatttcattaagacaattgaatcagcttgtccccagaggatcttatcggtgtaagaagaatcacaaaacctcgacgaagtcataaagcttggatctttaagtttgactcgtttcatttctctctcttcttgttacttgcaggcgatgactcttcgttggtttttgattgaaatcttcttcttttgagtttttctcatctgggtcttacatttcctaagtaaattcaaagactttactgggaatttttgagaaagattttggtacagaggaagaggaactgaagaacaaaaacaaagcttcaattttttggttagtaatttgtgtttgtattgtgtacttagttctggtttcatgagaattttaaaaattgtatttttgtttgtattaaatcgaaaattcagaactagggtttgatc

SEQ ID NO: 460 - DNA, 24057 bp, Arabidopsis thaliana
aagcttccggttagtttgttaccagctatctccagtatccgcagctcaggaaaacccagaggaccttcattaggaggagatagaggaccatagaatttgtttgaactgaggagaaggacttgcaatttcggtaaagccttgagggagaaaggaaatgtatctttgattccgttgtggtccacacttagaaactgtagagctgagcaatttataagagaccttggcagcttccctgttaatcgattgtagccaacgtcgagtgaccgtagaggcgtatcctcataatacttgtcaggaatacttccttccaagttgttctttcggagtttcaaatacaataagttactcagacatggaggaattggtccggtgaagttgttgtagcttagatcaagaacatcaagcgagcttctattacagattgaaagaggtatgtcgcctccgaatctattgtctattgcagagaaatagttgatagagagcggtagatgcgggagtgccccttctaaactgtttgtatccaaacttaagatctgcactgatgaatttactaaaacttctgatgacccttcaaagccagttaacaaattatctgtaatgaacactgagctcagacgaggaaggctccataaccactctggaaatttcccactgattctattgttggataaggcaatatactccaaattatgaagggtcttgaagacgttagggaaatcactgatgtcgcaatgctccaaacgcaacacttccagggtagatggaatgtatgaatccaaagttaaactagcctttgatatccaatcaccggaaagatcgaggagcaacaaagatttgagagaggagaagagacttaagtcaattgggtagcttgtgtttaggaaagaaaggtcgagctctttgaggttgatgagctttgagataggctctaggatttttccttcgaaatggttttcacctaggtgcaaactctctagccttgatgacgaagatgagttaggaacttcaattgaaccgttgagattgtttccttttaatgaaagataggataagaaaggcatagtgaagagagaagaagggattgttccagagaagtgattaccaaaaagatgtagaatggagagcttggttagattttgtacaagcggaagactaccagtgaagtggttcaagggaaggtacaactcggttaactgggttaggttactaatagtgggaggaacttgaccgaagaagctattagaggaaacatccaagacctctagtttgttgagattgccaaattcataagggagtgaagaggaggtgaagttgttgtaacggagattaaggtaaatgatgtggtgcaactcaaagaggctactattgggattcaaaattccagagaagtgattataagaaacatctaaaactctgagcttgcgtagattccgcgcaaatgataaactaccagtgaggtcattattggaaaggactaaggcggaaagcatgcttaggttactaaatgaaaaaggaacttgggcgaggaagccactacttgaaagagacaatacctctaagttgttgagcattccaaacttggaagaaattgaagaggaggtgaagttgttatgagggagaagaagggaacggagatgatgaaactggaaaaggctactgttaggtttcagagttccgctaagacatgccctgagttgtagcatcgtgaccgcacccgtggagtcatcgcaccacactccattccaagggtcactatggttgcaagcacgagtatcaaactcgttcttgaactgcgtaaaggcttgaatctggtggggaccacaagcaccaagaccaacaacagggttattaaaagtgaagaagcttgaaggagagacacaagatagtaagagtagcaagagaaaattcaaactgaaaagcaattcagacatgatgaaaacagctttgaaagaaagaatggattttgatataagaaatgtgagagagaagattggtataaataaagatagaatgtggttttgcatagtggaagcagtgagagctaagtgaagtcgtcattgaagtgaaatcgacgttagatgacttttctaatgtatattttggactggaatcacatcactttgaaattatacattatgttcaaaatcacaagaagaataatgagggtgatattgaccccaacatgtgttacacaccaagcttatattggtgagtcaagatcctaccacaaatgtccaactgatattgacccctacatgtgttacacaccaaactgctgcaccatcagctaacggaataggaatcttccttggttaagatctttgtgacgtgaggaaataaaagttttgaaaataacgccaaaaaaataggctgaattattatttatgaaatcacaatcaaaatgttatttacctaagaaacaaaactggacacgaaagcaagctagcaaagttttttacacgtaatggaagatagaaaaactatccacaatattccatatcatttgaggaaatattgcgttaaaaactaaaattaagtgaccaagtgaaaatttggtgattctcacttccgtcactgcacagtgcatagtgcctccagaaccagaagcttccttcttcagataacaaacaagttcactcacatacaattgcgacggtcacacgccttcaattacctcgtcgaaaatggcttcagtgagtctcccttctcaatccgaacacgttctctttgtgcctggattcgcggaaatatgagtttcgatttcactctactgaaaacgttgggatttatcttcatctctgtttcttagtgttctgattccattcagcattgtagttgatcctttatagtatgaatatttagaaagagatttaacctgttggggtttgcttatatattaattagttctttgtagtctaaaattcaattttcagtttcagatgtttcgtctctccccattgactcttccctgcctctctgccactttttttattcgttagggaaaaaacaaaagatgtatatgaatatgctacgtagaattcaccattcttatttatagaaaacaaaatagacacaaaagcatcagtttatagataaagatacaagaaaggtaaagaaatgcttacaatacaataccaacaacaacttgacaaacattgaaggatcaaactcaaaaccaagaaaaagatcttaacggtttctgctcttaatcagacaagctagccactctggtttgtatgaagcaatgagttgtgctattgccaatccaagtaacactccaaccccataccctattgccacgccttcccagttcaacacttgttcctgttcttcatcttcttcttctttaaactgatgtgctggtggtgcattagtcccaaagcatctttgttgaagaggcaaaccacaaagccctgcatttccttcaaatgacgatttaggttgcccagttatctgtgttccttgtggtatttcaccgttgagttggttgtgagacacgttcacgtacgccaaaaacgagagagtccctagtccattaggaatggtccctgagagttggttacttgataggtctagtgactcgatcttcacaagattggccaaagacagaggaatatggcctgtgaaggcgttgttcgataagttgagtgcgattagtgcctttaagagaccgatagattcaggaatttctccttcaagtctgtttccagaaagatcaatggtggctgaggaagtaagaacccacttttgctccatagatagacctttatattgtaaatctatagttgccagatagctgaggtaataaatcccgtaaacaaccttgctatataccatatatagaccttgatcttcattcatcgtgagtgatgatgctttccagttcacaaaaaaatcttggggcaagcttccggttagtttattaccagctatctcaagtatccgcagctcaggaaaacccagagagccttgatttggaggagatagaggaccatagaatttgtttgaactgaggagaaggacttgcaatttcggtaaaaccttaaggtaaaaaggaaatgtatcttcgattccgttgtggtccacactaagaaactgtagagctgagcaatttagaagagaccttggaagctttcccgttaatcgattgtagccaacgtcgagtgaccgtagaggtgcatcggcaaaataagtgtctggaatacttccttccaagttgttcttccggagattcaaaaatagtaagttactgagacatggcggaattggaccggtgaagttgttgtatcttaaatcaaggacatcaagcgagcttctattgcagattgaaagaggtatgtcgcctttgaatctattgtatcttgcagagaagtagatgatagagagtggtagatgcggaagtgccccttctaaactgtttgaatccaaaactaagatctgcaccgatgaatttactaaaatttctgatgaaccttcgaagccagttaacaaattatctccaatgaacactgagctcagacgaggaaggctccataaccactctgggattttcccactgactctattgttggatacgtcaatacactccaaattcggaaggctctttaagatgtttgggaaatcactgatgttgcactgcttcatatacaatgcttccaaggtcaatgagatgtatgaatccgaacttaaacctgcctgagatatccaatcaccggtaagatcgaggaccaacaaggatttgaaagaggaaaagagacttaagtcaattgggtagcttgtgcttaggaaagaaaggtcgagctctttgaggttgatgagctttgagataggctttaggatttttccttcaaaatggtttttacctaggtacaaactctctagccttgatgacgaagaggagttaggaacttcaattgaaccgttgagattgtttccttttaatgaaagataggataagaaaggcatagtgaagagagaagaagggattgttccagagaagtgattaccaaaaagtgctagaatggagagcttggttagattttgtacaagtggaagactaccagtgaagtcgttcaagggaaggtacaactcggttaactgggtgaggttactaattgtggggggaacttgaccgaagaagctattagagctaacatccaataactctagtttgttgagattgccaaattcatacgggagtgtagaggaggtgaagctgttagaaccgagactaaggtaagtgaggtggtgcaactcaaagaggctactattgggattcaaaattccagagaaatgattataagaaacatctaaaactctgagcttgcgtagattccgcacaaatgataaactaccagtgagctcgttatcggaaaggtctaaagcggaaagcatgcttaggttactgaatgaaaaaggaacttggccgaggaagccactacttgaaagaaacaatacctctaatttgttgagcattccaaacttggaagaaattgaagaggaggtgaagttgttatggatgagaagaagggaacgaagctcatgaaactggaaaagactactgttggatttcagagttccactgagacaggccatgaattgtatcttcgtgactgcgcccgtagagttatcgcaccacactccattccaaggggaactatggttgcaagcacgagtattaaactcgttcttgaactgcgtaaacgcttgaatctggtggggaccacaagcaccaagaccaacaacagggttattaaaagtgacgaagcttgaaggggagacacaagagagtaagaggagcaagagaaaattcaaacggagaagcaattcagacatgatgaaaacagctttgaaagaaagaatggattttggtataagaaatgtgagagagaagattggtataaataaagataggaagtagttttgcatagtggagcacaaattgacttggaagaagttagaggtaagtgaagtcgtctttgtattcgggcttggagaagtgaaatccacgttagataatttttctttaagtgtaatttggattggaaccacatcactttgaaagttctcacatatatgttcaaaattacacgaataagcttggcataaggacaaacacattggatacgtttgattattggagacgtttcgtaacccgacgtgctttgacgaaggagaattggcgttgttttgatttgtttgtcgagtatcaaattttgaagttggtgaggactgacgaggcaaagtgaaagtggtcagataatggagaagatgatggttttagctaacaaaagatcgttaaaccgattaggagtaggagatatgcggtaaagaggatttgaaaatgatgaagaagatgatagtttcatttttcttttacttgaatgattttctccattggaggatcacgagcacacttgcgggttacagcgtcagataataggggtgactggtgagtcaagaagattctaccacaaattaccaactgatattgtggcctttaaattatgtcattttttttttgtcgtaaattatgtcatttatgtattactataattttttaaataaatagaataaaactaagaatattttcatgattgttgtagacctcgtgaactatttaaatagtttctattcttttatatatttttataaataaataaaattttagattatttttttcttttcttctaggattatcaaattttcctcagatgaatttcaaattattcttttttttttggtagtttcaaattattcttagtaaactcaattaaaataaacttaatattctagagtaagtttatatctatattttttcaaacgtacggaaaatctagacaataattccaccgtatcatttgacgaaacattgcgttaaaaacttttaaaaaaatttgacgaagcaaaatattgagttgaaaagaaaatttcacttccgtcactgcacagtggtgcctctagaagattccttcttcgaaacaaacaattgcgacggtcacacgccttcaattacctcgtggaacatggcttcagtgagtatttcgaacacgttctcttaatgcttggattcgcgtatatatgagtttcaatctcgctctcttgacggcgtagtttcgatctattttgtcatttttctatcggtaccggtgacattcatggataatcgttctgcttctgttaaggtttttgggcgtttgtgcgtatattaaggttccttgccaatgaatatctgaagatagttttcgtttctgtcgaatggatgcatgttggattagaattttctctattttactcattgatgcatctctcggttgaatttatcttgatctatgtattggcttgtttgtgagaattgagaatgcattgtaattgagactttgcttggaagtgaaaaatttactttgctacaaccaaacttttagcatgaattgttgatgtctttagcttgctttgcctcttgtatttgaagttaggtgatatatgaaaaccatttagtgtcttttatttatatttgttgatggacctgacaatagattctcttcttttcgtgcagcctattgcgttgttgcggcagattctcaacaagagatatggtggtgaacaaaataccaaagaaaataacattgtcatttaagtgtctgtggattcggttttaactgagttacttgttccccaggtcttaactaaaggatgacattgagtactgtgtggatcttcctttagaagatcagcaaacttgccaaggttaaggctcatgtgaccgaagtgaaataatggagaggtcagaatcatatatccatgtcaatctcacaattttaaatatcattaacttgagaatatatgtcatgtatgccttgaattttcaatgctccttgcgcacttctgccaaactgattgagctttatgtaattcattaacttgcaggctcttgatcgcagtgaaaaaattgagcttctagtggacaaaatccgagaacctttgttcacaggttagtaacttacctttcactcatatgtgagctttttgatacaagcatatcttctttctaattgtcatgctcttttatctcgaattctgatatctataggcacaagattccagagcgccaggaacgaaaatgacaagatgtggtttcagaacatgaagattaagctcatagtccttggtatcatcatcttcctctcggttaattctcatcgtcatcatcgcgttaattctcataattcccatattgctctacaagttgatgggaaactcttcccggtatatgtccttctttttcttttttttggtggtctctttcttatgtatttcatttgattttgttagggataaagaaataggatgaattagtactgaaatatgatcgtagacaaagtaacttttcacaccaatatcatccttacactcaagctgtctaatgtaaccaatgggaagtatgtctagccttggaccagactagttgctagttagttataataaaaagtacgcagctcggtgtcttgaagaaatggaaggatttattggttgactgttgcattatcagggtatttgggacaaagattgttgtgataatccattctggcgagtcttatgaaatcgtcaaagtagttcagctctgggaaatctccggtgcagttgacgaatccgggtgaccacactcttctctttcagacgccaaaagggataatagagatatgtcctcgtaccccatttaaaccgagaagtgcagtgtttgtgacgcttatcaactgacagaaaaacaagaggggatcacaaagagcatccatatgattgtcagagacggagaaagatttatcatggcactctcctctgttttttttttttataatgctttggagatgaataagataatgaagaagaggtaaaaggtagatgagaataataggtgaatggtttttgtttaagtcttggttttgtatgagttcaaaaaaggaaaagaaaactaaggtttctttttgtttatctgaaactttatgtccgaagggaaatctctttggaattaggtgggttaggaggtcttagtcttcgaatagacagtagacaatcggagtattaagttatcttaaagatttctttctacttgtttgttataataatttcatttttgtctgtaggacgacctaaaagaattgtcgatgcaagaactttagttggaaaagtcaggcaacgtagaaaaggggatattagtatactaacgcagaaaatctccaaatgggttcaaaatcgactaatgaagaaaatttcttaaagaaagaagaaagacatgaccgtaatctccactttctttgtcagcttcagacaaatgtgaacgcatcaaaaggtatgtgcaaataatagaaagtggaacaaggcaaagactttttagtatttaccatggaaactgaacgatgttgatggtgatgacaggttcaatggtaagtaagacttccataccctgaagatgacttgatggaaattgtgtgtgccaaagttgttggagacagagcaagactttttatacctctcactaggagtaaggtatgtcttaacactgctaaaaaccaacatagaaagattgaaaagaaaagaaaattgtgacttggttagtgagatagttattggtgattagcatggtgtataggttgggagtttacagttgtggaacgtaggggattatagttttggtatgtgtcatagtggaactaagaggctgaagatcaacaagtcttgttgagacatataagcaatgagttatattctgtttcagtctattaatttcagtgtttatttaggaaaaaatcaaatatgtataagcaattagatatgctacgtagaattcaccattcttcttatatagaaaacaaaacagacaaaaacatcagataaagatgacaaacttaaggaaatgcttcaatacaataccaacaacaacttgacaaatattgaaggttaatactcaaaaccaaaaaaagatcgtaacgggtttctgcttttaaccagacaaactagccactctggtttgtatgaagcaatgagttgtgctatcgccaatccaagtaacactccaaccccataccctattgccactgctttccagtttaactcttgctcatcttcttccgcttcttcttcttctttaggcttctgtgctggtggcgcgttagtcccaaagcaactttcttgaagaggaaaaccacaaagccctgcatttccttcgaaggacgatttaggttgcccagttatttgtgttccttgtggtatttcaccgttgagttggttgtgagacacgttcatgtacgccaaaaacgagagagtccctagtccattaggaattgtccctgagagttggttacttgataggtctagtgactcgatcttcttaagattagccaaagacagaggaatatggcctgtgaaggcgttgttcgataagttgagtgcgatcaatgcctttaagagaccgagagattcaggaatttctccttcaagtctgtttccagaaagatcaatggtggctgaggaagtaaggacgttctcctgctccatagatagacctttatatcgtaaatctatagtttcataataggtgaggtgatagttcccgaaaataaccttgctatataccatatatagacccagatcttcattcattgtgtgtgatgatgctttccaattcacaaaaaaatctgggggcaagcttccggttagtttattaccagctatctccagtatccgcagctcaggaaaacccagaggaccttgattaggaggagatagaggaccatagaattcgtttgaactgaggagaaggacttgcaatttcggtaaagccttaaggtaaaaaggaaatgtatctttgattccgttgtggtccacacttagaaactgtagagctgagcaatttataagagaccttgggagcttccctgttaatcgattgtaaccaacgtcgaatgatcgtagaggcgtatccacataatacttgtcaggaatacttccttccaagttgttctttcggagtttcaaatacaataagttactcagacatggaggaatttgtccgctgaagttgttgtagcttagatcaaggacatcaagcgagcttctattacagattgaaagaggtatgtcgcctccgaatctattgtctattgcagagaaatagttgatagagagcggtagatgcgggagtgccccttctaaactgtttgtatccaaacttaagatctgcactgatgaatttactaaaacttctgatgacccttcaaagccagttaacaaattatctgtaatgaacactgagctcagtcgaggaaggctccataaccactctggaaattttccactgattctattgttggataaggcaatatactccaaattatgaagggtcttgaagacgtttgggaactcactgatgtcgcaatgctccaaacgcaacacttccagggtagatggaatgtatgaatccaaagttaaactagcctttgatatccaatcaccggaaagatcgaggagcaacaaagatttgagagaggagaagagacttaagtcaattgggtggcttgtgtttaggaaagaaaggtcgagctctttaaggttaacaagctttgcgataggctctaggatttttcctaaatggtttttccctaggtacaaatgctctagccttgatgaggaagaggagttaggaacttcaatagaaccactgagattgtttttatttaaataaattgatgataagaaaggcatagtgaagagagaagaagggattgttccagagaagtgattaccaaaaagatgtagaatggagagcttggttagattttgtacaagcggaagactaccagtgaagtcgttcaagggaaggtacaactcggttaactgggttaggttactaatagtgggaggaacttgaccgaagaagctattagaggaaacatccaagacctctagtttgttgagattgccaaattcataagggagtgaagaggaggtgaagttgttgtaacggagattaaggtaaatgaggtggtgcaactcaaagaggctactattgggattcaaaattccagagaagtgattataagaaacatctaaaactctgagcttgcgtagattccgcacaaatgataaactaccagtgagctcgtttttggaaaggtctaaagcggaaagcatgcttaggttactaaatgaaaaaggaacttgggcgaggaagccactacttgaaagagacaatacctctaagttgttgagcattccaaacttggaagaaattgaagaggaggtgaagttgttatgagggagaagaagggaacggagatgatgaaactggaaaaggctactgttaggtttcagagttccgctaagacatgccctgagttgtagcatcgtgaccgcacccgtggagttatcgcaccacactccattccaagggtcactatggttgcaagcacgagtatcaaactcgttcttgaactgcgtaaaggcttgaatctggtggggaccacaagcaccaggaccttcagcagggttattaaaagtgaagaagcttgaaggggagacacaagagagtaagagtagcaagagaaacgtcaaacgcaaaagcgatttagacatgatgaaaactttgtaagaaagacttgattttgatattagaaatgtgagagaggagataggtataaataaataaagataggacgtaattctgcattgtggagcccaaattgacttggaagaatttaagagttaagtgaagtcgtctttgtattcgggcttggagaagagtatgtggctaagtggctaaatagctactcaaatcatgaagtaaaatccaccttagatatttttttaaacgtataatttggataggaatcacatcactttgaaatttttcacatcactttaaaatccactttcaaaatctcatgaatgaacttggcataaggacaaagacattggagagacgtttgtgggactggggaagtttagtaaccctacgtgcttttacgaaggagaattggcgtaaagcaaatctgcaatagtataattttattagaaaaataattgggtgaatcttttttgatggtgtgaatagtgcactctcaaaaaatcataatattcaattcaattatttcaaatgtatctatataaattcaaatgcatcaaaattaaaattaaaattaataaaatataaaaaatataacgtttaataacacattttatataacaataatattacattgagtaatttaacacacattaaaattaacattacagttataaatatctacatgaaatacatgaacacacaagttttattttatgtttctttttaaatttatatataatttggtatcacatgtaaaattttgtttttctaatattgtttgacataattgtttttgaaatgtatgttttatatttctttttgaagttttatcataataacaaattattgataatattaaagattataatgtaaatacaaaacaagttttataaatagatttgagggtgtattgttcgaataagtgaccctcaaatactttttttttcatcatgaccctcaaatacttattttgaaggtttgtcacccttaaagtgatgatcattattggagatgctctaagagtctatgagcacaagtaagatatagtgggtttatatagtcttaaaaagtatatgtatttgattggaaatgaaattcggatggaagataaaatatggattacgatatgtctatgtttgtattggctgctgagatttttgatattttcttattcccgttatttgagattaattatttcttagtaaattatgttgaagtttacttttatatactaaattcatcatgtttcatacttgatatattgagacgttttatttaattttataacccaaaaaattatcttttactatataatatttccattagccttcaataattacttatttatacttttacccatctttttagtgaaatagattccaacaagaactcttttaacactcaaaattatacaaatttaccttttttactactcaaatttcaataattataaatttcaaaattaattgtatgtcaacagtggagactagccagagctcattaacgggattaactctagaagttattctaatggcttcgccagccatttcgaatgctattctagtgaagtgttatttacgtaaaaaaaaaagaaggtgttatttacgtgttgcaatttggattgactaccaaaacgttacctctaataagtatcactcagaaaaaaaaatcttaagaatatttcaactattcaaaaaaacgtacagcatattggaatctttttgtgaccttaaatcttaaatccccgttggcaaaaaagagtcagaatgctcataattgtggcaattaaaactaaaatcatggtacaaatatgagctgatgggtatgggtatgaatcttgacccatgatggtcttacatgtgttgggcccttaaaagttttcttctcaacaaatgatgcatgcacatcctcattatttcttacattaacttatttttcttttgtgaagtaggggctaaaactcttaactaacattacaaatataattgggaaaacatataacctatttatttccttagtggattagtcctaaaagatcattaaacctaacccaagtcgttggtgctagttatagtttggtaactactttctgtattcaatctgaagagagtattaaaatgcactgtcgaaaccgaccagtctagtccaataagacttgaccaggagggttttcttccttgtcgggtctaactcatgtaacaaaacttttacaaattctgaacttaaaatgatccttcacatttaaaccaacaataactgaagttactcttaaacatttagcatgacccttcccctttgtgttggtaaaatcgctataaaaaatcttgtgatgtatagaccaaaactactagttagtgaaaaatgacaagaatagaattgcacttgtcatgtgcttaagaatttgccgtttccttaaagaaacttgcagacaaacaaatgacttagctgtaagaattaatctcatacgtacccttaagccccacaaaagggtaacacaaaagtcaatagaactgatcaataaagatgtataaatgcatgggtaaaatagtaaacttaccgactaatttctgtaaataacgcttacccgttaccaccaatcgtggtcctcttctgctcgtacacactctttttatataatctctttctttcacataaagagaaagcggaataaaaagtgttcaagagctcataacatcaagaaaaagtatatacattcttctgtatatctctgagaaatattatgattgttgtctgacattgaactttttaaaaagaaaaaaatcataaacttctctctgttttgccagaatcttatattataaagtatattctattcattacagatctgctcttggatttcggattctcctgcaaacgtaaagacgaaggtgttttatctcttcactgcaaaaaaaactcttgaattttatggttttctatagagctgaaatagtaaacgagtcttgacaaaaaaaaaagttcgttttcttttctaatgtttttgtggtagcggaattttagtctttagcctctatattaaataagttttaatctaggcgattttttttttttttttcagttcacattctcattgtttgtgctttgaatcggtgaaagatgattcaaatggatggtggagataggctgagagtgactttattagatcgtatgtcaacggttgagagtagccggagctgtttaactcttgaagctattctaatggctgataaaaacagaacctcgccgcagattctctcaccaccgccgtcgaggagccaatctaaccggtcacttgttgaagtcatgcaaagagagcaccgacacagtagagataaaaccgcttggaaaagtctccgtgaaaagctccgtcttaaacgtaacggttctgtttggatctcgtctaattctatcccgagtttggatacgcctattcctaaccgggataacgttagccaccaacttggtttcctcctttctaactctggaaatgtaacagaggaagcttcgtcggtggagggaaggattcggttaggagctgtgttggcagaggagagagcattatcggctagagaagaggaaacgccggcggagagggaagtggagccggcgaggatgtcattgatggagttgttggaagagaatgaagggcaaatgagttttgtaagtgtcgacggagaggcggaggaggaggtggcggcagtgacggcggcggagataagttgttgtgtgtgtatggttagaagcaaaggagctgcgtttattccgtgtggtcatacgttttgtaggttgtgttctagagagctttgggttcaaagaggaaactgtcctctctgtaataccacaattttagaagttcttgatcttttttagacttttcagtttaattatcttaatttatcataatcaggttgtttcctttgttgttgtaatgtgtcgttgaatatttgatgagtaatccttttgtagaaaattagtttccctcttagctccatggaatcctagtttgtttatgttatttggagtaaacacataaattagatcaatcaaactattatcattaatcagcaacacacaatgttcgaatggttgaaactgttgaggtgacaaatccgtttgtgaattgcaccgtttttatttaccattcataaattataatttatagcgataaggaccgaacaaaataattttttcatcgcggaccaagtataaactatttttacttaagattaaatttatcattgtccgtttcaaaattagagtgatctaatctgctaaatggtaatgatttaatccggttcgctcgcaacatgcattcaaaacttaagtggttagtacttgttgtatgatttgaatggaaaacttgaccaaacccatctatattgcgtataaaatatgtcaaatcaaattaaaatgaaaaaaaagttggcatagtaaaacaaaaggttgatggttgaaccataaattcttaatttaatttggcttgtcactgatgtgtttgatttgaacaagaacaataagtggtcgggctagaggtgaacaatcctccaactacacttatggttacggcaaacacctaactggtggaaagcgtcactggttaactaactcttacctatcttttcaatttgtactttgctttggttaatttagataaccaccggtgttaaaccaaaccgattagcatccggttggctagcccaaaactaggcccataacgagaagtcatgggcttgctttcattagtcaagttttcatttatcttcttaccatttattttccaagaaaataaaaaacagaaaaaattcgtggaaacgccattaacgagatctagcacaaactcgtagtgtggtgtagaagaagacaaaagcaaggagcttcataataaaaccctagagatatttgtttctccaatttcaaaagacgagacgtgaagaagacgatcgaagatgaacattttcagattagctggtgatatgactcacctagccagtgttcttgtcttgcttctcaagatccacaccatcaaatcctgcgctggtatgtacatttcctcaattcgtttctgaaatttagctgaaatgcgattagattaggctaattctcgatgtttgttcgatttgcttgacgttgacatttggggattatgattctgtcaatttggggatttccaattgttagttcgaatttggatctaattcgagtttaggagagattgatcgaagaataatccaattggtgaaatttgtatgaatagatctaacgaaattgaaaatgtagttcgttagatcagcttgctcgattctgtgtttgagaattttgcttttatgagaattttgcaatttttttgtttggtatatctttgcaggtgtttcattgaagactcaagaactctatgccattgtctttgcgacgcgttatttggatattttcacgagttttgtgtctctgtacaacacctctatgaagttggtgtttttaggaagttctttttcgattgtgtggtacatgaagtatcataaggccgtccacaggacttacgacagagagcaagatacgtttcgtcattggttccttgtgcttccttgctttctcttagctcttttgatacatgaaaagtttacctttcttgaggtttgtcttctcaaaaagattgcaatttgttttccatggagcctgaactcttttgtttgacaagctgatttatttttgtgcaattggtgtatgctttatgatgtcaggtattgtggacgtcttcattgtacttggaggctgttgccatattacctcagcttgtcttgttgcaaaggactagaaatattgacaacttgaccggacaatatatatttctccttgggtacgatcttctttccataacttccctttacttgaaatttatcgttgcgtcgttctcttgactggatacatcattgactgttctcttgccaaactctataatttagtttccctctgagtttcatacttcgattgctataccaataatgctctcttcttgcagggggtaccgtggattatacatcctcaactggatctaccgttacttcactgagccgcactttgttcactggataagtatgttcctctctctctctcaaccttcactgagcatctgtttattttcctcctaattggattagtttttgtcaactattgcaacttatgactaaaaatgtgatgtcaattatggcccttttcctttctcataaagtctgactaaatttagcatttagattcaatagatacataaatcttgtgttgtcttgattattattcgtcagctgacatttcaaaaatgtttgattacaatgatgcagcatggatcgccgggtttgttcaaacactgctctatgccgacttcttctattattatttcctaaggtaacaattccctcacctttccttttgttcctaacgctatgaattcttcctcggactgtaattgttttcccccgttatgattgcagctggaagaacaacaaaaagctccaattaccagcttaatttctaaagtttcaatgctcgggaaccctacggattcgatttggtgcccgacaaaacatctaccggaatgttaccaatttactctgttggtggttattagaggagaacgagcatagatgtgtaaactccagcaatctaacttattacactttctttagactttctcgtctctcatcttttttttggtcgacttagtgttactaaatatttcgacgcgacagtaatatattcaccacaattcacaacgagatgtgaactattttaaaattggggaaaatgggactaaaaatgataatattgacgaaatgtcgatctccacttttattacataagtaatcttctatagatattgtatagcttaagcttctaaaatcttatctaccactcatcattaagggatttcggttaggcagcaatctagagaagttttaggagcaaaaaacctgaattttaacatttgttactagtaacaacaaaaatcttgtcaatcttgtacgattaatcttaacgtttacatcaatctttcgttgcactagttcttaccaaaagtcgatcaaattaatcaagataattctcatattattgtagaagagactaatggatcacaacatcctgaaaaagaaagtgataatatttgataaaaaaaattgatgatggccgatgagcatggggataataagaatggcgtgtaggagatgtatagagaatttgatgtgactctaatctctttgtctcctccatatctttcatgctttctactttttttaactattaaaccagtgcaacactatagtaccttacaacaaaaattaaatcaaagatggactatatgagaatctttagtgtttttgtagtaacgttatggatcataagggttgatgctagggttttcggaggacgaggaatcgaaaaatttgtaactttcggtcagaattatattgttacgtggggacaaagtcatgtttctacactccattctggcgaagaagttgatctttacatggatcaatcttcaggttcgtaactctttatttttcttacataaaaacaaaaagacaaaatttgtataatccttaattagagtttggcttctacatgaaacaggtggtgggttcgaatccaaggacgcctacggatcaggtctctttgaaatgagaatcaaagtgccttcaggaaatactggcggcatcgtcaccgctttttacgtttgtattcttgattatatacatttatacctagactaattcaaaactcatattgataagttgtctatatatgtaattaataacagttgacgtcgaaaggaggtggtcacgacgagattgacttcgagtttctagggaacaacaacggaaaaccggtaacgttacagacaaatctgtttctaaatggagaaggaaacagagaagagaggtttttgctttggttcaatccaaccaaacactaccacacttatgggcttctttggaacccttaccaaattgtgtacgttaatcacactccttcttcttattttttatcttctctattcatttcatgacgacaaatagcgatagtgtgtatgtaatatgcatgcaagaattagatattttgaaacaaactagaattccaaaacatttcacaatttgatatgggtgacgtacattttagtcatcattttaggaaatttttagatatatttatatatattcaactaaaaaagcatctaatttgaaatggagaaaatatttgattttaagtatatcataatcaagggaggtaaatgatgatgatgatgattgataggttttacgtggacaacatcccaataagagtatacaaaaacgaaaacggcgtaagttatccatcaaagcctatgcaagtcgaggctagtctctggaacggtgacgattgggcgactgatggtggtcggactaaggttaactggtcatactctcctttcattgcacatttccgagacttcgccttatccggctgcaacatagatggtcggagtaataatgtcggcgcttgtgaatcctccaactactggtggaatgcaggcaactatcaaagattaagcggaaacgaacagaaactttatgaacatgtgaggagcaagtacatgaactatgactattgtactgatcgctctaagtaccaaactcctcctagagaatgttattgaagtaacatatatacgttaattatcatatacgtataggggatttttaaatctactttttctaattaagaaacaaaaaaattactgcttacgagttacaagagaagagagttaagttatagtgaaaatataattgtgtatgctcaaaatgtttttatatgattgcagaagataaataagatatgtttcttaactagttaatttttcggttctcgtttaagtgccttacccggacggtaggttccagtttgccaaatcaaattggtttttgaagaagttagctctaagaattaaaacatcatggtacagacaaaacatttctgcatgttacatcggactctcctgtgtccgaaacgcatcaaatttctgcaatccatttctaaactcaagcggcacatcactcagatccacgcttttgtaatcagtactggtaatttacttaatggaagctctattagtcgagatctcatcgcttcatgtggacgaatcggtgagatctcttatgcacgtaaggtgttcgacgaattgccgcagaggggtgtttctgtttataattccatgattgtggtttattctcgtggaaaaaatccagatgaggttttgcgactttatgatcagatgatagctgaaaaaattcaaccagatagctcaacgttcactatgacgatcaaagcgtgcttaagtggtttggttttagagaaaggagaggctgtgtggtgtaaagcagtggactttgggtataaaaatgatgtctttgtttgttcatctgtcttgaatctgtatatgaagtgtgggaaaatggatgaagcagaggttttgtttggaaagatggcgaaaagagatgttatttgctggacaacaatggtgacagggtttgcacaggctggtaagtcgttgaaggctgttgagttttacagagaaatgcagaatgaagggtttggtagggatagggttgtgatgttgggtctcttacaagcttctggtgatctcggggatacgaaaatgggccgttcggttcacgggtatttgtatagaacaggtcttcctatgaatgtagtggttgaaaccagcctggttgatatgtatgcaaaagttgggtttatagaggttgcttctagggtgtttagtaggatgatgtttaaaaccgcagtttcgtgggggtcgttgatctctggatttgctcaaaatggattagctaataaagcatttgaagctgttgtggaaatgcagagccttgggtttcaaccggatttagtgacgcttgttggagtacttgtggcgtgttcgcaagtcgggtcattaaagactggtagattagtacattgttatattttgaaaaggcacgttcttgatcgagtaaccgcaactgctttgatggacatgtactcaaaatgtggcgctctttcaagttcaagagaaatctttgaacatgtaggaaggaaagacttggtttgttggaacacaatgatatcttgttatggaattcatggaaacggtcaagaagttgtatcgttgtttctcaaaatgacggaatcaaacatagaacccgaccacgccacgtttgcatcacttctctctgctcttagccactcgggtctcgtagaacaaggccaacattggttcagcgtcatgataaacaaatataagatccaaccgagtgaaaagcattacgtttgtttgattgatcttcttgcacgtgcagggagagtcgaagaagctcttgatatgataaactctgagaaacttgacaatgctttaccaatatgggttgctcttctttcaggatgcattaatcacaggaatctatcagtcggggacattgcggctaataagattctccagttgaatccggatagtattgggatccaaacactggtttctaacttctttgcaactgccaataagtggaaagaagtggccaaagtgaggaagttgatgagaaatggggccatggagaaggtaccaggctacagcgcgatcgaagtaaatggggagcttcgaacttttctcatggaagatctgagtcaccatgaacattatcacatgttgcaagtgttgaggaacttgaaaactgagataagagatgtatgttccggagtcgaatagttctgtctctatgagcatccattcttatttcagtatgtatatatacatccatttctgactcatgtggccctattttggagtgaggttttagtcaaaaactctaacaatacattccacgcgttgaacaagaaaaccaaaccgggtcaatttcaattttagtgagaagaaaataccaagaggttcttggtccctttgagaaaagcagagtaccaaagtgcaaattcaagttaattgacaaatgtgaaagagacttaagaattgagacttattaaagagactaagagagtgataaaccccttaaataatgtattgagaaacccttacctttgtggctttgtgacactggtttgtatggttgtggcggacaaattcgtttgcggattgaaccattttatatattatagtccgtaagagtatggattgagacaaatagaagaaatccgtcgtggaccaatttatataaaataaacttgatttggggtggattgttgtatgtcccaaaaatagagtaacgctccaaaactaaataacaccaaaagaattaagaatgcacacgatctcttagttgtctttagtcttaactaaccatatcacttgactacaaaaaataaaaagacacactcacgttgagaaactgatgaagctgaac

SEQ ID NO: 461 - DNA, 81542 bp, Arabidopsis thaliana
gatctgtcttctttgatttgatctttcttattttttcgtgaacaatctctaaaatattcccattaaggcattaaccatgtgaaaacacttgtacgtgtggactatatagttcacgtgtgtatgagtacgggagcattgaataattatcgctacggcaaccacaaataaattgatgtgaacaacgctgaatactttccatttttcaactttgtctagtaaaaaattactaaaataatgttccaattatggtttttagtgaacatcttattgtcattggtgattcgataatagatgctacgagacatgttatttgttcttggaagaaagaggtacgtaaattctcaaaagggtctttcagtgtaaagaggcagctttgactttgctaacacaaaaagtctccatatgattattttctttttcttttcagaagttaatattctcaatttctcataaacattttcaattctttcttttgttattggttgaataattttgttgagttttataaatgatgttttaatgtgaaaaccaagaaacaattgatcatttaattagtttcttgattagtgtgctaaaaccttaaacatcaactaagatcaaaaagagattaggtagttgtggtcaaccacctttgatgataactttctcatttctagttttctaactattttgttcatactgccttttttttttccttgtactcgtagaacactttttatttacttactatcactttgtagtactcttcacaaaacacttttaagttttctctaaaaaaaactatgagtgtaaataataaaagtatacgtactagcgttaaatggcgatatttgtaaaaatagttattgtactatttgtatcacaaaaattgcaagtagttgattcaaatggtaacctatctatagacgaattggtaccaatcgtcaccaaaagaaatttcagttattactactcattaatccgctaaaatccaagatcaataattcactaaattctgctataacattgtaacattgttgctatcaataatcaaattattctattagcatataattattagatccacaaaacttatctactagagcagaagattccaccaaaagttgcttccgacccacatatccaattctttaggacaaaaatatttattacaatcttttaagaggaaaacaatgtaacatggacaccaaaataaagccgcctttaacggtgacggtaacggtaacggcgtttgagtgctcttgacaatacatgaaaatttagtaatagagttaagaaatgaaattaatagagtttggagtgagacaaagagagaagagaagattagagagaggagaggaagggtcaaagaatacatagcatcaccactagtcaacgcttttataaaacttcttcttcgtctcctctccttctcacatctctctctgtctttctctctcaaacctaacaaaagcttcagacttcaattctttagctacctctctcccatggcagtaagtgttttctttccttctttccttctcctcttcttcttatttaggtctagagctttctctcagattatagtttttgtttcgattccgtcaatctctgaccctttttttggaggatttgtagaaagttgagtcttaatctatttgcatttatggttcttcctattgagataacatttctatggattgcgatgtctattagtattcaactttatgattctgatttgctttagataagaaaagggttttatgaaagttactatttttatggtaaagtttctatttttgcttagcaaagatttcaactttatcattgtacttggtcgaaatcgataaacccaatttgtatttgttctgttttggattcttaagtgaatttgctatcttgtttctgtgatgattgttctttaggatgttatgttattgaatgttttgtggaaggacattgttgttgaattgtttgttgcaacagcgttcgaatgtaccaaaatttggaaactgggaagctgaggagaatgttccttacacagcttactttgacaaagctcgtaagactcgagcacccggtagcaagatcatgaacccgaatgacccggagtataactctgactctcaatcacaagctcctcctcatcctccttcttccagaaccaaacctgagcaagttgacacggttagaagatcacgtgagcatatgagaagccgagaagagagcgagttgaaacagtttggtgatgctggtggttcatcaaatgaagctgctaacaaaagacaaggaagagcttctcagaacaatagttatgacaacaagtcacctttgcataagaattcttatgatggtactggaaaatctaggcctaaacctaccaaccttagagctgatgaaagtgtaagaatctcacttttaacctctaaagtgagaatatctctgtttgttgcttatgtgttgtcatctgtttatatatagcctgaaaaagtcacagtggtgcctaaattcggtgactgggacgagaacaacccgtcatcagctgacggatacacgcatatcttcaataaagtccgtgaagagagaagttctggagcaaatgtgagtggatcttcaagaacgccgactcatcaaagctcccgtaacccgaacaacacttcctcagtaagacattctttaaaactcattttcaagtataatcattagtgaatacgtattcaaatagtgagtgtgtgttgaacattggtttgtcttgtgcaatttgacagtgttgctgctttggctttggaggaaaatgaaagggaccggaagattgtatatagttatcgagaaatcagtgtgtaatcttgatgattagacattcgtgcttctttagatgaaataaggcataagtctcacttgcataagatttttatagtataatttttgtatgtatattttgcaattcttccttaatacttttggtgttttcataagacacattccagtttcggatctgcttgcagatgcattatatcttgcttggtacggcctgagtgatttggtaactgatttgatatgaatcagagatatttgggtacctccaagtttgttgtttctaatgttcaaagccttaactctgcaccactataaagaaagacccataactttttatataaaatcaagattaagatctttggaggatgatgactcgtatggtccatatgatatggacatcaaagaagaacgaattgacacttgtttcctatatggctttgtacagtgtaatcaggtttgattctccagctttatgtacttactatttcagcattctctatgcccaataattagacttaaatgcaatctttttaaacccgacctggatggtgaactagactactttttaggtcacggggtcaatggatcaaccggattcgaccacggatcaattgattaaaatttatttaatattatagaaattattagtttgtataaatataaatataaaaataattataccatggtctaacaataataataaagtaattaaatatttaaatctaactaaaagtctaaaatagtaacatatactaaaatagtaggagtaatgacgaaaataaaataataaaacatcgcgaattcaaaacaactaatctcggttgtctctatcaccattccattcgtttttttaggcggtattgtgagatttttgtcaaaatctaaaatatcttctaagtcttaagaattaaaaaaaaaaatctaaaaataaccgaataaagtctaaactcttatattttattccagaatcaaatgaatttttaaaccaccattcttcaagctttggttgatacttggttagcttgaaaaacggtttagtgatttggaacatgcgaagaaagcttatgattctagtttgaaacattaatctcgttgcataccactcagaatctcgcttgatgattttgaagagaaggtgaatgggctgaatcctaattcatatttgatatgatcctaatatgattgtaatgactacctggttttgttacaatatacgaaagacccattagataagtatatagtagatgtagaaaacataataagattgaatttttggaggtttgattcgaaaccaaatgagccatttaatatgttggacatatgtgtccaatgatttgattagttcagctagagtattacatggattggacagtgagtttgttccactttctccgatgtatttgtggcgcagtgttcgtcgagaattaactacattaaatgactgcaaagctaagaatgaaaagttgttggaagataagaatgcaaaactatggaagctatgaatggtgtacattgttgctttggacaaaacatagttaacggattgatgtatgcaaaactacatgggggtaccagcattctactcgagatgcggaattgtataaaattactattgactttacaataacctatgaggcaaaggtggtaatttgcaaaaatggtaacaaattgaaatttggtaatggtggatacattgatgtcaatcttgaaataaagctaactctagttggtcaaaaaaataaacgtaaggcaaaattgtgttgttatagaatatttcttaatcggtaatcaaaacttgtgaggttgtaatattttgcaggagatgagaggaaaaaaatggctaattagattttgattatcttttggattcttagtactcaaaactttttccttagtaataatggcgaacacattttgcactttgtaatttgagactaatctcataaaatcattacggttcatgctaattatacacatagaaagagtaaagcaatgctattatgatgcatcgaaacgggtatacaaccaaaaaacaaaaagaatggcaaaaaatatacaaacaaataaatataggattaagacaattacaataaaaacaaatacataagttaaaaagaaagtcatacttaagtctcaacgtaatatttttgaaaattctttaatttgagtttaaaaaaatgataaaacaaattttcttttaaaaaaaaatccggctcatcaagtgagaattgcaaacatcaagaatctcatatatatgtgccattgtatcatatcaaatgtctctctatatcaacatcttacatcttagtctacacacatatatattgagttattgatcaaaattccttgataaaagtcgtagattcttgtggatgtaaattaaatatttcaatttgaaaaagattatctactatggtgagaaacaatttccaaaacacttcattgtccctcatatatccctatatagattaatttttgcaggatcctcaatttgccatacatactacattattataaaatctaaacatatatgaaaaatattattatagtaatggcacaaaaatgaaagtaataatgagcattattatttcttttgtctagtttctatctccaattgtgttcgagattgaaacacaaacacacaattgttttgtcgacgatcaggatttcatccaaaatttttcactttcacagtatgagtttgaaacacaattgttttgtctcttaagttaaaaacctttgaatttagcttcccgcgatttattagtgggctgtgaaggcccaaaagaagcccataaaatgagtcggccggatacgatgtatacatgatcgtcatcgactgaaacctaaaaagccctcctagacgacgataataatgttgatcggaggatttgaggataaggacgcagctgatattataattccggcctctgagaaactactggagaaaatgcggtgtatgtaattccttctttcaatcttccaaaattattagaattgtgatttgttcgcagagtctttgattaattttttgcatctgctgctaattaggttttcgatctaaagggttatacgcttggactacaagctagaacctgtaataaatggtctccttgtcctgtcttagtcttactctatgctactctgggccttcatcgttacaatttgcttcaggtcagaaaatatatatgattcatgttcaattgacaataatgaatcacacatattttgacattcagttttcgtttcttcagggtacaaagtttcagctcaatcgcgtaaagaagtacgttttctcaacgggtgctgctgcctcttactacataactttggatgcaatggaaccagctgctgactcctcctcttcgcttcaaacctttcagactgaagtaacagaagatagttttggcaaatttattctgacgtgcaatattgcaagaattcgaggtaaaaagctcattttattcttcttattatactccctttgtttcaaaatataagaacaaatataagttgagatatggtcacaaatgataaaatgcatttaactttgcatggaaacttgcaaaacatgttataatatgaaacaacgtagtaatcatctcaacttattcaatctctctgtacaggggaaccaagcaatgtctataccgggttgaatataggttgtcgcttgccggagtgtccgccagagaatccttttgaaatatattatctggtaagattattattattataggcccatggcatagctcgatttttacaaaaagtaaaagagtgatatatgtgttttgctgcttttggtcagatgaaggattcggagctccaagaaaataatgactggattcgtctatatttggaacttgctgttgccaccactgataggaacagggaagctagtgattttggtctctccaacttggagattgtcaacgtggccgttgatgcggagggactcctcaatgccaaaaatgcaattttctacattaggtacaaggacttgtacgaggctcggcttggtaatgctgtttttgatcgcattgctatcgttagaagaatcttcgatgaggatacgggacgcttcactctcgtgggtcagaatcagagttcagatattataaattaactatttattaatgttagactttaagttatttgtataatattgagtgtagatttggtttgtaacagtattttgcttgaataacttatcataacattatgtttgcctaaatagaggaagaacgagagtttttcttactcttgctttcagttgtttccttttcatttccctcttgctaattaacctgtggtacgcatagtgaaatgatagtattatattaggacttaggagtacaatgttgccttttgtcatggactcataggaaaaggtcaatcacatttcttacatcattttatctgttagacaaattcaagttcatggtccttgtgtgtccatatccctttaagggctaaggctataacacactgccataattctcactcttcttctttttactgcaactaagaaagaaatgaaagaggttatgttgtgtctctataatgtctcgtcgtttagaaatggaggtcataataaaaaaaagtattaatataaagataatattatttaaatactacaatagaagatgaaaaaaaatctgaattagtagatacatatgaagttgtaaacagaatttattgggatcaaaacctaattttcaccaaattatttacgaaattcaatcaaatttacactataaatagttatatattaattttatagaagtctcatgacacccctaaatttcgtaaataagctttgtttgcttttttgatggattatttacttagtaatttggttacatatagtcgcaaataaaggtttgactttgctccaccgttatctattaatacgatcaactagttttatcatgtgtttgggtatgattgttacgagattaagacaaaaaaatatgactttacgtatacatacatcaagagttaatgttaaagcatttttaagtcatgaaatcagctacattgttcatgatttcttgtgttatcatgttatttgttttgggtcattttcaagggaataaatttaatcagcttgtgtttaattaattttaaactgttaactggttacttgtcgaaagctgaaaaattaattgcaaaaatattacacttgaatcgaagcaaaaaggaaagagatttctatcaaaaagcaagaaagaggtctatagctagagaatagtaaatgtctcattcactaaaggggtgaagtggagaagacttcactacttggttttctgtatgtacaacagagctaataatcatacacacgctttgatcagagctatggttcaagcttcatctgtagcgttggctcagaacctgaaacataaaggtaagcgacttaacgacataagagatgttctaaactttcgatggacgactttgattctaacttttcttacagttgttgttgctctgttgctggattccaaccccatttgaacaatgctttgcaggtcattattagaaaacaggtctgttttcgaaggtgtttaatactctctcagcaagactgtggctatcggttgcttgaccctttctagctctaacatgaatataaaatcttttgatctgatctgattctgtgagatatagacctaaagcttgcacctattctctagcttgtactgtttttcattgtatttcttatgtgccacaaactcattttacaattcatacattttttgtacttgtccatctctcatctaaaagatgtctttgtaagagactttgattgatcacgagataaagaacctgaaagatctatacaagctaagactatggtccctttatttttccttagacaaaagccaagaccaatacaagctaagactatggtccctttatttttcctttcattgttctgtttcctagattcttcagatatgtcactacttctacaatccattctatattgaacttctgaatcccttaagtgattgcagccaatatatctatttgtggtacatatcagaaaaacaaatagatttctttgttactatgttttgtcattaaacatcttagcaaaaatcttcttcaaatttatgataatagagtaatcttgttcaaagaaaagaatgagtaaatgaaagacattacattaggaattgtaaattgagtcttaatcatcttgttatctcctcatgcatgttgctcattgattcgtttcaagtaagactagtctcgacatgttttcatcatatcgaagcttctccatattcgctttcttcttccctttcccctccttcaggttgcttgatttgcactaaacttggaacataagagcatagatctggcttacagctttggtctccaaaatccccaacgagatccaatcccctcaagtatccagcctctccaatgacaataactctctggcggttacgttcatcaaaaccaaaggcgactttcttctcctcgtcaatgaagaaacttccacttataaaaggaacataactattaaaaccagctgtttccactctcaagaacttgctccacaacacctcttctgtctcaatcttagttgtaatccacaagtcaagctcatatggatttgattcatcgtgctgaagtaaaaccgcaagcttctcttctcaaacacaagacaaagtcgtatagtcatgatgcccaccactaaacggcagaggcagaagaggaccaaatctctcacttgtaaaatcaaaacagattaagcgattagctaagacttcatctacatctacgttcctttctgcagcacaccagtaagtgtttcccttaaaaggaacgccagtgttacaaaacgctatacgccaatgtggagtgacatcaagagtagtccataaatcagagtcaaaatcgtagacttcataccaaaagaattgcttctcgggtgcattgtagtaataatctataaacctcaacaacttgtagctacgacaagaatccgtattcacgtatccaagagcgtaagagaacctatccattccgtatggacgatgggaatatcttggttcgatccaccttgtttgctccaaatacggattacaaaccacaaacctagaatcatcttttaaaatgcatagcagtaagccctcgcagtgatagaactgagatatcttgacttgttcgtcaaggcaagtaagttttcctttatgctctatagatggatctccattgagaataatgcttgttaaagaaagattgttacccatcatcacgatcatctgagactcaccttcctttgctgcggctaaggcttgacctatttgcatcttcgtaaacttctgacttttggatggatcgttcactttttcagtttgcaatcaaaaaccctttttttcttttgctatttattgcggttgaagaagaagaagaagccctaaataaaacctagagacctaacgtgggcttgaaaatctatctagtcgggctttcgatgagaaattttgatcaatatttccagatccactagattttctcacatatttatttagtaaatcctgtcaaaattaaaatagtgaagttatatgaggttatagtaattaaatttgttgtattctccaattgtttatctaaatgtcttgtggttttatataaaatgatcgagatggatgcttgggtgccaaaaaaggtgtgcaaggtgagtgatgaatcatgaatggtatgatcgatcttgtcccgttgtaaccacaagcaagatcagaagcgatgcatgcgtagcaaattttaaagagagaaaaaaacaagtttttggatgtgagtgttaaattatttagcaaatttttgtatgtaaatactactgcttgctaaacactattttatacctacataaccaaaatatctttactagataattaataataaaaaatttattggagctctttatgtttgacatgtaagataaaatactcatttcagaataatgttcttatatttttttttgttgccaaaactatcagattatgatgaccaactcattcttaaaaattagttcttcaaatgtaacagttattatcactaaaaacctagaagacggatcctattcatttatatacagtcagataaagagagcatctcctgatgataaaggtgggagtgtcattatttatattaaaaaagtaagaataatatcatatggaaaaaaaaatttggtctgttacaaaagtaaagcctatggtttataaatccttgacaaagaaaataaaaataaaaaatcaaattaggaaaaacaaaaatcggcatgatcatggctaattaggttttgatcatcttctagattcttaatagttttttttgcttgtagtagtaatgacgaacacattttgcacactgtaactctagaccaatgtcgtaaaatactttacaatttgaggtaatgatacaaatataaagattaaagcaatgctaatatattgaatcaaagcaaatattaacattaataaaatgttttgaaagataattgttttgacttttgactagtcgtaagtagcaatttactagagatgaggaattgtataagattaaggatgtatttcactatgagattttagagttagctttgaagagtgtcaaattggaatatcatgttggtggaaaattattatgctttgaaggttggaataagcattggaaagccgatgatgttgagatatacatttacaatggtctcgtaatcaggtgctaaatattgcaaggacatgcgttgtgtaattatcattgatttcacaataacccatggggtaaatgtggtaatttgcaaaagtagtaagggagtggaatttggtaattgtggatacattgctgtcaatgttgaaataatgctaactttggttggtgctgcaaaaaaaaaggtcagccaaatatgtgtagaacgaagccgcaatatctactacaagattgctactctatagatgttgaatggggttcccaaccacttataaaagtggatcaagatcaagaaaaggagaacatgaagtttaaggtttgtgtgtgtggatattccttcatttgaatgtggcttcctagatgttgagttcatgtttttgttttcttacatcattaggtagcaactgattgttttggtagcttgtttgctcatatatatcaaaattctgatagaattggaaacacatgtttgttgttatggtattagcatatgttactcattatacacacaagtacataagtttattgtgacaaaagtgctgatattatgtgaaggttatgtagagaatccgtggagggttggtgacgttaatgactgttgtggatgtgttaaatctttggtaatgtttctttccagctttaattacatcctcaaatgccaatgattcaatagtagtgtaatctcctgcacaaccgcaagacacctgctcaaaaccaaaacaaacaaaaattgttttcgaattgcttttaactttggtttctcgtacaaaaaaactaatacaaaggtgcatgagtagtagtaactgaataaataataagtgcaaatagttgacttaaaataagaagttgaaagagttgaatgatttcatctcactttttaccatttgagataaataagtttgaaaattgattcaacttattcaaccacaaaaattagaaaactaaaccaattataaaaaacgaattgttcaaccctttcatctactattttggagaggaattgattaaatgatgttcaacttttttttcaaactcaaaattttcctatcatttatatatctagcaattcatttgcaactgaaatgtttttttcgtgtcaaactctaggtttgaaacccgtatacatcaccaacaataactagagtttgaaatcaaataatattttttcatatataaaacaatttaaaatttcttttagataattaataaaaaatgtatgacacacagacacagctggttgatttgtttatttgaatttttgactaggattaagaacattaatcatcaaccgttgattatataagcaagttgaagaaaaggcacggttcagattcacctcttctcatatgatgcgttacataagatcctttccctctttccctcattttcaggttcagcgccatcgtcaaaaacttttggcggtcgatcaaaaaatttcgaaatttgaagatttcgccggcaaatacacaaacccgaaaatgaataacacttcaaaattttcattaccagaagaaagaaatcaaataccttcagatctctatcttcctcattcacacaccctctctctcttctccttttctctcttctccttttctctatctccctctttgttccgttcgcatcctctaatcatcgtcaacaagccgacgaagagagaaacgaatccaaagttcgttacttgaaagctacccagaagaattcaaatctcaggtacttttcctgtggatttgatctgggcactgcttattagggatttgattggatctacaaaattctgccttctgggtgattcaatttcacggaaatggtgaggattaagaaagtagaatcgttctacgcgaagcttcgtgagtcagctacttcattatcttcacagaatccacttttgatatttccttcaacatctgatgttgattcactttgtgcgcttaaggttattactcatatccttgaatcagattcgattcagtattcttgtttccctgtatcgtcttttttggagattcacaagtatgctggtcctgctggtttgtgttctacttcgttggagagtcctcctgttactatactgttgattaattggggttgtcaccgtgatttgaagcttgtgttgaagttaggtccttcggctcgtgttttcgttgttgatagtcataggcctattcatttgcataatcttagtgattataatgagcaagttgttgttcttcatactgatgatgatgagaggcaaggtgatttggcttatgatttcgatgtgttgaaattggcgaatgagagctttcagttacgtgtagaagatgctggtgaagaatctgatgaggaggaggaagatgaggaagaggatgaggaggatgatgatgatgatgatggtgataggccaagtaagaggaggaaaatgggagatggtgtgaaggttttcaagaagctaaagagggattattacaagatggggacttttcatgggaagccatcggggtgtttgttgtttgagctatctcatatgttgaggaagaacactaacgagttgttgtggctggcttgtgtttctttgactgatcagtttgttcatgagaggttgactgatgaaagatatcaagctgcggttatggagcttgaacaacacatcaatagctcagggaatatagataagatcactagtgttactctgaaagatggaaccaaggttcgagcaccagactgttcaagaatctcttatgaagaagagcctaggcttatgcttcttagagagtggacgttgtttgactccatgctttgttcttcatacattgcgactaagttgaagacatggagtgataacggtatcaagaaacttaagcttcttctagcgcgtatgggatttgcacttatcgagtgtcagcaaaagtttccgtacatgagccttgaggtgaagaggaagatgaagcaagagtttgatcggtttttgccagaatatgggcttaatgatttctactaccggagtttcttgcggcttcatggttatagctcaagggtctctgctgcagatgttgtctatggtattacagcacttcttgaatcatttcttgggtcaggtggctcctctgcttcaaaacagtttggtgaagcttatgatgctctgtctttgaacaatttggataaacttcgatctgggatgcaacaagcaatcaaggttcaacgagcaattcttagacaaggaagtgcagcaatcactaaaagtggatgcattcgaagtggtaggaaattcagatgggtaaagattgaagattcaatggatgcgaagtatttgggatatcctcaggccttaacaaaattctgttactttctgatggatgctttgagagagaaaggagctaggatgaaaccaatgctatgtgcctgcgcatctcaacaacctgggaagatactcgtggttggggtttgtgggaaaccgaggctcggggcagtcagagggaatgcttttggcaatgctttcagaaaggcagctcaagaaagtagagctgattactttcacgagctattcgagtcttcttggattgtcttggatgcttctgcagttaactctttcatgattagattaaccgagaagctctgacatagtctcattgttcttcgattcagtgtgttttcttttatagttttcagttttatctcactgtttgcattttttacgagcctgtgtaataggcacaatctgttatcaatcatgtaacttgtttaatcaaataaccatagagttttatgtgaaaaggtcctttactcatttggtgttaactctttacctcttcaggtctttaactctgtttatataaaacatctaatgaacaatctgtgttttgaacggatagattaaaaatacacgcaggcacaagacaagaccaaagacgatatgggtttggctaaatccccaaaatttgtacaaaaacatgaacaaacataatgaaattcaacaaagattaatactccaacaatccagttccctctagtctaacccaaacttgaaagagaaaaaaatggagacctgctcagactcgtgaagcgaaatcttcattgagatgatggaaacttgagaacaaaatggctaaagacattgtctatttcttaacttgaaggcttctttctccacagagttgtcccgcggttgatctcctgaccatctccagacaacctcaggaggtgcaagaactggctatcgttgtggccctgtgtgccagacgtggcagagccattggttccaccaatttcagaggtggtggtggtgagtgaatccaccacatcgtcttgttgacattctcttctataatccagagttatgacctgaagctcgtgcgtgtctacaatttcttgtggtatgctctgcaattaccaggaaacaagatcatatgattactaaagttcacatacaagcacattgagctttactaataaacctagtgacttacctcgagaacccatccaatataggtgacattattgacatgctggttcatgtcgagatcagctcgtctaggctgcaaaaacatgttcacaaagcctttaagatattttgaagcctaaagttggagaaagagttctaataatgctattgtttgtaccttaagcccaatcattgaatactgagccggatcttcgagtttcgggattttcttcaagcttctgttattctcttccggaaatgctaacctataagatacatagaaagaaacatacttagcattcattgaccagcaagctttgccctgataccaaagtgtcctttacctcggttcttgaggacagaagaccaagtactcgtcccgaacatcatcagaaactttctgaagccgtctcgtgtcttggttcatcatcacccacttgctgaaaccataacaaaattgccacacaacaaatcagaacaggcccataaatccaagttaccgcaacacaaaacatgtaaccaactcctatatccatgtccctaaccaatgcagaaagtccaaaactttgctatatatctcctaccttgtagcacggccagtgacttcaccagtgacagaatccttaagaatccaatcacgccttgtcccaatccttccttcactctgacaccaagtctctatctcaaccacatcacccctgtagtagtaaccaaacaaacaagctaaaagtattcaaaactccctactcacactattgtcaaaacacaaacaaatacataaacaagcaaaagcaaaaattaccaagcagggtacttatagatctcgatatgcattctcgcagtaacccaaatgagatgcaacttcctcatagtagttgttgttgcaaacccatcagtcgaaaaaccaacactttgtgcatgattacatcccacctcctatacacaacaattcaccacaaaaagattcatactttacaacaaaaccaatcatcaagacacacacacacacacacaacgtgaaaaatttgtatctgacctgtaaaagattagcaatggtttcaacagtagcggttttgttactacccacttcgtaagatctaacaacaaacttctctttataagataaaccatcttcagtcaaactacctaatcggagctgatccgcgagagtagccaaaccttgaaccacacttccttgatcagcagatacaacagcacgcaaaggaaccaaacctgtcttcttcgtctgagaacaagagacaattctccgacggatgaaattcaccggatcagatcgatatgaatgggagaagaagagtaagcttctctgtaacttagaatcagtcacattacacgaaagcttcaacatcttttcgaattttgaaaattggagaagaagaagaagaaacgagaaagtttcggttttttaatttcaacactgtgaatgaatctcttctagtagtatcttctctccgatgggtccgaggtgaagaagaaagacatcgacttttaagtttgccccttggtggagttcgaaattacggttttgccatttaatgccattgatgatggacaattgtcaaagacgaatgttaaaaaaagcctggctagtgttgttgtttgttgtggtgtgctctgtttttgtaatgtagccaagcacgtgtcttccctgtcttctcggtttaatcacgtgactttattttttttgcaattgtttttttttgaagagcgaagactttttcttctcctccacatgtattgttgttgttgttgagatttttttgttgttgttgctcattctattacgcatcactattagtgtataatttcataacaactcacacattttagtatctacttctaaaccactatacaccaactatgtcggacgattcaacctatatcacacgattttaaatatatataaatcaatttgtatagtctagaacgttaactaaacaacaagtatagtctagaagaaatccattcattgcaaatgtagtcatttctagaaataattttggacatatgcatcaattttgaatttatgtttgcgttctacaattgtttttctgtgttgtggttcttatccatctcgtcgtttcttttgttcgagttggcgtctattccttgttctttttctttcgcattgtagttttttcggttttttccgctacttgtatcattctgtaaccatctcttagaaacgaaaatggtataagattaataccaaaaagaactttggacctagggcctcatgacgtaaacactaaaaaactccgcatttgatttctctatcaaacttggggcaggttatttgtgctttttggcctttgacccgaattttttgtaacatgatcggatcatctagcgatgaattggtttatccaacgaattactaggacttaatccggattattgatgtaatcaaagaaaaatataaaaatttgcatataggtgtaagactaattaaaacagaagaattataataaccaaatatattgaccattatgcgtagttagcggttcatactagttagttgtatcataatcagagctcaaattcagaaatgtacgttatatcagtttaacaatggtaagccaaaagtcatctatagacaaaattttcgaacttttaggtaagcccataattaaccatgaatatatacgctttatgggtaggtcagcatacaaagatgttttcttatgtctcaagaaaatttttaccttgaggaaacaacaaaaaaccaaaatcctcctcaagtctcatctacaaggtctggaattactttcagtctttcacgaaacatcaccgataaacaaaattccaacttaagaaatttatgggggcaaaagagaaataatcttaagttggttaagactattctttgttcaatttgccgaggactctttcagggaatatcttctcttcatgagctttcttctttgctaaggcttcttcgtcgaggactttaataggagaccattcaggtaacttgaatgactccatgttacggtagctctctaacattggttttcctttaagggtagcataatcaaatgctgtgcctacagcagcaaaaactagagagtagcgaatcgcacccttaggacctcctgtaaacaccgataatatgtcagttccgagcttaataaccctaaagagactatcatgaaagtttcttccaattgatttaaatatggcagagttattatgatttgatctcttattgtaacagaaaatagcacactctcatggtcagactacttgagactgagagtattacagccaaatcttcagggacatggagtagaatagatactgccagaaaagaattcaagataacgaaccttgaagtcttccaagcaaagcaccactaaaaagtcctccaatagctgagttcattaaatcatcgtgttctgatcttcgagttattctcacagattcacgagctcctaccaaaaccaaaacattgcaacaatcacataatattcacattacatgagagtccaccttcttagagaaaatggaaacactcagtttcaatcttgataacacagatggaaaagagcaggtaccgcaatagcaaccggcgacaatagcaaaattagcagcgtaaacagtaggaatattgggatgagctatccggtgtttagacactaaaccagctcctccaccaattactcctgcacatgaaacatcttctcagtcactgtgatgcaaacatttcttacatgttctatgcaataattaagcaattgaatagccaatcaaagctggtgaactgaattatctatacaccaaaagttatgaattcttctaattaatggagcaataaaacctagaatcgaacttctagtaaccgatacaacaacgagaatctaattgcttctttccgatgaactttggctactttccgatgatatgtgcaaccaaaaatctcaaaattgttctaagatggaactcattatagagtatcctagttcttgcgatcaactaaacgtaataataaatcccgaaagtgagaagaagcattgcgaaacctgctaaaagggaagtgatcaacacacgcttcgtcggagttccattttcctgcacaataggcgtcggaggagataacgcctgatttgtttgttctggggatttccgatcacccaacgccatttttgacgccacggaacttcgagagaactccaatttcaatgcggtgttgtgaatcgggttgatctaaaacccgagattgaaccctaactcgaaacccgatcataactcttacataattaagaaattgccctgaaagatgatttaaagtttattttattccctcaatgtttgacaaatagatatttggcccttcacctctcaggagagattttctttggaattaaattttcctctgttttaggtgatattttccttttcgttacctttagttccttgtgcaaaggaacaactatagtatgagtcttccgattgcaagtgattctttttaaattgaagtaaaaattactaagcaaatactatttatttggtgtttatttgcaagtgacatgtatgtatagtactaatatctgttttatcttatacattgggattctctaatattggagatcaaaattatgactagtaatacaataattacgcaatacatatgtagtactaaaacaagaatcttttcactatgtagtactactatgtcattgagaccatgagatattccaatattgcttcagtttcactcactctctctctttctctaaccattttgcttttaccaaattgagatccgagtggataattggagagagaaagaaccaagtcttctcaagatacctctcggctagtaaaaagttaagtttttaaggacaaaagagattgaaaaagtaagaaccattatgggtccatttagaagaagtagaaaagataaagtgaagagacaaaagaactaataatgatctgcacttgagtacccattatgttttatttcccatatgcaaccactaagagtactctctttggtttgaggtattagtatgaactaactagctccgtgattgtaggtgttttaggataagataattgaatgttgttagtacactcataacatgaattgggacagtttggttaggctcttgcatatgacattatcagtttggttctaattaaggagataaacatgctaaaactttgatgatctatgtttcttaggacttgatcacaattcacaatcactgcaaattgttgtaattgttctgatcaatctgtttatggttttgatttttggtcaaggtaaggaacatttagactgatcaaaagaaaaaggcaatggatggtggtggttattgaaatggccaaacagatgaaaagaaaggtaactttcaaaagttgctttctttttttcttgtcactgtttctttatctttctctttctcacacatctctttcttatacccacaccactcttgagagagcagatcaatagagaaaaaaacttggctagtttttctccacaaggttttttctgcaaacatgtctgaacttgcattgtcatctcaagaagagtctccaagtagtaataagattggtttatcttctcttcttctctctgactttcatctcttttgctcatttatcctcactcaccctttctatttttcttacttgctcttcttttcaccttacatcttcaagattctctcttttctttcaccactctttgtcaccaccacactcttgcttcttgccttattgagtactttacatgttcaagacacttgtctcgactctgaatcactagaaacacaaccaagcttccttttctccttttgtagtaagcttggaagtgtcttggaacacaagtttgatgtcaacaatgagggttttaagtcattggaggagttggaagcgtataagatggtcgtcgaggcttgctcgatggaatgtgcgtccgagaatgagatatgttcggatgaattgacgtttgttgacaaattctgtagccatgagagcacggtgtcggaatctttgaccgatgagacccttgaggagcaagttgagatccaaccgttgaagtttgaggatgtgattgttttggagaaagaagaagaaaccaagaaatgtgaaaaggaagaagtagaagaacaaaaagtcaagcataaaagtgacgttgtcctcgataacagagaagagccgacaaaagaagaatccaaagctcaaaaagttgaccttgtcggagatagtaataatgaaagttatgatctcccaaaactgagcaattttctcggagaaggagaaggtaaaagaaatgtagtgactaagaacgaagaagaagataatgtttctctccaaagctttggatcaatgagaaaagagaaagaatggaggagaacattggcttgcaagctatttgaagaacgacacaatgctgacgttggacaaggcatggatcagctgtgggagacttacgagacacaaacagagaagaagcagcaaaccgaagaagagaagaagaagctcaagaagaagacgaagtcgatgatgaagacaaagagtatagagaaggaagttatagtggaggaggaagatgatgatgggattgatcatcagcaactttgttgtttacaagctttgaagttctcaacagggaagatgcatttgggaattgcgaggcctaaccttttgaagctatctaaggctttcaaaggcattggacgtttttacaatgctaacaaacattccaagaaagcttgaaaaggagatgaataataaaactttgtattaattgggatctataaacaatgtaacttgtaagtttccattgttttgggcaagttctatgaacaatgtaagggaaaataaaaggtaaaggctaggattttgccatatgtgtttagctttgatcttaactttctttcctatccttgtatattttgggacggataacccgtaatggcccgtatcgattgagaattacttgtcccataaggcatgttaccgttgaaatatttaccttttttaaaatgtaaatttttgtttaacaagtaagggattgggtaaaaaattcaaagatatccgcattttctatattttccgcttgagtaatataatatttacaaagtgtataaaaattatccaaaatttcttcatatacttcataaaaactatttttttcaaaatttcaaaaaaacaaaaaattccgtcttgccgtagagttttacctctttcgaaatcgacactcacccaaattaatgagagtttgagaattgaatttagatacccgaatttcacattctctatacattacccaaaatatttgtcccgtattttatcaaaaatagttctgatcatgtttttcaattactacctgaactatttttcgttctgatatccgaaataaacatgtctattcattatatctcttctaatgatctaatcccacaataattttttccttaaactgtaattttaagtcatatatttcattaccattcattctattaataaaaatattgtaacattttatggttgcataaattaaatccggcaatggaatgtctaaaagtagtataatcggtcttgttcccacttttgtttcctagttgaacagatttgaatctcagatctgatataaaaattcactaatcgacaacattttactacaaaatttaatagaaagtcaaaatatgattgttacacttcaattaacttaaaaaaagttgaaaaaatggttaccgacatatttcatagtttggccgcgtacgattagtgagacactccattaaatagcttataattgaaaattgaatgacactgtgagattcaagtgtaaagtgctctctccccaatggctaatcaccaccgacttttacgcggcggcggatctccggccataatcggtggcagaatcacactcacagctttcgcttccactatcgcactcttcctcttcactctctccttcttcttcgcttcagattctaacgattctcctgatctccttcttcccgtaagttctcttaccagatctctccgaacagatcatatccaacgctggatttgaaactgaatcgtagtattgaaatctggcgaagatttgtgtttaattttttcgaatttttgtggaattttagggtgttgagtactctaatggagtcggatctagaagatccatgttggatatcaaatcggatccgcttaagccacggttgattcagatccggaaacaagctgatgatcatcggtcattagcattagcttatgcttcttacgcgagaaagcttaagctcgagaattcgaaactcgtcaggatcttcgctgatctttcgaggaattacacggatctgattaacaaaccgacgtatcgagctttgtatgattctgatggagcctcgattgaagaatctgtgcttaggcaatttgagaaagaagttaaggaacggattaaaatgactcgtcaagtgattgctgaagctaaagagtcttttgataatcagttgaagattcagaagctgaaagatacgattttcgctgttaacgaacagttaactaatgctaagaagcaaggtgcgttttcgagtttgatcgctgcgaaatcgattccgaaaggattgcattgtcttgctatgaggctgatggaagagaggattgctcaccctgagaagtatactgatgaagggaaagatagaccgcgggagctcgaggatccgaatctttaccattacgctatattttcggataatgtgattgcggcttcggtggttgtgaactctgctgtgaagaatgctaaggagccgtggaagcatgtttttcacgttgtgactgataagatgaatcttggagctatgcaggttatgtttaaactgaaggagtataaaggagctcatgtagaagttaaagctgttgaggattatacgtttttgaactcttcgtatgtgcctgtgttgaagcagttagaatctgcgaatcttcagaagttttatttcgagaataagctcgagaatgcgacgaaagataccacgaatatgaagttcaggaaccccaagtatttatctatattgaatcacttgaggttttatttacccgagatgtacccgaaactacataggatactgtttttggacgatgatgtggttgtgcagaaggatttaacgggtctgtgggagattgatatggatgggaaagtgaatggagctgtagagacttgttttgggtcgtttcatcggtacgctcaatacatgaatttctcacatcctttgatcaaagagaagtttaatcccaaagcatgtgcgtgggcgtatggaatgaacttctttgatcttgatgcttggagaagagagaagtgcacagaagaatatcactactggcaaaatctggtaccctttctgatattcttttcgccatttgacaatgcttttcattgtgtgatgtttttttaaaactttgttgtgtttatttgaattgcagaacgagaacagggctctatggaaactggggacgttaccaccgggactgatcaccttttactcaaccacaaagccgctggacaaatcatggcatgtgcttgggctgggttacaatccgagcattagcatggatgagatccgcaacgctgcagtggtacacttcaacggtaacatgaagccatggcttgacatagctatgaaccagtttcgaccactttggaccaaacacgtcgactatgacctcgagtttgttcaggcttgcaattttggcctctgaactatgaaaattttctttatcatcaaaatctgaaagcatatgttgtttgttacttcagctctacgaagttttaaccttagtttttgtttgtgtttatttatatatttttgggggtttagtagaacacttgtattttgttcatagctatctttgttctatggcaacctataatcaaagcttaattataaagtcacattatgccattttaaattgtttgacatcgtattatgagattcataactgctttgctaattctacatttcccttatgatcagtctcgagaaaagaaattcagaatcagtaaaacttagaatgagccacatgaagaaagagatttcattagcagtgaagaaaaaatagacaagcaagaaccgacgaaactctctcttgctctcaagttttgactccaattaataaaatggcgacacagtgaaaagaaaataatagtgtttttttttgccattgctctacgcctaaactctctaaaaccaatagagctttttgtttcaaaagcacatttacgcagcaacagacacacggggagcatcatccacgggtttcgtagctctgttagcatcatttccgccaccacgtcttactcgtccattgttaccattggccctcgggaacccaccaccatcaccatttgctcggtttgcgtatccgcctctattgtttcccctgttattaccatatccgttgaaatcggtccggccatatcctcctcttccacctccaaagctcccacgaccccttcctccttcgtttctgtagcctgtgtttacaccaaacgtcgaacgtcctctatagttccctgtttcaacaatgaatgatatggtaactgacttaagaattaagatcctgagagttcgtttctcaaagttttaagaaaacttgcctcttgcggtagatcgcttttcctccacaacaactttgtgtccattgagcatgacaggtgatgcctgttggaaatttccgtaacagttagttagcctaagatgttcagggccttgaaaagttcagacgtaataccgttggttcttacctcgatagcgctttgcatggaacttgcggattcaaactcaacaaaaccaaaacagaatccctgtaggccacaatacttaaaagagtaaatactcggaaaattacttactattagaactgttgagcaatattaaagatggactcttttaccttctggcttctcacttgaattccattggtcctaataagtccaaatttctggaactcattctcaagcaaggcaggtgttgcatcaaggggtaaaccctttagatagatggatggacctagagctgttacggaatcaagaaatgagaaagattgcagctaagcatgcttaccatttaaaaatatgagccagaaaaaaagcatttacctctttcattctcttgattgttctcatttacagcaacatttgctcctgaatctgatttctcagacaatggtgttggtagagggatatgaatggcttgatcttcttgtttctttggttccacctttgttggagttctcgaagcagacattggtgcagcattttctttcataaccttcacctacatatcataattacaaacacgaatggcatcaaatcatgggagccaaatatctcacatcagcttgaccaagaggagacataacacaacccaaatgtctgttacttacaattgatgcataagatctctttggaatttcgccagtcctagaatcagattctccaaccttttgcacttcaattggtgcttcattaactgtttcagtcaccagagcttcttctgcagctgatacttgttcatcttcagagggcgtgaacactttttcaggctcattaatgctcttggacaacacctcggtttgcttaacagcatgattctcttggacatatttctcctgaacaaagtcatctggaatttccttcgcagcagctgtgtctaaggcaaaagaatatttacaacgcttataaaaaccaaagtcccattaaaaagaaaacaacaaataatctattgatttgaaggaggcaaatacaaaagctaggttcatcaactcaccctggtaagtgttgacaggagcttggacgttgttcactggaatctgatttccatgtacgacagtgccttcatcaatgaatcgaaacatatcattcaagacaaagtatcctgtctcctgtggagcaaggaagaaggtctgactaaacgtcctcctgacactgtcttttcccgtcaaatacccagtcaccagtacaatataaccacctccatgagattcttgtgtgtccacagtagctatctctgcactgattacaccgtaaccaagcgccattatcttcttgtcaatagcctgctcaaaatatatatacatacttgtattataggtaggaaaacttcaaggatgcaaagaaagaggtaaatatagtacactcacttgcaaggtagaagtgatgctcattaaaccattctcttcaggacgacctaacttgctaatctcttggtaaaatctgtgaacatgctcaggtgattgatgcaatatgtgataatactggggcacaaaagcattcccaacctataaacacacgaataaacaacaatgtacttctaagaaacggaaactttcataagaaaacaacacaaaaagaacctggatcataccatatctggagtacaagctgctgctggaacttgctgtgcacctaacatcgccatagcctaattttcccctgcaattcaaaatcaatcatcatcaccttgtgacaatcactaattccacttcaatctcatctattctagcaaattagaaacgcaaaacgaaacagtaatactacagatctctgatctagatacaaaaatcaatgaagatccaattcaacaagttataacagtatgagtatcagtatccaattcaaacgccaaatgcgacgaagattcgcgaagaagataagcacaaatcgaagttatgaagaaccgatctaagaactggaacagtctagaattcaaatcgatcaagtaaaagaagaaaaagagtggagtaagtaagtatgccgttgctcggagaagtttccgatgaagaaaacaacggtggaaatacaattagagtttaccttaactgacgattaaccggaaaatttcggagagacgatctgaggaaagcttccttggctatggcgctagttagggttttacagctgaatctcgaaaaaaagagagagcgacgtgagaacaaaaaaatggaagaagaagaaaaaaaagtggctttagagtttatatctgtatgattgtacttgtacgtgtatcagataaattcttcttctaatcttccacatgattactgtaattaattttcgttaaatctgttataaaattttgacatttacaaagtaatacagagaaattcatttctttagttttaacgaggttaatcaatctggtggttaaaacgtcgttgtataatctcaacaatgtgtattatatagctcaaaatagttgaaaatgggtaagaacaaaagcaattgtatagtgattaactttctctaaagattcttaaacaaaaagcaggaaatagagaagaagaaagaaaccattctagattattttgagcaatctactttggttaaaagttgtagtttaagttgaaagataaaacaagcaaaatttattggttcattttatactagatgatcttaaaccggcatcttcagtacaagctgaccctccataacactgaaagaagtgataaaaacaggtcaataacattgtctagtcctccaaattgttacaacgaagttgatcatttatgcgtaaaacgattaccttttgacatagtagtagcaaaagtcggcgaggatgaaagtttgaacgatctcggctagtagagccaccggaaaccagaagtaaccagccccgagtagccataggtaatgtccacgagtctcaacgacctacatcttcagaccatttagtctcttgagcttattcatgaaagcttaattagtggattaagaaaggatctttacctggataatccaatgagcgcatgccaggaatctagctattccgagtgcaaacacataatgagctgtgaaaggctctatgatctgaaatggttgttcgagaaattgttaagtctagactaaccacgagataggttttggacctaagtctagactaatcacgagacttgtagacaaccagaatctctaataaccatttagattgtctacattggcctaagttttggacctaagaaaaccaaattttcttgccactataaatatgtctacattgaccaatatataagtgtactggatgatactcatccgcgagaccaacatgacgaatactgatcaaccactagatcatatcatagtttgttaaagtgctaactctagtctctacattgacataaaataaatctaaagatacatagatatgtcaaaagtgtctgacctgagcattttgcattaatcgaagttgaggtagaacagagacagattctgtgtagacgcaaaacgcccacaatatacggtggaagtaagaataactcgtactcgggttaataatcaacgcaaggatagcagatggtacaagctggttggcgaaaaagcgagaaacattttacttaaatcatttcgagagaatgaaaaggcaaacaacatatttacactctttaaatcaaagcattaccacatagtaattgtagcaagtgtcgagagactttatataagatgctttcagcttgtatcgaatcatataaatgacccatagagtcgaaaccaaggtggcgaaatcgagaactgtatggatatcaccttccatgtttatgctgcatatcaatctcaccgctagaaatattgctgtcacttcttgagattttaaagaaagacctaataattcaaaccatacacatattctatgagacaaaaccaaaatgagcttataaagttccacacaacattgatacaatataaacataaatgttcactagcaaaaccaaaagagcttataagattccacaacattgtcacaatataaacatataaatgttttcacttctaatcacattaccaagaaacaaaggtctatgatttaaagtcaaaatcttatgaattatgataaggtggtgggatttttattgttaccggagcaagtcttttggcgagtgagtttgtagatgaggatcaagattccggcggcgtggatgagctcggaggcgatgaaaaagtgattgtgattcctaacggtgaatttcagaagaacgacgaggatcaaagagatgataattcctaaagctattttaaccttgttcgattgttgtcgcagccacccgaaaacaacgttcacggcggagacacctcttctcttccccatgatttgattattacaaatctctctttctctgatctctctcagttgtgttgtgtgtgttttgcagagcttttatgcgacgttcgtgaaagcgaaggatacgttttgttgagtgagcgaagacacgacgagggcatgcggtcgatgacgtggcggtcgtatttttctgatctgatcaactaatcgtattaagacacttgtgagtaatggttttttgtttgtggtatcaaatcttcattgcaaatctttggtttttaaagatctttttattaggaaataaagttatgtattttgactattttattgcctgttttgtaagattatcggaatcatttggaggccaaaaataacttaatctctctaatttccagccttatcgattaatggtttagtttcggttcggtttctttgtttttttttttttctgaatttgttatttttttaaaaaattgccacaaaactatatatattttggtttgatacaattttcgttttgttgtgtttggttttagctaaaaattaggtaactaaaatcttattacatgaaatttggttttcaaagttattaagacatagatcataatgtgtgtcaagtaaaacataaattactgttatgtgtcaagtttaaatactgttagtgtatatataaattcttaaaataaaatataaaagttcttaacctttaatataataaaataatatctctatttatataaataaagaagaatttctttttctatattaaattgtttttcttaggtataaaaaaatgttcataaccttaattctattgggtttttttttgttcatatatatatttagaaaaagtaaaaattctttctcttaccggaaaaagaaatcaagattttattaatcttataatataaagtttgaacattctcaacatagctaattaaaacaaaacaaaaatgataacaaaacacaaatttacgtatacaaaataaatctgatgaaatgataaatcaattgaacaaaaccatgacagattatttacaagagtgtaagagaagggaggttccaaagttgggaccaaaatttaaaccataccacgagaaccaaactatctttgtagaagcaatcgtaaacgtggagagctacgataccaggcatagacaacacgagttcatattgcttttgggggtcgtgagatgaagttacccatgacacatttcatttctctctcgcaaaatctacttaaattactaaatataattatgaaggggttaatttgttgatcatctggatttttttttttggttatggcttgtacttctttggctttttcatatttcaataataaaagtagacaaaaaatgaaattcaatttttatttcatatatcaaagaatttatacatatattgtgaaaaaattagatcccatatatccaaattgtcatttggcgtcgttcaaaaaattagttactattacacatgaatcaattaaattcaaacccccatgagcctcaacaatactgaagatcaatcctatgaaatttttggaaacatatacataatatgacttatgtggttgcataagtccataaaatatgtcattagatctcacggattctgcactcggcggcatcggttgattgtggtgcaaccacgactatatacgttaaccggagtacggggtttatatggctgacgatgacatcctggtggagcattaggacgcaagcatggatcgagtagtagatattttctcttgttatcgttagcctcaactcgtcctacaatcaagatgctacaaatcaccaacaagattatcataaatgtcttcatttttttcttctttttgtttctctcgttggcgatttcaaatattgtttctttgttatctctatttttttttgtgatgtggatatgggtacatatagggcttagagcatatgctagttttagctattccttatttgaaagaaaaaataattctaagttaaggatgtgaaaaatgttttttttagctagagatgctttttcgggattccattgtttttacagccaaatttcttttgaattaataaatacatatgtgattgatgagatttgatttctagtctgcttatatatcaccccatcctatattgatgatatttgattcaataggttgcatgttgtatatctactaccatacacttcaaagtaaacacaaaaatatagatagttataacttataaccagtaagtagtaggtttttcatgtcatggatatccactatgctacacttcacagtcccaaagaatatagctaactatatttttgtagtggccatctacaacatatatatatattcgacaaaaatgagtgttgatcccaatgttaaaatgatataactccatgagtagaatccaaagcagaggactcgagctcattaagaccgtccacattggtgactcccattaagatgtctttactataaattaatataaaattaatagtactatttaaagctgaagactcttacaaattatgtattattttttctccttccattggtcatctttaaatatgggtgtctcattactttttttccccaacagaacaattaaaaaccaaaacttggtgatgaatcacagaaaaatgaaacaaattcgatctgagattgggaaagaaagagtcccgaatttgtgtgtgattgagaatatgagccaaatgaataaataaataaatgtagaggaagatcaggaggaaaacacaatcattcggtggtgatggcccaagcgccgtcatctacggcgattctccggtgcatattgttggaggagaatcgatggttttgggaaatgttatggcggttagaaagcgggatgtcatcggagatctgccggatgagtgtttagctcatgtgtttcagttttttggagctgagattggaagagaaagagagagaaaaaattgcaaatggagaaaagaaaaaaacaaataacgaatgataggatgacacgtacggtgtctttcaatatcaaatatgtcttcccagagactccggagacacgggtctctcgtaataacacaataaacttttatttttctttatttttattctttttaaatataaagatacttccattttatgtcggatggatatgctctaagagcacccacattggttatctgtttatggatgtctttaaatataaactaatagaaaatagtagatgtctttagttttagatttttgtctctaaaaagatatttgagacacaaaaagagggttgtctttaattttattactaatttattctaaatacatcttttaaaaattgtgtaatgaagatgctctaagagctttattaaatagaattaaattgaaaataagataatgaattaggtcattatgtgaaaaaatgtaaaagaagaaaaatattaaatagtcaccaagatcaaataatttttgagatttatctcatacaagatgacgattgaagacaactctcaaaggttacaataatcaatgtttgcatgaattagatacttttagtaaactatttgctaggaacctaaacaacatgggctaatttacattacattgggcttgttggttctaaaatgggttgtatctttagatgtttatttgcttggaacactaaatcctcttggttttggattctacgtactcacgacaaggtcagataagacatatagtgtatttatgagatgagacatataggattttaggagacgagtctcgatgaaattactcaacaataataagagtcataccattattataagcacaaaacatggacaaaattatttcagttacaggatcttgtgtattgaattgaaatcagtaagatttatatattaatcaactggaattatcatatacagcgtaatgtgtatatatatgaatatataatatcattgcaagtctcatgtagaagaaggatcaatataaagggacgtcgtcgtcatgtgaggttaaacctaggcatctcgtctgcaccgggtaattctactacaaccacgactataattgtgaacagggacgcgaggtttgtggtgggaattgtgaggatgacatcccgctggaggattaggaccacgacaccggtcaagcacgcctggatttaaatactttcgacctttgcgagcctctgattgctccaccaccacagcgacacaaatcaccaacaagattatcatccatgccttcatttttagtcaattaatatgttgatccttcttcttgacacctttgtttctgtgaattaggagaaaagtgaattcatatatagagtgcttagagcaaactctaaatttagctaatccatatttgaggaaaccacaagatgtgaaaatagaattttgcaagatatatactttcaggttgcttttttgttttgacttcatgtcttagcagttagcaagtcaattgatacctattcttatttgtttttatttggcatatgcaaaaatatacatcaatgacgaagaaaaaacttcatggtagggttaatgggtaaaaattgagtattatgtctaaggaaaggatatctatggatagttgtccattttgtctcaaacttttttctccataaatagtggtgactcacaattttttactattttcaaaaagaaattaacacgaatgtttgcaaacttttttctctttaaatagaagttctagacctatgcttatacttatacattttctagagtcgggatcgacatttaacataatcggcttacttagatttaatcatttgtgaagtgcatttgaaatgttttgcgcttctcttattttacctctccactcatcaactcgcatacatacatgagcagacgtagtgagagaagattggtgcatatgccccgagccaagtttaaaaaaaaactattctgattgtaatttgattacttttgatggtaaaaatagttgtccccacaaaattttggttcaatcgtttccttgcaccaagtacctaattttgttttgtcttttctagccaccgttagattattgttcttaacaccatgatcatcggattaatgtatatcttacaaaattattatattgatatgaaataaactaattaaagttaacatttacgtttgtattccctaacttagttaacttttggttttttctaagttacaaaaatcttacaatgtgattccttttctcccaaagatctttctttttttcactaaacaaataaatgaaccattatatatgctttcatctaaattttatactaacttttctttcaatatgtgcatgtatatgatttatacagcatttaatacaatattattcaatataaaaagttgttccaatatggttgtctctcctttcccaaattgtttttttaaaccattgacaccatacatgtctaaaatcagaaaggcatgatcacaagaagctcccaataattatcgagtacacaatggtttagagtaaactatacaacttcgggtcgagccgaggcattacaactacttcgaccgggttaatctttggcaaggctaaaccaggcccttcagccatatccagtggttcatcagacactttgtgtaactcaaacccttgaagcaatctagccaatacaaagtgtacaactcttagaccaagattgactcccggacacgacctccttcccgaaccgaaaggaatgtattcaaagttgctcttttcacattgtgatttatcctccatgaacctctcaggcttaaaggttttggggtcaggccagatcttgggatccctatgaagtttccatatgtttacgagcaagcgtgtgcctttctcaacacggtatcctcccacgaaacaatcttcacgtgcttcgcggattcctaatcattcatcattttgtataaacaattcaggttgaacatttacaagattaataaggtcatgaaataagaattataatgacaataaagattctttgatttgtgacctgttagaggagccggcgggtaaagtcggtgcgtttccttaacaatagcttgtaggtacttgaggttttgtatatcggattcttcaatccatctacctttgccgacactattatcaatctcttcttgtgctgcttctaaagcagctggattgttgagtagcagcgataccgcccatgtcaaagtgatggatgtgctgtctgatcctgttaatgtgagagcctacaacaagaaacagaacatatatgttggtatacattcatttcaaaccatgattgaattaagtcatatatatttctcatataaacactacattagttcataaattatttgtttgtgagattttctaacatatatatccaaattaacgagaggtgaaaattatatgtgcataccaaaattgttgccttcacaatgacatcgcgtacgtgtccacttatcacaatatcctctggtaagatgtctagcagtagatccatgattgttctttcttgatccttctcatttcttgatctcttcttgagatgttcgtggagccacttggtgttgactgagtcaagctccttaaatagtctcttcatttgagaattttttgcaaaatccaaccatcccaaccatggaataacgtcgcctatcataggaatcacagccaagtactcgcaatgcttcagggcctccttataacgccattcatcgctattcacttcaccgaaaccaatcctcttccccaccatcttcctaaggattatattgaaggtcaaaaactcaaataacatgtcaatcttcactatagaagttccaccattccctttgtataggtgtttgatcaacgtgtttacttctgaagaacgaatgtgaccaagcatctctatactgtggtttgagaatagatggacggtgacaatcttacgtaactcacgccaatagtctccatagggagccagagtcagacttgcattgttgtagcctacgtaccgaccaaaggctatattgggtctggttgctgtagccaagtcgttggtggtgaaacaatctttcaccgtttttgggtcgctggctacaaccagcctataaaaccctaacttgagggagaagataggaccatgtttttgggacatggcagctaatttcttgcaaaggagttttttgccacgcaaaagatggaggtgtccgaatagaggcaaagctcccaatggctcaggaatcgtggagctatcaacttcacatctactcaattgttttctgaggaaaatgtaaccaaagattacaagggccaaagagaagagagacaactggagagtactaaagagaaaagtcatggtgatcactttgtttaatgtatgggataatgagaatgtatctttcttttactcgtatatatagtagtatggtctggactatgaggtaatgtcgctttcatttactatactatatgtatgtatagtaaacgcgtataacctttagagtttagactccatgtaatcgtacgtattgataagagccaaagacatcatcaattttgtggggtttggtttggttagggcctagctagctaattcaaagatggtccttcaaattgtcggagatattttgagttttcgttgatgtttctattgagaaagtctgtacgttattttattcacaccatacatgatacatgacaaagagacattagtacatagtacgactaatagtcatgtgattttatatgtgtggccgtccttaaaaatcgcaagtttcacatttgaattgacatttcatacatatcaatttccaggcatgtataacgcacgagaaaaataaaagatccaaagatgttcaaattcgttttatcatgataacgcgtgtaaaatacatataaaattcaatgatgttcacgtataaaatacatagaaattcgttttatgatggtgtcacgtaggataggagcatgtggaatatgtggtctgctgtgtatatatatcccaacttatggaatgtgtgaaaggagattatgcttgctttttcgattagtgtctgacattagtggctgtaattatagttatttcgtcttatatataattcacttatcaatgtaaatgcacattatagtttctaggtttatttacgaattttactcggtttagcacaattttgtttaacctagcactaatcgtcgccgttaatatgaaaacccaaatccgaacttcttccaccactaatcctacgacctcctcttcaaaatcctaacacctactccatctccggtacactatcttctttacaatccttgttgtctgaatgtcaaagaacgaacttagattccaaaatctagctttagaccactcttctcttctccacagggacgacaatcactctttcgggttgtgtctacaatcggctgtgaaagaagcttgtggatttatagagtctgtctgatgctaatgccgttggtgagtatgagtagttgcaaaagtataacatttgacagtgtccagtcttgttgattcaagtcttgtcttggttagcatctcaacttgctgtcttggaaatggcaaagtatttttgctttggacatgtttaaacaatgcatagtagaatctgcctctcgggtaatgttgtttcggtcacaaggaactagacctaaattctctggagttctcgaggatttggatgatgcaagcttgagtaataaggatagagaaagccctttgagaataaatacttcaggtggccagtaaaactttggacagtgctcaggtgatatctgttgcagcattatattaaagatccgtgcttaaggaataataagagtcatgatggtcttactagacaacgcagtatactttgaccacacaaaattatactttgagatatattacaagaaatcgataggtaacaatgcagtattaaagtagaccaaacaacaaaccagattcatgatataatgatctgaaacaatagaaggaacaagttactaacaatagagaggtatcctaattttcttaactaaacaatagaaggaacaagttactagacaaaaaaaaactccataatcgcctgaacttagatcgccatacgagttgatcaaccaatttatagtctcaagttgagacacaaggaacttagcagagacagagagcaagggaagggcttctctgttccatggcaaagcagaggattccacaggacctgaatgaccaaagactaatgttgtcgccttctttcaatccattagcctcaacaatatcgttccacccacagattagattgtaattccagcttcctttacctgattccttcttcatctcccatctctttaacatcacaccccacttcttacaccgttgatccacaagaatcgctcccactccaatcttcttatcgtttttgatgtctttgtctatgattcttgactccacagaagtcaagaaatcgttgcggagtaagttgttgaaaggcattgagagacggttctgtgttgggtttacatcagtaacgaacagagtcttctcaaagatcaatttagcgtctttggcttctttcatgtctctcatcacattgacaagccactcaggcgtctctctcgccgtttgtgaaaaaggagcaacctttgctttcttgactccaccagtacgcttcctctgttccacagcacgtctcttgcggtttttgttctccgttaggcacaaagacagaggacatgggaaattagggtttggtgggtctttcgtctctgtcttctcggacccagccgtcttgcaatcaaagagtacgagtgaagaacaaggttcggaactagggttttgtagtgtctcgaaatcagcggcgatgaaacatgaagaagatagcaactgatgatggtttagtgggtcttcgatctcagaatcagaagggaactggttaagatcgataagcgatgaagaagctgaagttaaaaacccactaagcttttgttgtctctttaccaaagacgatcttgtttttctcgggaagagacaaaagattctcttctgtgtttcttcttcttcttcagagacaatcttacgacgttgtttttcttcttcatataacatcaccgccgtatcaaccagtacatagaaattcgaccacatgttcttccctgaagcagtgagatgatcgtgattgtaatacatactagtcattgtgaatttgtgattagaaccgaaaacttcaagttgttctgagaacaaaatcgtgagtcgcaaggaaattacagaaagtgagagaaactgggagaaagtgagaatgagagagcctctgttgccttttaaatacttgtgctctctgcttaatgcttacatcaaacttagggtttccttttttctttgagattagtagtttaattactgcgattagtaactaattatagccgttgtctgattaaccttataattacgatttagtcactgactcagtgactcggtatttccttttttcaggtaagtaatttgcctttttgcttcaggtttgtttagtttacagtttgattggttaacattttttttcctttataaatataagtttactcagaaatattcagtgatattttaatcttttatcaaatattatgccggacaatgtatccaaatgggttttgtttttcgtgctctgtttttttttttttctttgtctatttggttgttttaaaactatgcttcttgtgttgtttgtttggttcattccttcttaattaataaaagaataggaaaataaatatttttaagaagttaagaaaaactgatctacagtcgacacaatgatgagttatcttaataaatatgaaggaaatttactgctagtgtatcaattttgttttatggtttacttggtcatttactgagatgatgtttaaggggtttcacttacaaattaagaaagtaaaaatttctagctaggcaaacctttaaagtaaaatactttaactgttttactgttaatgatggtttaaggttttcactaacaaatgaagaaagtaaataagcatataacaaaatatctgtaacatacagatggttgccaaatatattttttgttttttgttttgttttgcataagatgataagtacatcatttagtttggaaaaaaaatctttcaaaaaaatcattccaattgataggaaactagattttgcggcaaaagatactctatatatcccattttataagattttttggttaaaagtacatatattaagaaatttcttttcactaaaaaatatattttaaaccatgcaattgcaacctatcataaaaacccgcataatataaaaatcacaaaatattacatacatttttttatttttgaataaaacatacatttataaaatattacatacatttatttattacacagaaacatataaaacatctcgtaaactgaaacaattaaaaaactaaaacatcttataaaatggaacattgggagtatagtatgactgtatgagtgtgactgcaagtccttgctactattaactaagcagtacatatgtttttgggtaacgattatttaataaataaatctgctgtcaacaaaaaggaaaaaaaaaaacatttaattgtttctataagaaaaagtgcatataagatttcattaagaaaattaaagcataaaatagattatgcatgtcatgatgttagcaatgacatagcattcaaaatgatgttagcaatgacattgcacacacaaacaaatgtgtgctttcaatataaaggttaaaaaattacaaaaatgttggttgtacttagctaaatccattagtttcaagttgttaaacttataatcactagagagttaggcttttatacgtcactttaaccaaaaaattccagaatcactttaacctggtaaaatttcctttcaccaggttaatttagttttcatatttcttgtaaatatgactttttagtatgaaaaagtgaaattgccttttataaaacataatttggtaaataccaaataatatcatttttttacattcatcctaaatttttatactaatattttcatttgcaagtttattaacgaatcaactcaagcaaaaagtataaaagatttgaattggttatgtacgtgtgtatatatcaaacaggtcgcattcaaaagttcgaaattcttatatattggaaacaggtaaatactaaatagtattgtaatccgattcactaaattaaccaatagtattgtttatcacgatgacacttttgggtggctattttatccatccgattcttatttccactctaaataagtgtagtgtccaacgttaccgtctccaccactaccactatgctatctttttctcttataaaaatattattaggtaacaactattaataaacaaagctatatactctatttttctatataaggcgtgagttctccacaagcctcctcatcaatcaagatcaagtaagcatcactactttgtactaaatccaaaccatgacttccaacgttcagctttcagaaacaaacagcccaaggaatcagaaaacccgtccgagagcagagaaggaggaagtggactacatgcagagagctcagtggctaagagctgccttgcttggagccaacgatggtctggtcacagtcgcttcgctaatgatgggtgttggttctatcaaagaagacgtcaaagcaatgcttctcgttggttttgctggccttgttgcgggtgcttgtagtatggctattggagagtttgtgtctgtgtgcacccaaagggatattgaaactgcacagatgaagagagctattgaacataagacatcactatcagcaatcgacgaacaagaggaggtaatgtagctagtgtctaattaaacactaaactttactcacacataaaaataaaaatagaaacctatgtatacgtattttcccatagttattacctacaccaatctggcactattttttgaatcatattaacaaattttccttattagttagcatgtaggcttttgaattttcagctcatatatatattttaaaatatatcatttatattttatgattaagtacaatgtgactcttttgatgacatgtgattactatatgtataagttggcgtttgaaaaacaatgagataaaaatttcgtatttaaagatatatgagtcacatatttattgccaattcattttgtaatcgaaacttcacactatacaaaattatccttgttttcttttagatgtacatgacatttctatatgattacatttagttataaaatgtatgtttaatggtaggaggagaagaaagaaaggctgccaaatccagggcaagcagcaattgcatcggcgttagcgttttcagtgggtgcagcaatgccgcttctgggcgctgtattcatagagaatcataaggtaagaatggtggtggtagcggttgtggccaccatagcattggttgtgtttggagtgactggtgcggtcttgggaaagacaagtgtggttaagtcgagcgtcagggtggtgattggtggttggatggctatggctcttacctttggtctcaccaagttcattggctctgcagccatgcaaatctagaggctctttcatgtggtccttctttccatgcatcacaactagtgttccgttatgtttgtattctaatcatcacactatctcccgaactacatacatatgtaatgtagacttttttaatgcacaacaaaaaccaaaaaagttaataaatggtttgttaatcgatctccatttcccaaaaacgtgactagaacaactgtttagaaaatatcgttttctcgtatattatatctaaattcgagatgttgtaagacttagaaaaatgatttacgcttcaaaaattcgttacaaccaaaaattgatcactaacctaagaatactattaataaaagatttgttttttttttattaatggatatgagagaatttgaatcttcagttaaacaatttgaaaaaaaaaggagctatgaattgaattttgatagcttgaagaaaattatccaccataaagaaaaatgactaccaaatctcgaatattgtgggaatgcatatatatgtttacaacaagtttagttactcaagtaacttttggtagacataatataaagcgcctttgtagttattccataaaccactaaccatagtcgataacatatcgataaatccttcaaaaactttcggccattccttaagaaattggtcaaaccatggcattcctttctccctcacatcaccaatattcaatgagatggaatctgaaattcttatgactcgtcctttcgccaaatcaaacaagatagtaaacacttcagtgattacatcaactactaccttacacaatttgggaacgaaagactcggctgtatctcttacaagcttgatcaaggcattaattgcttctcctggaatcttgaatgtttgaacaaatagaacaaaagaacaagcggcaacatggaagatcacataagaaatcgaactagacaacaaacttatagtcaaaaagatcaaatttgctaaagcagctatcatcttctctgatctttttctttttgccttttggcttagaaagaaaaacaatataaccgacgtgcactgcttatgactttttctaaagaatgtttcagaggtgcttagtgacaacatttacaattttattaggggactagtttagttactttgattagtaaaactgattttgaggcttttaaataagaagtattcattacgtttgggccatacaggcccataatattggccctatgatggtttagcccatgatgattaagcccatgattctcccttcctttatccctacgcttccctccaaaacttctcagttcagacttttccccaaatccttagcaagatttttcaacaaaaatggcgacacttgggacttctggagtttcacatccacctgacgaagcaaaggttctattataacaaaaacgcttaaaacacaactgtctagggttcgcatctacgttttccaagcatctgtgtaaaagcattttagggttctaaactaaagatgatcacatctatcaaagtttccattgttaattcccttctttttttcttctcaaataccaaatgcctcaacaactcacaagttttattcatatgcaaatcttcttctttttttcttttcctttttttgtggcgtaaatgaaaaaagactaacgaatcaatttacattacaagttcattcatctgtattaatgtgtctgaccttacctaatttggagacggtaaacttggtgagcaagtccatttcctctgtattaataatgtagcgactaaaagttaacatatcagtatatcactaccgaattcttcaataagggttttgtttttcccaaatctcttgccttttgctaagatcgatcattcactattttatcatgtctctgtttctcaaccagccttccaagttgtgcctaggccaacctgcgttgatgagatcctcctctcattttctctctaatggtttctaatcctcttcactgcaatttcctccttcttccatcaacggctgtggagtcgtgactcaaggtcgccacacttgtttggcaaagaaggttactgaggataaatgtgaaataatgtggtcagcttacccctgcgtggcagctagtttcattcacgacggaatgttatctttctttgatgatacatgtacatgggagtcggatatagcagtaccaatacaatactcgtcgcctccttttgtaactttacctcgttgccaaactcaaattgtcaccatcatcttctcctgaggacgaggactgtgttgtggctgtcaagtttttgggacctcaactcagctttttcagacctgcttaaagcaactttgaggggtggaccaacgtaagaatcgcaaacccttgcttttactcctcccaagtcatgttttccaagagagatgacatgtttcgtattcctggatctggaggccacatcatcggatcttgggatctccacagacacaagcaaaagaatcagaggttgcggctccaaaaccgaccaagacccaacgcgagcttctggaatcttgcttgacgagcgtattcttgctggagtcacaaccaaccaatgaaaccttcttggttaagtggtacaagaagacctctcgaaagatcatgaaaacaaaaggtgtaatggtgttcaagctagaccataaaggaaacgctatttacactcaagacatttgagaactcttcatttacctctcacaatctgattgttattggacaatgacaaaaaaatttaaacttttacccaaactcttaacttcaaaattttcaaaatcaattcataaagtattggtaagagcctttgctaataacttctcattgtggatgctctaatgtgcaagtgcatatgacatctaattattttgaagcatgcaattgctgttagagctagctcacacgagaaggactcatatatagtagtggatttcagcgttaacactaagagcatataacattactagatcaaacacttgtgatatatgtataaagatcagagaccttgttacccacttaccctagctagttttctcaagtcctatcttaaagtccgtgtaagggacacatgcatgggttaacaaagcaaaatttgggtattgaatgattcaaaaagttaaaaatcttggtcgtgaaaagaaagaaaggataatgtgttttggattgaagttttgatgatcatgaaactgatcggagctggcaaagccacagacttgacgataggcttaaggcatatggattttgaatataattaaaccatgcgagaagtaaagattcgtttggcaaccaaaacatatattcaaagaatcataagaagaaaatttataaccctaattcaaaatagactatcgatacagcttggtcgatgattttttcacgttaattcaaacgattccaaactttacaaaatcttacatatatgaaatacaaatcttaaatacaaacgtataatcataaacagaaaaagaagaaaagaatcatacaagtgcataaaaacaaatataaattaagactttgaaggagattgatgcaacgagtcttcgttcctagatcgtatggatcctcataacgacgacacttaatggtcaacaccacaagggaaaaaagacaagatacggcgaaaagtcctaacggaattaaaactttgttgacgaacaatgtatccatcgtttgcttcttttgttttgtttgtgtccttctttttatgctttatatataacctacgaaacctaatgctagtttttttttttttttttttctaacattactgataattattgtgagattacaaaagagtaatctttattttatttttccttttctaacaccattgataattattgtgagattacagaagagtaatctttatttaaccgctctgtatagttataaattgtaatcaattttattttattttttatttaaattctttttctttttctaattgatgtaagaattacttttataatgtatccttaatcaacatctagaattgtctttttcggtattctgtattcactattataaatacagtctttagcataatctaaataactaatcattaaagtaagtgaaagtctctttgatatagtggttaaccaaaggtttattaatatttttacatctagatttggggtttgagttttaaaaaataagattaatgatgcaaagcttatcgaatgtccaaaataccacatgtagagctgtttgtaatggtttgagcgttgtagagaaagcatgtcatacatacataattatgtccatcacaaggatgtcatacatacataattattccttgaaatctgaatattgtggaatgagttgcagcgtggaatcgttgttcgtaagaactgttcatcgtaatcacatatgcgtagttaagtatcattataataattaataagaatagattacatatataattcaaaaaaaatcattaaagtagaatgatataattgtgaagaaaaaaaagtataaaataaaattttagttgaatgaaactatgtttgaattttatttttttaaaaatctttgattgattgaattcaattttcgaacccaaaataacatatcgtttaacacactttgatatcttgaattttaatttatataactcttattttctttctttagttatttttcccttattctttttccagtttatctaaacaaaaggtaattaatttcaaaattcgataaaccctactatttgacatcttctacgaacgggcacaccggagaatcagcttctcgttccgtacgatgtcggcgacactccgacgcctcattcttctcacctccacaaatcgctcccgtaatctatctccgccgtttctttccaccgccgtgaaccacctatctctatcattctcttccgtctcatcttcaccggaatcacacacttccccttcccggatccgaacccgaacaccactcgaaactcaattcgaaacatggattcagaatctaaaaccaggattcacaaactccgacgttgtgatagcgttacgagctcaatccgatccagatctagctctcgacatattccgatggacagctcaacaacgaggctacaaacacaatcacgaagcttaccacactatgatcaaacaagcaatcaccggaaaacgaaacaacttcgtcgaaacgttaatcgaagaagtaatcgccggagcttgtgaaatgagtgttcctctctacaattgcatcatcagattctgttgtggtcgtaagtttctcttcaatagagctttcgatgtttataacaaaatgcttcgatcagatgattcaaagcctgaccttgaaacttatactttgctactaagttcattgcttaagagattcaacaaattgaatgtgtgttatgtgtatctacacgccgttagatcgttaacgaagcagatgaaatcgaatggtgtgattccggatacgtttgtgttgaatatgattatcaaagcttatgcaaagtgtcttgaggttgatgaagctataagagtgtttaaagagatggctttatatggctctgagcctaatgcttatacttatagttacttagttaaaggggtttgtgagaaaggtagagttggacagggtttagggttttataaggagatgcaagtcaaaggaatggttccgaatgggagttgttatatggttttgatttgtagtttgtctatggagaggagattggatgaagctgttgaggttgtgtatgatatgttggcgaattcgttgtctccggatatgttgacgtataatacggtgttgacggagttgtgtaggggaggtagagggagtgaagctcttgagatggttgaggaatggaagaaacgggatccggtgatgggtgaaaggaattacagaacgttgatggatgaggtttattttttgaataagggatgattgattgggttctgtttatctgaaaggcgatcaatcggctaagcttaagggctacaagatggggggggtttgttgcaaagtctgtgttctgcactctagttagtgaaccccaaatctcagtaatgatctgaatcataagggttatcaagttttgagcttcaagattctgtgttcttgagatacataacaggttgaagcatagtgtgattggaagactgaagatctcaagccatgatagcttagagatattctgtaattgcaatttgattcaaggattcaaaatcatgttgtctttgtatcatgttctgtgtaaatgaggtcttatgacaatcaaggatatcaattgttactgacactacttgcaaaccaaaagctgttcagcatgattcttaacgcccttttgtgtattattactgttgatgcacaactataacatttgctgttacaggatctacattttcagacaggtcacaagattcttatgttagctcaatatctcatacgagcattggttacagtttattctattttaatgctctagatatatctctttgtggttttattgattctgactggattctgcatctttataggggattctcttgttttttgggaagtcaaagaaacagtccattatttctcgcagttcttctgaaacaaaatacaaagcaatgactcatggacaatgctgcaattatttctactacacattgctaagaatcatgtttcccataaaagaatttgaacacattgttcttgaatgcattagttctgatttcatgaaaactttacatgtttgttctaaaaactccattttggttggaaggtttaaaaattgatttgtaacatatatcgtttctggaagcttataagttattagaagatgataatggtcatagttacgttttctagtttgttcaatgactctggagtacacatttgttcattcaatgaaactgaaacaaaggtacaaagtacaatgtgaatgactccgtgatctgccgcttaaaacacgttagttttttcttcttgggacaccgcttgaaaacacgttaattaggtgaatctgtggatacacatatgggcttaatggcccctatatataatacgatgataggcccattacatttagttgtcttccacaacaaaagagtaccctgaaacagatctttcgtataatcagtgacgtagagatcgaagacgatgatgagctctgcatccgccatgaaagctgttggatttttgcttctgcttaccattctaacattaggtaaatacatctcttctctttttgcgtcttttacatccttatcgatttcgatttgattcaatctcatagatctgatctccgttgatttgtgatgatgatgatgatgatcttcagcttatgcgaagaagtcaggtgatgtgacagagttgcagattggtgttaaggtgagacaaaacgctatttccacgtctatgatcttatctactccatgtttgattctctgtgtatgagtctgttcgagtgacattgagtttgatctcaattttgcgtgatgagatgatgataatggtcattaatcattattacgtagtttaatatcaaattcatttgaagttggtctcaattttcgtgattagaagatgtttatggtcatgattacgtagtttaacttcaaattcatttggatttgagctcaatttgcgtgattagaagatgataatggtcatagttacgttttatagttttattattacttacaatcattctagagctttttctagacagttttttgcaatttgcatcaagctatatacttgagttttgcatttgttttcgaaatgaagacattggaaatggatttggcttctatactcttttggttaatgcagtttcctgacccttgcatggaattgttgtttctattttacagtacaagcctcagaaatgtgatctccaggctcacaaaggggataagatcaaggttcactatcgggtaagttttatttgaagcttctactactactagttgtttaacttattgctgggaaggttctttcgtgcttgcttgatagtattttgattgagctaatagaagagccatggaagggattttttcttattgcaacatttaagaatgttcatataacatcaggggcatggtgaattgctgaaaatgtggaatgaacttcattagtatttagtaaaaatgttgatattggatagcttagaacaaacaataataatgaatgaatctgatctaaaaaatgcttggcgaataacgtagttctctgttgcagggaaagttaactgatggaactgtctttgattcaagttttgagagaggtgaccctattgagtttgagcttggaactggtcaagtcatcccaggtttgttgctatttcatcgcatcaactccatctttttccttcgttattgttaccttttttttgactgacaaaattgaaggtaatgcaattaattcgaaatgttgcaggatgggaccagggtttattgggagcttgtgtaggtgagaagagaaagttgaaaatcccatccaagcttggttatggtgataacggctcaccaccaaaaatcccgggtatgttatgttatgaacctggctagtagattgtttatttccgtccttttatctaatgatgaggctagagagaacattgatactgaattgatcagtcaaataaaaattgctgtacacgttaaatgacaaaccaataacgcatttgtaccgtaagtgcatcagaaccaagaatagggagatagatactgagagttgttgtgttgtgtaaattttcgaccctagctgcatttgttaagaatgtgacattacagttgagactagatgttccatgaaatgagtgtaagtggatggtgaattgcaggtggggcgacactgatattcgacaccgagcttgttgctgtgaacggagaaccatccagcgaagcgaaatcaaagaatgagctttgattacaccataattgtttttcatttaaaaggaaaccttgagtagtcatcgatgttggcatttgaatcttaaacagcctagaatcatttactttgctagttgaagacaataattatattttggtcataacattagttatgttggcagttctaaaatgacaacttggccagaatagaacgacgtgcaatcgcagataatcagaaaaacattggccaatttagtaaacatgtacaatcttccaattgtttacggtgcccctctctcagtcccacgttggatcggtttttgggcttttaagtctaatttagtgaatattgaccgacccaattgagttttttgggtttatttgtttggttctgtctattgtcatcgaatcctttcctttagggtttgtttctgcatcttcaatttgtttcataaatcacacataaacagggaacaagtaaaatacttctttggttttatatttgttttgttaaggttaacctaactagttttccataaagagaacgagaactaacgagtttgcgctatatcgatcctcattgaatgactaagatatccaatcttccaagggatttggcggaagaggtgctctgtagaattccgttgacgtctctgagaactgtttgatcttcttgcaaaacgtggaacacgttatccaaatatgagagctttgcaaagaagtaccttggtgatcaagcaaaattagctgcaaaggaaagagagtttatgatggtcgtgatgatgaattttagggtttaattgatgagagtcaatcttcaaaacaaggttgaatcatcatgtataaaacgtgaagctaaacttattagtttaggcgatgaagttgatatatctcaagtctttcactgcaacggtttattgttattcatcagcatcaccaaagacaagactaggctagtggtttggaacccgtatgattggggacatacccgtacgatcgaacccacacataactgccacatattcaataggtataatatatgtatgctctcggatacaacaagagctagcagctaatcccacaaaatcttgaggtttgttacttactggatgagggttatggatgagttcataatctacgattttaactctgattcatggagggttcttgatgtcactccagattggacgataagttatatgaaccttggcgtgtctctcaagggaaatgcatactggtttgctactgagagatattccgaaacagacgattatttcttagtctgttttgatttcacaagagagacatttgggcctcttttgactcttccgtttgtgtttgttaaatctgaagatgttatgtgtgtatctaatgttagagaagagcagcttgcggttttatatcagccgtgggataaataaaagatggagatctggattacgtctacgattgagcccaacgcggtgtcgtggaacagcaaggtgttcttatcagtgagtataagaaaactcattggccctccgtttcagttttgtttggggagtttcttcattgacgaggagaagaaagtcgctgtggtttttgataaagactacaaagataagcgcaacatagcttacatcattggagactttggagtcgatggatcctttaaagaagggatctcggagaatcagcctacgcaatgtgttacccacttatgtgctcttatgttccaacttccaagtctagtgcaatttaattagtcgaccatctacttcttgcatatttttgctcgtttttttttcctacctaaccatctagttcaaacattatcttttgctaaagttgggaagtgtggtggaaatgtcttctccttttttttcttgtaatgagtcttgtacggtggtggttatatcgatctacgtcggttgtgttcccctcggtgatctcgacctcagcgtaggtggcgatcaatgttggaaatgaaaattcctcctctggattatcagtctatcttttattggtatattgccatatatgtcttcatatggtattctgctatctttcaatgaacatcacaaaaatagtgatgcttaatgtcttcatatgattcccctaaagttagtgcttttgtgttttgtgtgacatatgggattgtcatatatatttcgaatctttttcgtttgttacacaattaattgccttaaaaaattcaaactattaattaaaaagaaaaatcagataattaaaattcagtggcaactattgtaaataagtaccaactccaagatttatttcacaaaatggctgcaaaatgtatatgtagatatttagcttaaggaggagtctaaatttaactttagaatttttttagaatataatgtatattagagtaaaaacatttagaatatacatataaggattaaattatattgtgtattattttttactgcataaaattgatttgtaattttgagaaatataagataaatttgcaaaaattaacgaattggaagattgttttgcaaaaaatccaaatattttgatataaattatttgatctattgttaccatatatttttgaaccatttaatccgtatttttccttgaaatgtgtttgatatggtttattttgcataaacaacttgatttgtgaatttcattttcctatttgaaatctctttactatataactagccttgttgggcgcgatccacatatgtattatatgatacttttgctcattagttaaaaaaaacaaaatgaatagttattagtcaaaacccaatgtagagatattgccgacgtagtcaacacatatgaatatgatatgatcctgcaaaaaattttaacgacgttagaacctaaagaacatatgtgttctggaaccacctttctgtcacttaactctgtcatcacctttcgaataaatgatttaaggagttctctagaagactagaatcttccgtaacctaaaactcaacctcatgtagaaagactcacaaatccaattcctctattctcctgcgaaaaacggtttctttatatctctcacgatttgatttcctcttcgctttttttaattgaattgagattgatggatgataattttaatttcaagatttttttgttaatcttgtaatggaaaatattaaaaataattgcttcaatattgcaaagctttgatattttagaaaacaattttatttaataaaagtgatatatatatatatatatatgttatagtatattaaaagtaaattagatttaaaagaaagtgagtgtataagagacaaaacacgaaaaaaaaaatatgattgaggatgacaaatggattataatttcatatatatacataatgaattcaagcttgtaacttatgaaaatttagggggataattaatactcaattctagatttatttatttgcaacgtatccatctatacctagagaatttttaataatttgtaagcaaaaaatcttgaaagaccacaaatggatttgaatttgttctggatttgtactgtgataatccattttgctttgcttgattagtttttactttttaccattggtaataatttgggatcatgtttagttgtttactagataaccaattttgttgggcctgatccaacaattttgccgattataaagtaaataagtgaatagttaagcccaatataaatttacgagtgacggatcatctgtgttctcgaaccatctttttaacgaactctctagaaccctttttctttttcacccaaaacccaacctcgtataaatctcaccaatccatttcttctcttcttctttgcgttttttgtttggaactgaatcgaaaaagatggatgctaatttcgagatgcctccagtcggtggaatgaacgacgacgacgacatggatttcggtgacggcgcctcgtttcttaaagtcggtgaagagaaagagatccaacaaggtttgaagaagaagcttcttaaagaaggtgaaggatatgaaactcctgagaatggcgatgaagttgaaggtaattaattaatcgattcagatactaatgcttttcgatttaggtttttttgaatcgaagcttgagcttgatttgtttctgcagtgcattacactggaactttgcttgatgggacgaagtttgattcgagtcgtgatagagcaacgcctttcaaattcactcttggacaaggtttgtgattctcatctcctaaagacctaatagtttccgtatagttagtaatctggagaattcggtagactaatttgatagatatgaacttgaattgagatatagttgttgttaagttcaaaatcgaatttttgttgatgaatgtgtaatggtttgtggttgttggcattgtgtttttgcaggtcaagttattaaaggatgggatattggtattaagacgatgaagaaaggtgaaaacgctgttttcactatacctgcggagctagcatatggggaatctggttccccgccaactattcctgcgaatgctacgcttcagtttgatgtggagttgcttaaatgggacagtgtgaaggatatatgtaaagatggtggtgtgtttaagaagattcttgctgttggagagaagtgggagaatccaaaggaccttgatgaagttcttggtgtgtgttcactctcttatggcctgctttagaggttggtgtgtgtttgattttgctaacggtgtttcctgtgtatttgttaattcagttaagtttgaggcgaaacttgaggatggtactgttgttgggaaatctgatggtgtggagttcactgttaaagatggttagtgctctgaattcttttaagatatgatgggatatgttggataatgtattcgctctttgacattctttgtgatctatgatcattaataggtcatttctgccctgcacttactaaggctgtgaaaactatgaaaaagggtgaaaaggtccttctgacagttaaaccacaatgtaagacgatttgtctcaattgttttttcactgatcctggtatggtgtgtatatcatctcttattccaatgtgcttctgaatgagacagatggttttggggagaagggcaagccagcctctgctggtgaaggcgcggttcctcctaatgcgacgctcgagatcaatttggagttagtttcgtggaaaacagtgtcagaagtaactgatgataacaaggttgtgaagaaagtcttgaaggaaggggatggatatgagcgtcctaacgagggggcagttgtgaaaggtttgcatttcggattttagtacactcatgtcttcaccagatataacggtttcttacggggtttcatttgtttctttctggcagtgaaattgatagggaaacttcaagatggtactgtatttttgaagaaaggtcatggtgagaatgaggaaccgtttgagttcaaaacagatgaaggtaactacacagttcctagtatttttctgataactttcctttggatagttggatgtgctggattttccatggcttacttagtcatggtaactcatttactggatgcttaaacagagcaagttgtcgatggacttgatagagctgtcatgaagatgaaaaagggtgaagtggcattggtgaccatagaccctgagtatgcctttggttctaatgagtcacaacaggaattggctgtggtgccgccaaactcaactgttacttatgaggttgacctattgactttcgacaaggttagtgaagtattttggatgcttatgccgctcacaattcagtcaatatggaagtataagagtccaacacttgtttgtcattggctttttaggaaagggaatcgtgggacatgaacactgaggagaagattgaagctgctagtaagaagaaggaagaaggaaattccaagtttaaaggaggcaaatattccctggcttccaagagatatgagaaggtatatgatacgaactacttattgctttatgagttataagtcgaacaacatcttacatggttaagtttcttctcaggctgtcaaattcattgaatacgacacatccttcagtgaggaagagaagaagcaagcaaaagcattgaaggtggcatgcaatctaaacgatgcagcctgcaaactcaaattgaaagattacaagcaggccgaaaaactatgcacaaaggtaataataattggttgttaagaccacaagtcctttatgtcagttttaaagcctagctgaacaaaactgatggagatggtggttttggtatttaggtgttagagctagaaagcaccaatgtgaaggccttataccggagagcgcaagcgtacatggagttgtctgatttagacttggccgagtttgatgtcaagaaggcccttgaaatcgatcccaacaacaggtttgtctcttactctttaactcttatttaatgttacatttggcttttgtatcttttaatccacagcatgataatgtcttctttatatactaacagaagactaaatttgctattttatttgctaatgatagggaagtgaagctagagcagaaaaggttgaaggagaaaatgaaggaattcaataaaaaggaagccaaattttatggaaacatgtttgcgaaactaagtgtaagtatctcaatggtttgatcatatgttataagtagatgatagtagttagtgggaatatgatgataaccaaatcttgtattggtgggaacttgcagaaggaataatcaaaagatggagaggcaatgagcacctgaggtcttgaaaacgttgcaagaactctgcatttttcattttctactcttttggtttgttgcaatgttttctagtttttcaacctgagcgttagtgagacactaagacttataaaacagtgagagattatcccaatgtgttgcttttttcgtctgattgttggtagaaacttggagctattgatagcaaaaaaaacctaactttccagattaatttgagttcttaatatgatatcgagacaaaatagttgcttgtgccgttgtgttggacctttggtggacttataccaccgggatgaatcataaaccactgattcgcaattacggctaattctactggtttcaacgtgcagcaaataatcaatcacaactagatcatctttagtggtacgcgtagagtgtatttcacactccaacaaatttttaagagctctacgaatgtgcacaaggctttattgattattgcaacgatgtcgcttagtttacttaataatatgttgaaatccaagatattgaataggtaaatatcccactgatcaataccagccagccctcctcatatagtgaagttttttgtcatatttatatgtaagctagacatagaccaaacgtagccaaaacctcaagaattccaccaagaggtaagggtgagccatctgagatctcattagatagtagtgttgatcgctaaccatctcgtacatgtcggattagtaggcttctcgtatgagattgatacggggtcaatctcatatgacatatcattggaaggtaccttcccttacgagatctcgacaaatatcaaaacaactacaacacttttcttggtaaaggtacaactaggccaataccagaagaagaaaaaaaataagctcaccaaagttgctgaaaatgcctaggtaatgagacatgattttagaaatcacttgaaaccttcgctcattttgaataaaagtaaagggcataaatgattgattgcatcaaatatatttttacttttcggacaagcttttacaatggattggatatattttcttgtgagaagaatagaaaagggatattctataactgctttatatctcgtgtccgtccacgtcaccacatctgacgactggaataatcctcaggtaccatcggatatactttcctaagcaccggtcttacctcaaatataatgagataaaactttttattaaaccaaatctttatcttcccataaatggtaaaaacaaaacatagaaagctacgaatattccaagctaaattctctacttaagttttagttataaatgtgattctctcaccttttcacttttcactaaaattctcatcaatcacactattatagctctcagcaatcatcactcaaaaatctatggcgattttctccagaaccaaacgtgtcactgatccacttgacgacgacgcgaaggctcggatcttgagcagccacagttacatcctagaccaagattctcctcgactctgcgagctcgtacacgggtttcttgaggatggtcctgaagagtcattctacgactctgaccccgacctgtctgagacttcttcagctgaacattctggtgaagctagtgtggagatcgtgagaatggcggtgagcttctccgattccgatccttaccggaatctattgctagctcacgttttgagagccgtggaggtatattccggttttaggtcaaggaacaaaactgttttccgggataaggtagcttcgtttctgcgagagcttggtcacgacgccgcggtttgtgtatcaaaatggacctcttcatccaaactcatcgctgggagttaccatttcattgacgtcgttcacaagccgtcagataatgatcagaaggccgtccgttacttggttgatctagactttgcttcggagttcgagatcgcaaggccaacgcgcgaatacacgcgtgggctgcagctgctgcctaacgttttcgtaggaaatgaagagaatctaaggacgatcgtgagagagtcatgcgacgcggcgaagcgatcaatgaagagccgtggcttgtctcttccaccgtggcggagaagctcttacttacagcataagtggtttggtccgtacaaaagaaaggtgggatctagtttgggagtgaagccgttgaatagtgacgccgttagttgccgatctttagggtttgatgacggcgccgtcaatactcgtttgttcatcagggcatgatccatatgcatgtggtatgaagtagactagtataaagtgtaggcgaatagctggagactacacttctttttattcaatctgactgactatgtatgttctcgtttaatattaaaaaaaaagatttgttctaaatcagtaacttaaagactaatagaggtcaaactattaatcagtatcttatcattaattagaccaaaatgtaaaatacttaaatgtatcaatcaacctggattatgtggcattcatttgcaatgaaatctcgctagtaatgttgatgtgtgatataaaaaagaatatgcaaatgaaccataacagtgtcagttgacagttaatatgtgaagaaagaaaaaaaaaatatgagtttagatcatcaagatcggaggctagaaaaaaaaaaagatgggaggctagagactcatatgtcaagctttacttcttatactttttaattaaacttccaaaacatcaaggtcctttcattttcaatttgacttctaactttattccaaattttgaccgagactataggaagtcaaatatgagtttgtgagttaagtttgagctctcacaaccgctgggataatctcaaaggtgaatatcttaggtataattattttcatccgagtgcttactcacatgaatttgtgtctaaaggttttgctcggattttacatattttccgctacatcatatttcaccgtcggataatcctaaaaataatttggagaccataaagatttttgagatagcttccaatgcaatgagaatcaaacgatcacttttgactaagactttaggaggtgatatgtgagtttgtaagtcagggctctcaaagctgaatatcttaatatatgtttcaattatggcaactgtccaaatgagcgaaatgaaactttcatcccaatgtagtactcatagaacttagttaatatacgttttgcttgcgttaaattttcttaagtaatgagaatttgccgtttatctagaaattacctaaacgccgatggtttttggttcattcggttgggtttctgaatctctcagtcgaatatcccctcaaatgtactaacttgtatagtttatgtatcccattgaacgggaccttaactgctttatgtatcataaaccctgaatattgtgcatttcaaaatatatttctgaaattatttagttttggctaatcgtttccactctataagactataactactgttgatacgagattctcatcagattgttcatgtttgatcaatcagtcatctagttttgtgaatcgcttttttttttttttccttttcatataattttgtaaatattctcttatatatatttttttcaactttttctatttaaaattaataattattcaaaaaatatcatgtaagttacaaaaatgtatccagattctttttgtagtgataaatattaaaatcaacagtttgttaattttaaaataacttttgattttagttttaattattgttttttaaacaaactatctacaccagtaaaatacctttttaacacaccaaataatatgagattacattccaaaagtatacaatgttttgagtcttgactaaaaaagtataaaaaaaagaaaaatctctgtttccttactctattcttaaaattagttaatcaatgcaatttttgggccattgggctttagaaatattgaagtattccattatactctttcgctgaccggtcaaaaagctttaacgctcgaaggccgccgcgtcttccaaggcattgaacgtccctcctccacgccttctaggttctttcgcctccacgtaaaacgtcacccctgacgtcacatcctctagaacaccacgtgtttgtcttaaacacgacgagtaattacacatttggtcaaactcaaaccaacaaaacactttttaaacaaggctaaattggtcaaacgcatggcaacgaatctcaggcgttttttcgttttctttattattgacttatttttatttttattttattttgcttctttgaaatcttccccggcaaggcaaagcaaacgagtggacgtttttgaagattcgttaatttttctctctctctttataatataagaagtcgcctactacgtagaaccaaaagagagacaaaaatacactttcattgctgtcttaactctaacggagttaactaacgtcgacattatgctagagggagatgagaaacagagccgagctctggatttcaatcgactcgaggttttgtcattactaggtcgtggagctaaaggagttgtgtttcttgtccgcgacgacgacgctaaattgcttgctttaaaagttatacttaaggaagccatcgagaagaaaaagaagggtagagaaagtgaagatgatgagtataaacgcgtgagtttcgagcaaggagtattaagcagattcgaccatcctctctttccgtctcttcacggtgttttagctaccgataaagtcatcggttatgcgatcgattattgtccgggacagaatctcaattctttgaggaaaatgcaatcggaaagtatgttttccgacgagattatcaggtaaatttgttgttgtttgacctaaatctttcatgtatacgtcttttttttttttgtcaaccacacatttgtcttagattctgttgttgatttactcattttcttgtctcgatttcagattttacgcggcggagcttgtattagcacttgactatttacataatcaaggaattgtgtatagagatttgaagccagacaatgtgatgatccaagaaaatggacatttaatgcttatagatttcgatctttctacaaatctagctccaagaacgccgcaaccgtcaccgtcactgtctaaaccatcgccgacgatgaagagaaagaaacgtctcttccgcttcaccagtttctgcaactcaggaatctcgccgcaagaatctatctcggttcactcatcatctacattggccgtgtcagattcttcaggtgagaagtcaaattctttcgtcggaacagaggaatacgttgcgccggaggttataagcggggacggtcacgattttgccgtcgattggtggtcgttaggggttgttttatatgagatgttgtatggagcgacgccgtttagaggatcgaaccggaaagagacattttaccggattttatctaaaccgccgaatctaactggtgaaacgacgtcgttgcgtgatttgattagaagattgttggagaaagatcctagccgtaggatcaacgttgaggaaatcaagggtcatgatttcttcagaggagtagattgggaaaaggtgattttggtttctagaccgccgtatatcccggcgccggacgacggtggtgataagggaaccgatgtaaatacgaagatggatgtggagaatatcgtccaagagatttttgctgcaagacaagaacgtgagaaacagagtggtgataacaataaaaacgctaatatgaaaattaaagataatactagtggggaatgggttaaggggttgaataataatcacgatttagaaagtgataacaattttttggtattttaattcaatttttttttttttaatctaaccagctgttacatgtaaatatagtatatagtctatggactatggtgtacagactcaaattatcgttggaccttggcttcaaatgggttcaattttatatacttaatgtcaattttagcttagcttaacatcaatttgattgaaattaactatatttttctttataaatgctcatatgattctataaatgagtagtctagtgcacacatagagaatccagaattacaaatgtacttcaacgcaaaggaaatcaatatcccatgctcataatcaatagcatatataaggccagggaaaatgaataagtgtattatagtttatatattcatgactcatataaactattggatcggccggtcatgtcacttgctttgtttggaaaggttctattgcgacgctctaacatggtagaaacattcatttggaatgatgtgctatttatggtatgagatgtatctgctaaaaacacgagtgtctgtttgttctctccgtactcttacattagaaagatgtttggacatatccgcactaaagatactttgacgagacttttgtgttcacatgatgagtacgatttactgcttgatcaactcaccatgccacttactttgtttggtaagattacatcacgatattctgatgtggtagaaattttcttttagcatgatgtgcttgttaggatagacaaagacatatccgctaaaaacacgactgtttggcaatatcgtccgtcctctcggattataaatatatttggacatatctgcaccgagtaaaatttggcgaaattttcgtgtccgcatatatatattttgcatggtagttgacttgtcaattgtttgaatgctaccaagaaaatcatgtaaattacgtattcggggttttataacgtaacatgtagtctagttatcaaacatagcatatcagtcaaacttggagatgtatgagtacttctttacaaatgatcatatgactcaaaaaggagaagacaccaatggttagtaaaatccatgttgcttttcaatgcagtaagggttgagttaattatacgagcgacggagtgactgatcttgtgtcacattgaagattgacaataaatgtacgttaatgcaaatataaacaatctcccattctcctaatgaatgatacatatatggtcgtcaaatgaatatgtttttttagtaatatcttgaatgcatccatgaatcggatctattgttggatcgagccaccatgctacttgctttgcttggtaaaactatatcgcgactctctgatgtggtatacacactaaagtcattattatttcactattttctttatactcttgcatttaaaaagatgtttggacatatctccactgaatatatttagatatatgagatttttttgtcctatgtgaattgacttgcgtttcccagaacattatgcaaattatgtatatggatatttataacgtcacatatgattcgacgaggaggacatactaatagcttaactaaaacccctttttaaatatcagtgtcctaatttgtttttaatgtatttatgctgtttcaagagatttgtctttaagtattagaatccaatttatagaaaaaaatccacaacacatataaaattttttggtagtaacaaaaaggtttgtgtatgtatattccctttccttgcaagtctaaaaaatcagatttctttttatttggcatcaaaaggaaaagaaatggtagatggatgaacctttgatatgatatccaatacgggcaatatctctttttcttcttctatagttgaaacttcgatatcattcagtaacagcacgatcaattctatgtcatgttacaaactaattttcaatccaagaataaaaaataactaaattatgttgatttcttgtatttcattgccacgaggtcttccatctaaaaataggaagaacatacgtgttcaactgtataagtatataattcgataattaagaaaatgcacagataacaaaagaaaaaacaacatagtcttattttccgaattaaaatttttaatagattatttgaaattattatcaattttaaaaattagtgaaatgattaccaaatactaccattacgagaaaatatggtctgaataaacatgtgtgtttattttattttttggccaacatggtccatttgcctttttatcatcctttatgatatgagggagtgaaactccaacttacgaggtgctatatgagacctcggcgaatacatgttcttatttaaattcaaaatttactaggttaaagtttttttttgtgcaatatatcaaaccgtacagaatcgtgataatactatacgtaattcataaagtaataaaaaaatattgtaattatttgcaaccgtccaaacaacaacaaaacaaacttgaaagtcagtggacactactgaatgaggtcaatagatagtaatgctttccgtttcttctctttattcacatctctcacgctgtttcttcttaggtctttttatactcaaaccaagaaagcaacctaccatcggtaacttcaaggtctatccaacgtataaaccaaatataaacacacaaatttattttcattcatagtttaatctaagaatacgaagagatgcagattgagatggaagagaagtttgaagattggagaggcaaagaggcaatttctggcaaacatggtgggattaaagctgctttcattgcttgtggtaactttctaaaactcaaaaaaaaaaaaaccatttaaaaatcactaatatcataagatattcatcacgagtttggtatggtctaatggatagttgtagagacgatggagaatatggtgttcttagcatgttcaaccaacttcatgatgtactttacgaaatcaatgaattactcaacacccaaagcagcaaccatggtgactaatttcgtagggacatcgtttttgctcactattttcggtggttttgtcgcggactcttttctcactcgcttcgctgctttcgtcctctttggttccattgaactcctggtaattcataaactctattaaatcatgttaaacaacagtcttttcctttttatatgaaaagtttactcttttctttgatagggtttgatcatgttgacactccaagctcatatcactaagttacaacctcaaggaggtaaaaaaccttcgactcctcaatcaacggttctattcactggactttatgcaatagctattggtgttggaggtgtcaaggggtcgttgcctgctcatggaggcgaccagatcggtactagaaaccagaggctgatctcaggattcttcaattggtatttcttctctgtctgccttggaggtttcttggcagtaacacttatggtttggatcgaggagaacataggatggagctccagcttcactatatctaccgcggttttagcctctgcgatcttcgttttcgttgcgggatgcccgatgtatcgattcaagcgcccagcagggagtcctttgaccagaattgtgaatgtgtttgtttctgccgcaagaaaccgaaataggtttgtaacggatgcagaggtggtgacacagaatcataactctaccgacaaaagcattcatcacaacaagttcaagtaattattctaaacacatctttttcttgttttgttccttttctccatgaatatcaggaacggtcttgagaagtgccacgaccatcgtttgggaccctatacatagttcctttaaaattaataaagcaaaacatagaataagcataaaaaataaagttttgtggactttcatattttagggttttttaaaacaatttttcatgtggtatatagatagaaaattcgactagtaagaaactgaatattttctggaagccatagagtgttgttcatttatgttttaaaagcgacattttatttattatatatgtgatattcaaagtcattataacatgtatactatacttttaacacctagtttttatttctgttcagtgacaattagagcctcgtttttttatttagtcttggggtcagtatttaagtatcatgtaaactataatttccaggtttttgaataaagcaaagctcaacaacaagatatcagcaacacaagttgaagaaacaagaacgtttctagctctccttccaatatttgggagcacaattataatgaactgttgtgtcgcacaaatgggaaccttctccgttcaacaaggcatggtgacaaacagaaaactctcgcgttcctttgagatccccgtggcttccctcaatgccattcctctactgtgcatgctctcttctttagctttatacgagcttttcggcaaaaggatcttatccaatagcgaaagatcgtccagcttcaatttgaaacgtataggatacggtttagctctcacctctatttcaatggcggttgcagccatcgtggaggtcaaaagaaaacatgaagcggttcacaacaacatcaagatttctgtgttctggctagagcttcaatttgttatgttgagtctctcggatatgttgactgttggaggaatgttagagttcttctttagagaatctccagcgagtatgaggagcatgagcaccgcgttagggtggtgctccaccgcaatgggtttcttcctcagctcggttcttgtggaggttgttaatggcatcacgggatggctccgcgacgatcttaatgagtccaggctcgaactattttatttggttttatgtgttcttaatacccttaatctttttaattatattttctgggcgaaaagatattaggcaaaagaacaaagtatgttgccttgtctatagagaactccttaatttaggtaagatgctatgcatgtagtggaagtctaaaccaagtaagttgcgtaatggttttttttgtgtggtggttttcaagttggttgatgtgtcatgtaataatgggaggaaatagttactaccccatttaagtttcataatttgtgattctacctaatttaagaaactatgaacgtaacattttctaattagaacagagatcgaattttcccttaacctgagggagggtcattttgtcatatgttacaagatggcacaatggtccaaccttttattaacgattataccgcttttataaaaattactgaattctttttgacaataaacatggaagcctaaacggcatatcgccacttctcatacacttcatcacatcatatttaaatcggttagatgaaactgaaactattctcctctaaccatatactacaagaaaatactgtatatgccgacaaccatttccgacgacaaattccgaagatttagacatgattcgacggatttagaccaatttcgaaaaaataaccttagtaggaatttcgtcggaaatacaaaacaaatccaataaaatatactttgttgaaaattggtcgggaaaagtcgataaaaatacgttggtcaatcgttttagccaacaaatacatactttgtttccgaccaacgcttttcaacgatttcactggtcggaaactcgtcggaaaatgctataaccagtattttttgtagtgacaagtaatttaataaatttcttataaccaccataatttatcaaattagtttcgatagattagtatttaatcaaattcattttttgtataaagtcatatactacagtttagtgtgtcttaattaatgaggtagctagggtataatacttttgagagtagaaacatacttaagcttatatgttctcagaaggaaaaaagaacaaaacttatcataataaaacatacaattattataaagaaaacacctttggtcatcataaacgcatatcttagcaaaatcaaatgttctaaacatgtctttgcattatttgagatttattgttttttaaaaagtaacagttaacggcaaggatgacgacagtgacattgaaaaggtcctcccggggttgaaggtatgcacataaattttcctttcggatgtttcttcgaacacagagactcacactctttctgaagacaacggtctttgtttacaatgctccaacaccaatcttggcttttttgctccacatttccaaccactcctgttatagtaataggtttggaatataaatcttagtttatgcaccaatacttttaaaacaatagatgcagtttgaaacatttatatatgtaacacaaatggaaaagaattgttgatgacaaaacaaaaaagcaacaaaaatatgtttaatcaattgagatcacaataatcttcataatatattaagcctattaaaatttcctaatctaaggaattaatcaagatgtgaagaaatttcaaagtatatttacgttggtaatttcctaggttcagtccaaaaaaaattgaactcatttttctagttaattaggtctgactgatatggatttaattaaaagagctgagttcgatattatcgaattctaaacttcaaattatttgctacaagttatataacatagttattgatattttgaaaattaatgtagtattacaaactcttttcttcggaaaaagatatatgtaagaaattaagaaaatatgaaatgtcaatacaaacctagtataagaaccgtgaagacaataagaacagtaaacgagagttgaaaggatttgatcatcgtaaatgatagaaatgaattgatagtactttgaaagttacaaaagaaaaccaattgtagttatatataataaggaatatgtatctcacattcaaacacatatatctattttaagatttttactactttgtactccgaattaaaagatctaccttgactcaggttccaggttttttgcttatatgataagtaaaagtgtcaaactcttatttcattttttattaaaaggttgtaacttgtaagccaaaaggctcgataataacatgtgatattattattattttttaacgacttcatttcattgatagaatcaatgatcataatacaaagttgatgttatgaaagcgggtacatagtagtgaaatttaaaactctgatttggttgaagatgatgctttgcgaggatatctgcaggttggttgtttgttcttggaacccatttgaagacagcctcctcaaatcgtttttgccaaaatctgccttctcttatccagttgaatcttccaaagtttagcttttcgttgttcataagctcttccacttgtttactgtccccttcaaagataactttgcgatagccttggctccaagcatgttgcattgctataatcaaagcctgaaattcactctccaatgagtctgatgttgttgatcctattgcttgacccgaacccatgtatactccattctcatctctcattagccagccagctttcgcatttcgtgtttggtggttgaaagctccatcataattgtactttatccaagtgcttggcggccgttgccacttcgtacgtgccatagttggttgttgatgtcttgatgaatgcacttgttggttgagactctgaacataagtgtttgtgtcttcccactcttgaacatcattccgtgcacgttgtagggtgttttgccatgatatgcttttttgttgaaacaccaattgatttctgctcttccatagtctccataagatccagatggccaaattaaaaagttgtggttgtctgttggctaaacaactcgataacagcagctccatctttgtctccattgtaattcctgtagttcgtaactcttggtgtggtatccctgaagctcgccaaacctgttgggcataaaaacaatcaaagaataagtgttgagacgtttcgtcctcttggcagcaccggtgacattgcgggtgattccgtatatgtcttcgttttagattgtctcctgtggctaaggctcctgagagtagcttccagaggaagtgtttgatttttggcgccgttttgagtttccatatcttagctttaatctctgcttttcctgggggtggttgaatttctggatccatgaacacttggtttgctaaccagtaagccgacttgactgaatagatcccatcttcagtgtaatgccagcctagaaagtcttgagtagccgctgtacataacttgagagacaaaatgatttccgcatcttcttctgtaactagatcgcgaactaagtctctgttccattgatttccatgaagaatccaattgttgagaagacagtgttccacttggttattctttggtttcggtggtcttggagggtgagttggcaaccaagggtcgatccaagtactgactgttgaaccgttccctacatgtgatattatttatcatcgaaaatttgaagcagtacaaagaaataacaacttggtattaaaaaaagtggaaagaaaaataaaaattaatataaaataataagatataactatttttgaaaataggtgtaagaaattaaatgtatattaattagtcagatcatgtaacaaaaatataaattaaatataatatatttacctaataatagagaagaaaatattatgtaaaattaggtatctatagatttgtattcattaaattatgcttaagagattgatcgataagtaattctaaacaatttcacaaaagtaaagtgttataccaaattaatagatatcttctaggtaatgcattcatgtataacgttatatctattttatatgatatttacattttagcgcaaaaaaaaaaagaagaagaaaggaagcataaaatgtaaaaagaacaatcgaaatcagtttttaattatctgtattttgaaagttttggcatatgagtaaacaagttttatcatatactaatttaagatattatgttaaatatatggttcatttatttacatatatgaattcgagatatcttaaaccatatatatacttttctaaaatctataataaatgtaaaaatcttgataacttttgtaagattagtttataattttttatattataaaataattatttgtatatttatcaacaagttaataatatatttatatatttttcctttttcactaaaaggaggtctaaattggccagcatgtttgacaaatgtcacatgtcactatgtcagatttagattgatattagctacatataaatacttgttcactactatataatgtgttagatttatcgtgttcataagatacatcgaaagcacatatacacgttgaaatatcatttcatataacaaagctatggagaatgatatggaagagaagtttgaagattggaaaggtaaagaggcaatcccagggaaacatggtgggatcagagctgcatctattgtttgtggtaaatatttaaaactcaaaacttcatatttttattttgttccattttcaatgtcttaatatatggtgtggtaaatgtagttgtggtgatgatggagaacatagtgttcatagctaatggattcaatttcgtgaaatatttcatgggatcaatgcattatacaccagccacagcagcaaacatggtcactaatttcatgggaacatcgtttttactcactctttttggtggttttatcgctgactctttcgtcactcatttcacaactttcatcgtcttctgttgcattgaactcatggtaattaaaaacttcataaaatgttatctaccatttagataattgtactttaatgatgaaatgaataatcacattaactttaaggtttaatcattttatagggattgatcttgttgacgttccaagctcataaccctaagttactgcctgaaaaagataaaacaccttcaactcttcaatcagcgattcttttcacaggactctacgcaatggctattggtacgggcggtttaaaggcatcgttgcctagtcatggaggcgatcaaattgatagaagaaatccaagactgatctcaagattcttcgattggttatacttctctatatgctctggatgcctcttggccgtaaccgttgtgttgtggatcgaggaaaagaaagggtggatatggagcttcaatatatccgttggaattctagcgacggcgctgtgtatttttactgtagggctaccgttttatcggttcaagcgtcctaatggaagtccgttgaaaaagattgcaattgtgattatttctgccgcaagaaaccgaaataaatctgatttggatgaagagatgatgcgaggtcttatctctatctacaagaacaatagtcacaacaagttaaagtaagtattgaaaattgcattgaaacataatctaatttataactgaactcaagatacaaacactcatttggtccaagataaatgtgctaaaataccttattttttaggtggatagataaagcaacgttgaacaaaaacatctcagaaacagaagttgaagaaacaagaacgtttttgggtcttctaccaatctttggtagcacaattgtcatgagctgctgcgtggcacaactctctaccttctccgcacaacaaggaatgctcatgaacaagaaactctttcactctttcgagatccccgtaccttctctcaccgccattcctctcatcttcatgctcttatctatacctttatacgaattctttggaaaaaagatctcatcaggcaacaacaatagatcatccagtttcaatttgaaacgcattggactcggcctagctctctcttcggtttcaatggcggtttctgccatcgtagaggccaagaggaaacatgaagtggttcataacaacttcagaatctctgttttgtggctagtgtttcagtatctgatgctaagtgtctctgatatgttgactttaggagggatgctagagttcttttatagagaagctccgtcgaacatgaagagcataagcacggctttgggatggtgttcaaccgcattaggtttctttcttagcacaactcttgtagaggttacaaatgccgtcacgggaaggcttggccatcaatggcttggtggggaagatctcaacaagacaaggcttgaacttttttatgtgctcttgtgtgttcttaatactcttaatcttctgaactatattttttgggcaaagagatattaagtgaaagaacaaagtatacggatattgtgttttcgtaacttcgaggcactttatgcttatagtgttcaatctgaagataatataaacagtaagtacaaatatcctcatgttatgtgtagtatcactttgttaaagtgtatctacaaacaaacaaacaaacaaaatatagaaaaatggtggaaagagtaaaaaaccccaatttattatgtcatgtgtactaataacattttctagtttgtcttaccaaaataaaaaaataatattttcaagatttgccacttaaaatgatgatattagttagaaacaattatgtgattctaatgatggtgataagcatgttggcgatgatgttttatgatgacatgatgatgatgatgatgatgatgatgatgatgataagtattagataatatggctgcttaacatttcaaaatttaagaaactaatctctttttttttttgttaaaagaaactaatctcttaaagagtaaattataagaaaatttatgtcatattattggttttttgttaacatattatatatttttttcccaaacgtttacacaatttacaatcaatatttttaattgttatggaaatatctaattttattttagacgaaaaaaaacttagaaaaccaagaatttatccttcttggtatgaacaaagtccttctttggtgtaatgtataactatcaaaacgtacttactctgaaattgttctctttagattccttacatcattctgatgtattctcaaaatgcaaaaaataaaaataaaataactaaaaccgaaaaaaataatcaattattggctagtccatgttaaatttcacacaccaaaacacatgctagttttatctccaccttctatttattccgccaaaagcctttacggttactacaagccatccaacaatgtcttcttcttcttccgtaagaatctctctctccttcattttcttggctctgctaatctcaccggctgtgtcacaaacatgtaagtcacagactttttccggcgataaaacttaccctcactgccttgacctccctcaactcaaagccttccttcattattcctatgatgcctctaacacaactctggccgtcgtcttctctgctccgccggcaaagcctggcggatggatcgcgtgggcgattaatccaaaggctaccggtatggtcggatctcaaacccttgtcgcttacaaggatccaggtaatggtgttgccgtggtgaagacgctaaacattagctcctatagctcgctgattccgtcgaagctggcgtttgatgtttgggatatgaaagccgaggaggcggcgagagatggaggaagtttgagaatctttgctagggttaaggttccggctgatttggtggcaaagggaaaggttaatcaggtttggcaagttggtcctgaattaggtcctggtggaatgattgggaggcacgctttcgactcggcgaatctcgcttctatgagctctcttgatttaaaaggtgacaacagcggtggcacaatctctggaggcgacgaggtaaatgccaagatcaagaacagaaatgtaagtttctatataacatcacactcatgatttctacataactagtttctttcaaccgatagattaaattggggacaattatgcagattcatgggatattaaacgcagtgagttggggaattttgtttccgataggagcaataatagccaggtacatgagagtatttgactcggccgatccggcctggttttacctccacgtttcttgtcaattctctgcttatgtcatcggtgttgccggttgggctaccggacttaagctcggtaacgagtccgagggtattcgcttctccgcccaccgtaacatcggcattgccctcttcacccttgccaccattcaggtaatttacaagaagatctctgttctaggctctgttttttttacccttttatgttcatgttcaaagattaaagcttttgactatgttttggataccaagttaagtttctaatggacttaaatattctatagatgtttgcgatgttgttgcggcctaagaaagatcacaagtacagattctattggaatatctaccaccatggagtcggttatgcgatcctcacccttgggatcattaatgtcttcaaaggtctcaacatcttgaaaccacaagacacgtacaagacggcttacattgcagtgattgccgttcttggaggcattgctttgctcttagaagccatcacttgggtcgttgtactcaagagaaaatcaaacaactcaatgaagcctcttaggacctaagccaacaaagatctggtcaacttattaaaggttcatctgcagttgttgttattaatttattatgagctcttgtattattaatgtttatagaacaagggtgtcacatgtattattgttctcttgttttgtagctttttggttttgtttgttgagtatttcttgggttatgaattcttgtaggggatgaatgtttttgaaatagttcttattttactttgaatcaatgagttttttcagttcccaactaattatttggacttattcccatgtgattacaaaagacaatcaaatatgtccacatgcttgtagcttgtggccaattaataagataaaacgtctttgtgctagtcttagacaaattatggtgccaagacataatcatacctaggtgtctttctcaaaagtgattttcgttaatattacttttgtcctcaaattattccattagtcgttagacacattaccaaaaaaactttaatttttattccaaggacttagtgtcaaacttttgttgaaaatctcatttgaaaactttttcaacgttgtttcttttctatgggttgatttgaaattcatttgataactttttaaatttaaactttgctactttctttagtaaaggtgaccatatattgatattttcacaaattaatttttaaaatttactaaagggagagataaccttgtggggtgtggactgtcgagctaattagatttccaagtgtcatttgcatggctactttctttttctttggctattttgtttaaacacctctcattttcaacttgtcataattaagggaactttgttccgcaaacttaggcccatttttagtgtccattgttcataattgtcttattattataatcatcaatgaagaattgatgtttaaaaaaaaacacttggtatggttctttgtacgtatgtatattagtagtatatatacaaaaacagttcaagccatcaagtggtggagttcaaatactcgtgttgcttcaatttatagatttgccacgttacatttaccgcaattaatgtctataatcttatgtatttgccacgtttgaatgaaaacaaataaacgagcataatttaatgaataaaagcataaaaaattatagcttaacaaaaccgatgatataagaagtgtatctgaatgtctattttcatcctcgttataattaaattatactggaagaagaaacatttggattccatttccgtataagaatgacattgcttattcataatagacgataaaattaggtgagattctccaaacattatgtgaagaagatgagtgataaatacttcatgataaaagtgaagagaatctaaaatcaaatgatttcgtttcacgtgaaaaagagtaggagatatctataatcaccactaacactttctttctttttcgaacgtatgatgttttcttcttttttttttttttttgataatatgaacgtatgatattaggagacagcagactaaattcgagaacagaaaatcgatcaagatcgaacagatggaataactaattgagattgcttaaatgactaattgaaatcacaaaattgtgaagatccgatcatagacaagaataattaacatataagataggaattttttttactaaacacacgaaatataggaaaatatatgattacacatagcatatatatttttaactatacgaaatatatgtattgtatgatcatatatattaattatattacatcatgtggttaataccatagacatacaaaatactcaaattttgatgagaaattaagtaaaaataataatttttgttcgtcaacctgaaatggctaatgtcgattagccatataagattttaaacaattaagattagccatttcattaaaaaaaataaaaaaaaaataattttataaatgttaattagcaaaatagctaatcccaattggttatttaaaattttatgtggacgttataaaaaaaaaaatagtttcaacttttttatagtatatatccacttacctcatgggtcgatttcgtataaaagataacagaaaaattaatgcttgatctctctaaacaaacaaattgttacaaaataaatctttgctcgtcacattaaagactggtgggcctggctaatgtgtttgggcctggttagtaatttcacatcaattgtttttcaacatccatactataccaattaaatggtttggttaaccaaaccaggaaaaaaaaaaactgatatcatcaacaaaaatggtttaagatc

SEQ ID NO: 462 - DNA, 84896 bp, Arabidopsis thaliana
gatcatgaacaagggagaagaaggaggagaagacaaggaagtggtttctcttcaaactctgagtaagaaaatggatgattttgcaaaagctagagattgggagaagtatcacagtccaaggaatctccttcttgctatggtatctcgcattaacaatctcttatgtcttctgaaaaaattgaaatgggtcttggttctttagtttgatggtgtcttataaacaaaaaaagttggcttctttcactatcaaatctgtttttggttttcaatctcatcgatcttcgatttgggtttgatcttgtctttttcaaatttgatgtttgtttccatgaaaaatttcatctttttgtaacttgctctgttttagctgtattgacttgaatgtaatttgtaagtggaagactcatagatctgaagtcaaatcaatctccaattaacataagcaacgacaaaaacatgtgattgttcattttcttgagtaaagtgttaaactttgatttggccacatgtgctatgccctacaatctagtcaaaatagtcagaattaaaggtcaaaactttatgttgcttttgtgtttttgttacatttgaaatgatttaaggagtatggaaaatgctgcaggtgggtgaagtgggagagctatcagagatattccaatggaaaggagaagtagcaagaggatgtccagattggaaagaagaagagaaagtccatcttggagaagagttatcagatgttttgttgtatttggtgaggctttcggatgcgtgtggtgtcgatttaggcaaagccgctctgcgcaagatcgagcttaatgctattaagtatccagttcccaaaaagactgatgatcattgtgttggtgatggtgaagattcaagcagcaagattaagttgaatgaagaaaactaatctctcttattagtggttttgtgagtaagtttattgtgggtattttcttgttatgaagtaggagcatgatcaagaacatataatcttcgaaggcctctaattatatttcagatgaatctacttagtaccacttttgcaagtttttcataggttcagcatttgctttcactgaatttcgcagtaagagttcagagagaggcaacaaaagataaccttttataccatgaattagcagactacatacaagatgattgatgaataccattttgtctacactacctataccatcccctctaaaccttatctttacttcccaaatgctgtttgtacatcaaattaaaaaccggaaagtacttgtgcaatcaatgtcccaaggtgtggttcccttgctttacaggtttgttgctgctgaattcttgctcatgattcagcggtgtagccagtgctttgcggtgttgatagcgatagaacgtccctgattcgaaacccattgccccagaaagaggcaaggcatagacccattatggccattacaactacagagcaagctgctggcacggcttggctgctaccaaggaactggcttgcaagaagcccggctaatgtggagctttgcattcccgtgcaaagggagatagtccggcttacttcttcctcttgtctggttaaatgatccaacaacataacccaataaattttctaagttctatggattaagaaaaatgttgaagagatacaaaaagaacatggatgttggagttaccgtaagcctgggatcttagagaaccaatatcctaaggcaaatgctacggcatggaatgtaacaattggaacaatcaatccaagaccttcagctgacagaatctgactgcgattaatcgaaagtgggcttccaatgcacaacgaagtgcataccatagcaacaaacggcatcacaggttgaagaagagtgaccacaggcttcgcataagtatttaacacaaggccaagagtgattggaacaagtaccacctacagatagtaaatcattggacgtcaagaacgatgaatcaacaggaactaccgatcctatgctaaatcttgttacctgaagtatagacttcgacatggcaactgcatcaacaggaactactgatccaattagaagaccactaagcaaaggtgtaaagattacagaagcaatagttgtagaactagtgagaagaatgctcatggccacatcagctttactcagagaactcgcgtaactagacaactgagccccagccacacaacacgtgagtataaaaccagcgtagaaggtcctcggcatcccaaatgcattagcaactaaaaccccgagaagcggtttcaaaacgtactgagcaacaaacccaacagataacggcactggtctgcaaccaaacaatgttctcacaaacgttagaaaaccagcttaactaaactgatcataaaacttataagagaatgctccaagtaccttttgaatgcaagagcaaaatcgtcaactgaaagctgaattccaatagataacataatccctccaagagcaggagcatagaggtctttagataccctgaaaacatttcatctgataatcatcttaaaaccccattcaaaatcttagtttctctaaacagaagatgacaaaacagagtcaactaagtaaaagccatagactttatcgttgattctcctgataagattcatatatatacaccaattttgtaaagatataaactttggcattacagagatagatagagagagtttgtgtgcaaaccaagtgaaactaggtgggtaagagagagcagcaacggcagtgagagcaacaacaaatggaagcaaagcagaccaaaactgagacgaatcagctttctctgtaacatcagttccaccacaaaacgataacagagacatattcccatctctccaatgtaatccaactctgcccataaacggcgtcgttgaacacgccaccactggaaccaatccgctgtttctccgccttagtctaaaatctagaaagttactaagcgatgaagaatggagagaagataaaggtgaactagaagaccggaattgacaattgaaggattgagatttagcgggaagattatgaaattcagaaagtgattgtctttgtatagctggtggtgggagagacagagaagcgattaaagtcatttctatattggtctggattttgtaaagattggatttttaggagagtaggtgacggagagaggtgaagcgccaccgtgaaatgacgccgtggaccggcgaaggagggaaattgagagggtgaggtttggagttgaagaagcaggaggaggaagaagcgataatatagaaaattggaatttggaaatatataaaggggaaagatttgttaaggtttgtttaggcatgattgacaagtgatgtgcaagaaaattgaacggctgagattggttggcgacgtgatcgtcgatgactctttctagcattgttggttttgtgtaggccttagttttgtgtgagtgaatttggatgaatttgggtgaaagattgttgttttgtttggtacatgttggcatcttttttttccccgtcaaacatacttactttagcatccttatattaatacttaaaaaaccaatacatggtttctaagcatccaccaatggtcttaacaaaggtgatgaccaacattctaatcaagcaaagtacaaaccacaagaggagacaaatttttgcaatagcatctgcacacagtgctagttcaatggatccggagtcccaatacatatatttaaaaatggactcttttatactaattgtctttttttacaaaatcatatacctacatatatatataatataaaactttgggtccttttaacaacatagttagaaaaagagagtatatgagctaattaacaacatacttacaaaaaaaaaaattggcccggaaagtatcttgccacttcttaacatcttctactgcctttaaaattactctttgcgcctcttcatggtcatttatgaagaatatctcattttttacatgttggcatttatatatacatttttgttagcgttttagccaaaaatccttaatctattttttaattacagtttcaatctttatgaaacctatctaacaaagatattattctacccaagttttgcaaataaatcttaactacattcgatatatgtaattctgaatataatatattgtataaattaaatatctatatgttaaaatgtacaatataattttacttaaaaatataatgtagaaaaatatgaaatgtcttacaataatattatagaaatatttttatatttgaaaagataacatagtaatttttttgtatttataatcattttattttaatttaacaatgcaaatttaagatctttaaatgtattatgtcattcaaaataatgtatatacaactggatcatattctttacaggtaataacattttctctattatagtagtaagaataaaaatttattctttccatgtttctttttaagtatgattttcattttaagtctagattggattttaccatacaaatttcaatagattcccaagatttgtttccgtatctatttttgttaaacattaccaaaattcttataataataagagtttgctagtaattgtagctcaacgttcttcatcaaaatgggtcggttagtagaagctatcattgcttcgatattattgtctttgtgttttacaataacaaagtcagctccaaaatctgctctcattaccaatcttcctggtttcaacggcacttttccatctaaacactatgccgggtaaatttcatatgtgttttacatttttttgtgaaattctcatctatcataaagttttattatagactttcttcaaaatattttttaatctctctttttcttatgtaatttggtgtgtgatctaaggtatgtggcaatagataaacatcgtaataagaatctatggtattactttgtggaatctgagagaaatgcttcggtagatccagttgtgctttggcttaatggtggtccaggttgctctagcatggatggatttgtctacgagcacggtaagctttatataccttttcttgtgtcgagaaaaggattcatatataactcgaaatagggtctcatacaatgctcttttatgttggcaattgtatataagcaaagataatctaaacatatgatactgttcaatactgttgcaggtccattcaatttcgaaccaaaaaagaagaactcacatcttttgcatctcaatccttatagttggtccaaggttgaaaagaaaaacaacattgacttattttcaaacattttcttcaaaagaaattgatctataacttttaagaatgtgttttgttttcaggtgtccaacatcatataccttgactctccagttggtgtgggattctcttactcaaatgacaacgccgattatacaactgatgatacaaaaaccgcgtctgatactcacacattccttctcgaggtgaaataagaatgtaaaagtttttaaaaaagatttccttgtgttgtgtgtgattcaagacactaactattacatccacatcagtggtttaaaatgtttccggagtttcagtcaaatccgttctttatatcaggagaatcatatgctggtatctatgtgccaactcttgcggccgaggttgtcaaaggtcagtattatctctctcaacatcatctttagctccttttcatatattggcagaattagaaaataacgttatctccaatttttctcatcgttttcttgttatgttgtaggaaataaaaatgcaatgagaacaaacaaaacaagcaagaatgtgacaaagccggttatcaacttcaaggtacgactaatgtttgaggctatgtttcggattcaaagtcttatggttttggtgttaaataaataccattaagactaagggtactaatgtagttacctaattgtctctttgtatatgtgagagaaagagaaaccttcttcctatacttgaatgttaaaattggacttatatgtggtatagggatatttggtgggtaatggtgttaccgatgaggtgtttgatggtaatgctcttgttcccttcactcatggcatgggactcatctctgatgaactctatgaggtttgattttgttggtgaatttttcataattcttgctttattcctcaatttttattttttctaatgtgtaacaaaatatggcaggaaactaaattagtgtgcaacggaacatactataccggcggccagtcaggagtgagtaaagaatgtgctggcaaacttaaaacagtgtcagatactgtgaacttattgaacttatataacattctagaaccgtgctaccacggaacatctctatccgccttagatatcgagtttctgcctaagagtctccttactctaggcaaaacagaaaagccaatggcggtgagaaagagaatgtttggtcgtgcatggcctctaggtgccgttgtgcgtccaggcattgtacctagttggtctcaactcctcgctggctttggtgttccttgcattgtaagtagtaaaccacatcatgcatctttcctcttatagtatttgctaagtattaccgtgcatgattgccactttgaaaactaattatcactaggttacactcgaatttacatatctacatttggatacattgtatattaggatcatatatatacataaatagtttaaaaagttgtaagaacaagggtatttaattttcatcattagacacaaatagttcatttgatcaaattaaatgtatagtaccaattgtaatacatttgatgattctccacaattttagaaactgaaaacttgtaatggatgcaggacgatacagttgcgaccaaatggctaaacgatccagctgtaaggaaagcggttcatgctaaagaggtctctattcaattcatcatatttctctcaatcagtatttgtaataagttgatgatggacattggacaccattttaacatcttggaccttttttcgaaacgtcgatataggaaaaagcgattggaaattgggagttatgttcaagcaacctcgaatataggcacgacaccggtagcatgatcgaataccatagaaacctcactcttagtggctttcgagctctcattttcaggtgcacatatatagaaataaatcaaaggtaactaaaagtaaaacgaatgaaaatataaaatataacaaaagttaaattttttgcagtggagatcatgatatgtgtgtaccatatactggctctgaagcatggactaaggcaatgggatacaaagtggttgatgaatggaggccatggatgtcaaataaccaagtcgccgggtaatttttttgttataactatctttcggtcagtttttttcccaactcattgtttctacaattttgtgttgtaggtttacacaagggtatgccaataatctcacatttctaaccatcaaggtacaaacatcacacattttcttcatattctatttctacaaatgaaaacgatttgtgttttagtttaagtttgaatgtttttttttgcatgcagggtgcaggacataccgttccagaatacaaaccgcgtgaatctttggacttctatagtcgtttcctagcaggagaaaagatatagaattctcaagttccatgcatgttcattaataaaaatatttataacaataaaattccattttttcttcaataaaaacttcaaattttgtaatgtaatttacaaaaatgtgaaggattctatttcgtgtactaaaacaagtttttctccacacaaaaaaaaacatatactgttctgtattttttcaagggaaatttaaattgaaaagttaatactgtatatatttgactataattcaaaccaaaccaattaaaccaaaaatttagaaaaccaaaaaagttgaaccggaattgaaccgatatctagattgaaaccacgggatttattgaaatcgtcttccttctcactattccggtgtagctgctcaaaaatgcaaaggcgcttcctttcgtcaatctccgccaccgccggcaatactaaaaccctaaatcaaggaagatggagtgtaaagcaagtgaaaaaatccaactttcatgtaactctcgacgagattcgtacttccatcgattcatcagacttcatagctctctcattacaaaacactggctcatacgccgccgcgtggcaccgtgtctccgccattgacacgccgcaaactagctacttaaaagctaaatacgcagccgaacgttaccagattctccagttcgctctctgccctttctctcttcaaggctctaaactcactgttcatccgtatgactcttaaaacctctctcttattgtcaagtttcttcctttttggtaaattgattgattagggtttatggtctttttttttttgtagatataactttcatttgtttcctcgtgatgaattgaagtgtggtatgccttcttatagcttctcttgtcaagcttcacgtttaacagctatggctagagaaggatttgatttcaacatttgcatctatgaaggttttattatattctgctctatctccatttcgtttctttgaggagtctggtctcttaattgaatcattttacaggaatctcatacttatctagagcacaagagtctgcatcgaagtttctttccgagaatccgatattagctgattctgttactgtatcttcttctccagctactgtagctgatactgtctttgttggaaggattaggtcacgtgtcaagaattggagacagtcttgtatagactcgggttcaaagacaggagatggtgtaatagctagtgttagacactttcatatgaatctcattttgcacttacttttcaggtttttttacatgattcatctgtttatttaaatttcagatgatttggtgagctctttgagaaggctggtgttggggagtgagcagtatggttcaaggctgtgtttgactattgatgtttgcagtgagcgtcaagtgcaacttatcctagaggtagataagcttagttgatacttaggatgacaaatgcagtctgtgtatcgatggttagtttgataaattttcttcgtgtggttctgaatttgtgaccacagatgttgactgagttctctgatgatgttgtccctctactggtcgcttcaaagagcagaggaacacaagctgttcgtactgtctttatgagttcgaaggaggacaaggatctttttaaggtagggagattattttggatattccttagccggaaatgaccgataatgatggtgaaggtcactttaataaaacgaatctgaatttatgttcttggacagagagagcttaaagatcttgaaaaggaagaaaacaggcgagttcgtggctttcgggaagtggtcgattttatttcttcttcacagaaacctgtcgtttcccagaattatcttagcggtaatctcacttttgtcctccttagtttccacacaaattagagtttccgctcttgctccattgataataatcttatgcttaacttgttgcagattttacttccattcatgctaaattccttggtcctctaccttcaaatgtggatgacttcagcagttcactgagctcagcatttcccaatgttgtggatctcagtcagttcatgaaagaaattagtcccttaagtaatataagtaatctacctgcagctatgtcctccttgaataggttctttgcacctgtggatgtagaagtagcaaatcaaggtcacagttctctttcaaagatgttgatttctgcttttatgcggtttggatgaatagatattgacttttgattgcatctcttattaggttgtccggtcaaattagacgaaggccatcagagtcacgggcagaatgctgtgatgatatctcagctctttgcaaaactgtgtaccatacagaaatcagatctatcaactatccaatcaaatgaagatttccaagctttggcttctgatgaacatgcaaattctgtcacctcttgctctaaaaacgcaggtgatgaaaatgttaaagtctggtcaaagaacagccggagagtaagctctgagaacttggtgttcatatgggggttagggaaaaagatgacagctgcaaagctgaagaatgtcctacaaaagtcacaccccgtcttcgcgagagagtttgatgttaagtacatagaccggagctctgctattttggtgttttgggagtcaggtccttcagagactttcctcagtgcggtcaacaatgaagagcaacttgatggttcattaagagagatggttgcagaagggctaagaggggcaggttacgagacttacaagagagcttgtagattaggcttctgggaggctgacttggcggaatctttagacaaagcattggaatcttcagataccgaccctgattcggacactaaaccatcagagattgattggtcaaacgaattagctattaattttgatgagctatgaatagttctggttcacttacagaaccaatgtataccgaaattgagaacgttgattcatttttgttcttccatgagttgatttggctaacatctgaagttacaaagcttttttgaatcctgtaaaaaaacaaaagaagcaaggattacagaaattgaaccaaaaattgacccaaaaacaattgaaccaaaccaaaccgaaatattggtttggccttggctaaacccggtttatggacctgtaattgttgcgtctctacgagaagaggcagagtcagttaaacaccgtcggcgagaagaaatggggtttctgacggcggcgattagggtttcgacatcagcagcctcaatgcttctacgccgtaaatctcggcagctagggttcctagcctcctcctcgccgcttttttccagctttaattccatgaatcgcactatcaggtactactactcatccatcaaatcattcaaagctcgagcttttgattttgttgatttgattagattgagattagatgcacagagattaacttataatgaagtagctcgtgtaatattgtgtgcaaggttttgcataaggaatctcttactagaccaatgtggaacgttagcttcttaagatcctcttcgtttcattcaactccagctcgtgagaccggtgatgatgacattagcaaatctgagaacagttcgagtcaagatggagacagttgtactaaattaaagaggaagaagctgaaaggtaagcgtgcggttgtgcggtggctaaagtttttccggtggaagaaaaagaaagaatttgaaagaatgacttctgaagaaaagatacttaacaaactaagaaaggttagattgttagtgatgtagaccagcaaaattctattatgttcgtgtttatatcggttattttcgcaggctcgaaagaaagaggaacggcttatggagacgatgaagaagctggaaccttcagagtcagcagaaacgacacatgaccctgagatattgactccagaagaacatttttattatctgaaaatgggtttgaagtgcaagaattatgttcctgtagggagacgtgggatttaccaaggagtgattctgaacatgcatcttcactggaagaagcatcagacgctacaggttgtgatcaaaacgtttacacctgatgaagtgaaggagattgctgttgagttagcgaggttgactggagggattgtgcttgatgtacatgaaggtaacacgataattatgtacagagggaagaactatgtgcaacctcctactgaaatcatgtcgccgaggattactcttccgaggaaaaaggctttggataagtctaaatgtagggatgcgcttcgtgcggttaggaagtatattccgaggcttgaacaggagctccagttgcttcaagcacaagctgaaacgaagcgggattacacgaatgtgaaggttgatgataatcaagagaggtcagaagagttgaagaagattatagaaagaagcgaagagtgtttggaggatgagcaagaagaagatgaagcaggattagaactagcgacggattcagatctttcggatatttttgagactgattcggaattagaagatgcgaaaacagagcgaccactttttcttgaggagtttgagaaattcccagctataaacaacagagaagacgaagactttggggatctcgggaaggctaaatcagaaggtgaggagaatgatgatgataagtcaccaaactttgatgaagtagataagatgtttcttcgggctgcttttcttttaaagaagaaaagacgatgaataatcaatcatcagagattccatcacaatgggtacaagtaatggttttgtttagcaaagtcacaagtattatcttctttcttaacatgctcaaagctttaattctgtgatatttataaaatgtgtttaggagaagtagcttcaacttcaaaattttggtgtgaacgtaaagctcctaagtaagcttatgcttgtcaattcgttgaaaatcatgtttttgatatagcaatccagtggttaaaccaattttagacaaaactctaattctaggacaatttaaaaaatagtatcaaacaacctattaagtattaagcaagtaagtgtttaagattgaactgtaagattaatggagcaaacttcagaagaagttactcctccaaaaataggtgtatgccgtttgaagtggagagcacacggtattctttagtaaaaggcgaaagaatagttcgctttgtgctcaccacacggctccaagggttaagaaaggtaatcaccagatgctttatatatatgatgctttcgacttctagtttcggttttgctcgatgtgggacaaaacaaaatttgtttgttctttgctttgccaaactatctcaagtactgggccgttcccgtgggctgtttgtgtatttaatacatgtaattctataaatattcatttttctgattatctttttttttttttatcttcttttagcatttcatttcagaaaccactttttgatcagcttcatttaaagaagtatggcaaatgaagaacatagagaaggaatatattcttcctcttgataacaaacttgtgtacaaagtatatatagacgagaatgtgcagctaaacctaaccgactacacacgttaaacatacaaagcccatctaatttcaggaagttcgtgatcagatcatggtatcgagttctatggactacatgaaaggagattactttacgtgttttgatccttaatccagaaaaacaaaactacttgttaatgggccttcagccttctaactccttggttgaaaatataatcaagtaagaagaatgttcttgagatagaggcttcattccacaactgttagaagaatattaatcaaagttcttaacttttttcaaatgtcaggaaacctatgttggagtaagcttgaaataacttaataaataagttattaaatattacaaaggattatgttaaatctctaggagttatctagatatttaaattaggagttatctaatgttaatcctagtatgattaggtctaattattctctatatatatgagtcccaaggtgtggttgaccatatgagttttaaagagattaagatttagagattgtttaggttttgagttattttcctaaactataaagagagttattcttaaatctttgagttcttaatcttctttgaaaactagatttggtatcagagcatctaggtttgatattgaaacacaaacatgagtgaaatcgttgaagcaacaagcaaaggtaaagaaggtggaggatcagcgtcgatccaatgtccgatgctaaactccgtcaactatactgtatggaccatgaggatggaggctgtgcttagagtacacaaactttggggaacaattgaacccggatcagccgacgaagagaagaatgatatggctcgggctttgctctttcaatccatacctgagtcgttaattttacaagttggtaaacaaaagacttcttcagctgtctgggaagccataaaatcaagaaatcttggtgcagaacgagtaaaagaggcgagattacagacacttatggcagaatttgataagctgaagatgaaggatagtgagacgattgatgattacgttggtaggatctcagagattactacaaaagctgcagctttaggagaagatatagaagaatccaagatcgttaaaaagtttctcaaaagtttgccaagaaagaaatacatacacattgttgcagccttagaacaagttcttgatctgaaaacaactaccttcgaagacattgcaggaagaatcaagacttatgaagacagagtttgggacgatgatgactcacatgaagaccaaggcaaacttatgtgtgttaaaacataatcacaagatggcaaactcatgtatgcaaattcggattcacaagggcaatacgaatttcaggacagaggtagaggaagaggtcgtggacgatttggaagaggaagaggaagaggttatcaacaaagagataaaagcaaagtcacatgttataggtgtgatagactcgggcactatgcctctgattgtccagaccgtcttctcaagctgatccgactccaagaacagaaagaaaaagaggaagatgacactcatgaagcagaatcacttatgatgcatgaggtggtatatctcaacgagaagaatattcgcccaacagagttagaatcgtgtattaacaatgcttggtatcttgacaatggtgctagtaaccatatgacgggaaatcgtgcttggttctgtaagcttgatgagatgatcacagggaaagtaaggttcggtgatgattcatgcatcaatataaaaggaaagggttcgattccttttattagtaaaggaggtgaaagaaaaatactatttgatgtttactacataccagacttgaagagtaacatcttaagtttaggacaagcaactgaatcagggtgtgacatcagaatgagagaagactacttaaccttgcatgatcgagaaggaaatctactaataaaggcgcagcgatcaaggaacagattatataaagtgagtctagaagttgaaaactccaagtgcctgcagctcacaacaacaaatgaatcaacaatatggcatgccagactaggacacatcagttttgagaccattaaagctatgataaagaaagaacttgttattgggatatctagctcagttccacaagaaaaggaaacatgcggttcttgtttgttcggaaaacaagctagacattcattcccaaaagcaacttcttatcgtgcagcacaagtacttgaactcatccatggtgatctctgtggacctatttcaccatctacagcagctaagaagaggtatgtatttgtattgattgacgatcattcacgatacatgtggtctattctactaaaggagaaaagtgaagcgtttggaaagtttaaagagtttaaggcactagttgagcaagagtgtggggctatcatcaagacattcagaactgatagagggggagagttcttatcacacgaatttcaagagttttgtgcaaaagagggaatcaatagacacttaactgcaccatacacgcctcagcagaatggagttgtggagagaaggaacagaacactcctaggaatgacaagaagtattctcaaacacatgaacatgccgaattatctttggggagaagctgtgagacattcgacttatcttataaacagagttggaacaagatcactttcaaatcaaacaccttatgaagtctttaaacataagaagccgaatgttgaacatttaagagtgtttggttgtgttagctatgctaaagtcgaagttccaaatctgaagaaattggatgataggtctcggatgcttgtttatcttggtacagaacctggttctaaagcgtatcgactacttgatccaacaaaaagaagaatctttgtgagcagagatgtcgtctttgatgaaaacagaagctggatgtggcaagaatcaagctcagaaactgacaaggaatcagggacattcacaattaccttaagcgagtttggaaataatggagtcacagagaatgatatctctacagaaccagaagaaacagaagaagctgagataaatggagaagatgagaatatcattgaagaagcagaaactgaagagcatgatcaatctcaagaagaacctcaacccgtaagaagatcacaaagacaagtaatccgacctaactacttgaaagactacgtgttatgtgcagaaatcgaagcagaacaccttttacttgctgtcaatgatgaaccgtgggacttcaaagaagcaaacaagtcaaaagaatggagagatgcttgtaaagaggaaattcaatcaatagagaagaatcgcacttggagtttggtcgatctccctgttggaagcaaagcaataggagtcaagtgggtttttaaactgaagcataactctgatggcagcataaataaatataaagcaagactagtggcaaaaggatacgttcaacgacatggtgtagactttgaagaagtatttgctccggtggctcgtattgaaacagttcgtctcataattgctttagcagcctcaaatggttgggagatacatcatttggatgttaaaactgcattccttcatggggaattaagagaagatgtctacgtctcacaacctgaaggcttcacaaacaaagaaagcaaagagaaagtctacaaactgcacaaagctctctatggattacgtcaagcaccccgggcttggaacactaagctaaatgaaattctcaaagagttgaagttcgaaaaatgtcacaaagaaccctcattatacagaaaacaagaaggcgagaacattcttgttgtagccgtatatgtggatgaccttcttgtcacaggctctaacttagacatcattctcaactttaaaaagggaatggttggaaagttcgagatgagtgacttaggtaaactcacatattatcttggtatagaggttctacaaagtaaagatgggattacgctgaaacaagaaagatatgcaaagaagatcttagaggaagctggaatgagtaagtgtaacacagtcaatacaccaatgatagctagtttggagctgtctaaagcacaagatgagaagaggattgatgagactgattacagaagaaatattggttgtcttcgttacttactccacacccgtccggatctctcttacaatgttggcatactgagtagatacttgcaggaaccgagagaatcacatggagctgcactcaagcaaatcctaaggtaccttcaaggaacaacttcacatggactttacttcaagaaaggagaaaatgcaggattgatcggctatagtgacagcagtcacaacgtggacttagatgatggtaaaagcaccggaggtcatattttctatcttaatgattgtcccatcacatggtgttcacagaagcaacaagtggttacgctatcttcttgtgaagctgaatttatggcagccactgaggcagctaaacaggctatttggctccaagaacttctggctgaagtcattggtactgagtgtgagaaggtaacaattcgagttgataacaagtctgctatagctctcacaaagaacccggtgttccacgggagaagtaaacacatccaccggagataccatttcattcgggagtgcgttgaaaatggacaaattgaagtagaacacgttcccggagtaagacaaaaagctgatatactaacaaaggctcttgggaagattaagttcttagagatgagagagcttattggagtacaaggagtgtcaaaagaagatttcaagcttaaaagggagattgttggagtaagcttgaaataacttaataaataagttattaaatattacaaaggattatgttaaatctctaggagttatctagatatttaaattaggagttatctaatgttaatcctagtatgattaggtctaattattctctatatatatgagtcccaaggtgtggttgaccatatgagttttagagagattaagacttagagattgtttaggttttaagttattttcctaaactataaagagagttattcttaaatctttgagttcttaatcttctttgaaaactagaacctaaatacttgaaatataactcttctttatgtaacgaaacttgatcataaaacttacaaagcaaggaatacgaatacatggcaaacaagtactttttagagaaatatcagttttataattaggacataaccaagacaacaatgaacaagttaagaaccaaaaaccaaaaaccaaaaacaaaaaaaagtttgcatgtatagcttaatcattaccttgccggatttgagtcaaacttggaacataataaaagaataatggttttaatccgactctaaacaccacttccctaacttcgttgtcctctccaacgacgtatatcatgttgtttttgccgtttattacaaaattttgctcatacacaaggactttgttctcctcatcgaccaagaattttatgccatatttaatctcaggcttcaaatccaccgttaaaaacttgatccacgacaacactttggcctcaccaatcttatttgtcacccatatctgtgtcttcgatgtaagggaaggttgtaataacacggaaagtttctcttctttaacaactgatagagatgtattacgaaaatacggaatctgatacggaagacatagacgttcaaatctttctgtcgtataatcaaaacagatcaagaataggtcgcacggtttatcatttccatctgtagcaaaccagtaagtcttacccttcaaagaaacgttttcaatgtacaaagaggagtccacagtgacatcaagaatcctccatgaatttgagttaatctcataaatttcgaactcttggccaccataaatcccgtggctcaatattttgtagctattattgtcggattttttgtcttggtaggatccaagagcatagttgcagatgtagcccatccttctgtgttgaatccacttggttttaccagtacacgggttccataccacgagcctagtattaattttctccacgttgacgcataacaataagccagaagtttgacataatggagagttcctgaacatacctaaactagaatgatggtcgattaggttaagttcaccagtgacctctataggtgaaactctttggagattgatgctaatcgaagaaaaaccaaaattcttccacatgagaatcagagattgccttggggctttatggcagtgtttgcttttgaatctcttatcgttgtataaatggttccatagtttgcaagtagatcgtaatcgtttcaaagatgtagccggaacgcggcagagtatctccactaacaaatcctctggaagttctggcatcatcattgttatctccggaggaagaaactgccggtggtggctttgattgttgtttagggttttatgttgctttgttgttttctagggtattatgtttaatttatgctgactctttaatatatagacgaaaaaataaagtttttgatatccaagtaaaacaataaaaggtaaagtaaaacaaagctggtttgattgatgatcaagtaaaaaaataaagaaaaacggaaaccctgtttctgagacagagtcttcgtttccacaaccctagaacaaaaaaagtatcccatttgtcatttgtcaattgtcattagcaagaacaggaagaagatagagaacagagctcttcgatcttttttcctccaaggaagaagtagaaagatgggatttcatgttcttagacctcccatagctttacgcagctctctcctcggcttcttatccaaatcacacaatcctcttctccccggtaatttcaacaaacacttggtgggctttttcagttttttaaattctctttccgcaaaattggattttggaaactggttagcgattcaatcgattcgtggggaaatacccacaaatttgtttgccaaattgtcaaatgcttcaggaaaaaataaattgagaatctgactcagtttgaaatgttgaaagcttgggtttttgtcttccttagtttcattaatgataatgtgttgtgatctttgttctgtgttatttgttcagggagatgggttcaagctggagaatgcagtaccatgagatgttttgcttctgctactcgtggcaaaaagttagggtctttctttaacattgaaatcaacaagtttcaatctttctatgcttaatttcaatgaaactctttatttttctgtaacagcaaaaaacagagactagatgaggcatgtgttgaaaggtttaacgaatacagtcgcacactaatacaatcgtggattatgcaaggtaggtgattccttgttttcatatatccataaagcatacataggagcaagaggttcttggtgtagcttaagcttaagtgtgtatgatatgttatgtaggcaaagttcttgtggatgggagaagagttattaaagctggaatgcctgtatctactactgcagctataaagatcacagctgaggttccaaaatttgtatgtaggtgattattcttccgagtagccctatctttctacagtttctttatggtttaagactctgttgttgtcgactgtcctctactgttttttttgcttgcagaggtggactcaagctggaagctgcacttgagaagctagatgttgatgtttctgagaaagtagttcttgatgcaggactttctactggagggtttacggattgtttgctacgttatggtgctgctcatgtttatggcgtagatgttggttacggtcaggttagtgctaagtattttttctgcaatcaaagcctagttactaattagtcagttaattattcggtctattgtaataggtagctgacaaaattcgcaatgataagaaagtgactgttatagaaaggacaaatctgagatacctcccaggactcccacaaaaagtcgatgtagtgacgcttgacctctctttcatttccattcttaaggtaagtttgctactgattcagtttgtttccaggaactctcatggttgttatgtttaatcatccgaaaatgtttgagaattcaaatttatgaacaggtgatgccagctattatgaatgtgatgaaagaagatgcgactttagttacccttgttaaaccccaatttgaagctcgaagacaacaggtaatcaaattgaattgactagaagatgatgctagatttcgtattcactgaactcttagaagtgagaagtacatactgatatgtttatataatagtatagtgaaatatataaatgaactctgagagttcacaattgttgcttcaacatcttgtttcttgtgaaggtcgggaagggtggcatagtgagagatcccgaagtacatcaagaggtatgtatgcttctctctgtcctctttaattctttatgacaactgaatcttttcgggaaccattgatgctctttgtttattgctatactggattccttctgtgtctatctatcctaggatagcaataagcctttgatattagatagcaagtgaaagatgttgttaacacgatcctttgatttcatggttatgtgtgaaggttcttgagaagataataaacggtgttgagcgctatggatttaccaacaaaggctttatcgaatctcccataaagggcgcagacggaaacatagagttcttggcttgctttaatcgagggacagtaaaacctgaagccgaagaatagtagacttatattccattactgagtgggaagtttgaaccttgtgtgatatgctatttgtttcttctttcacgtattccattcacaaatctcattctaactcgtcttttgccttggtttaacgttcaagtaaacttacctttttgtttggtgatatcataaatctcaaagataaattaccaaaggaatcgcaggtaaattgtttcaaacaatctcaggaagagcattacacataatcattatctgtcacacaatgcaatagaaaaggtacaaaagcacaaaaaacttcataataataacaagtctcattttattggaatggtctgagaaatcaatatgtagtagacaaggttagcttttttgctaagcatagagttgtcttgaggtctaaacaagtctttcaatatatagctactcttccacctaaagaagctttctcatgttccagtgacatggtagtaccatgtcctgccactgcaaaaccgaagcaaaagctattagagagaaaaagtaaaagagaaactatataccgacaacaagaatctgcataccattacgctatgttcttgaactagttctcagttccaacaacagacgcttcattgttgtttgaagattttacgtttttcgcagtgtacatatgcaccggtggaggcaaaagctcttcttgaatagcctgaaacattggtagaccaaaccttcaggatttatgcagaaacaacctagtctaatcatactgattccaaagagagagcaatgtaacataccaaccaaccattcttccctctcgcgccgcctctaatataataagcctctttgaaaccattcttgatcagcaattcagctactttcgacgagttaccatcaaaactgccttccacatcaaaggtaaaaacatatgagacaactctctctacaagactacaactaatcaaccacaaaggccaaaagcaatgttttcgataaagtttgaatcttttgtttatacttacttatcaagaacacaaacaactgtattctcagcatcagagaagcttcctttaactttcgtcaaaaacccttcttcatcattctcactaaacggaacctgaacagaactcttacccaaaaacttaagattcggtgatgctaacaaagccaaagtcttgacatctctaatatccaaaagctgagaatcagattcattcttaagcttacgaaacgcgttcatggcggatattggtttatacttcctcaagtaaaacatcacagctggataaacaacaagataggtaaaagtacatcccgctacgaaaaatggatacttgttgaagaaattatcaattgtgaccaaaattgactctaaatcgatttttccagaagatgggtctgatgaaattgagtcgaatgattcagatgcgagaacaggggaagtgataattagttgggaaatggttacagagagattggttttggttaggagatgtattggaggttgttttgtagaattttgaatgggttttgggatttgagaagttgaacaaggtttggttaggtttcgcagtggagaggatgcgaggattattggaagagacgtcattggtaatttgacgacgtgtggaagcgcgaagaggataagagaacaaaaagaaaaaaaaatcaatagatatgtcaaattttgtttttttttcttgaacataaatctaatcaaaatacaagataaattacacagtggccaaatattctcttctaaaaacgaatatatatattttttttttgaaaataatgttaaattagattcaaaagaaaataacgtttttacatcgagtgcaacgttttttgaataattttgaaacaaactagaacaaaatcaagaatttgtggctccttgtctcatcgcaaaccagacttgcaagctcatgtcatatctcttatccccacttgctctgatcgaagatagttgattccgggtttgcttgtctatccatttggttaaaagagctgctgagtgtggtttctcttcatgtttccttcccttcctttcacgccaaattgtgtgaaccgagacttgaaaaatatatcacgcaaagaaaccatcaagccgagtcctccaacagccggaaatggcttgtatcaggtcttgccaactcgtggaatatctgtctccatagatttccgttgctaagttactccagatttctgaagcaaaatcgcaggagaaaaataagtgatcccgagtttctaatgcattgttacatagcacacaagtagctgattgtcctccgttccactggttcattatatcccctgttgagagccggttttgaactgctaaccaaacacaaaaagagtattttggtgtggagtgaacaaaccagacacctttataccaaaacacttccatggatatggaacgtgtatggttccaggtttctttggtcaagaacgttggcttataaacgtcattcttccctttccaaaggacaatgtcttcctcctctgttctgcgatttctttgttgtaagagtgttgtttcaatggcattaagatgtgtggatctgtgtcgtcttggcctgcaaccttcccaagcttctgctactgttttgtgcttacttattccaagatcgatttgccccctatcacctgcaatatcaatcaatggacccatattggaccagttatcaaaccaaaacgacgttcgaccaccatttcgaatatcaactttgcagaattgttttgctgtgtctcggtacttgaggagttttcgctacatccaagaaccgttatattgcatgttgagcgaccagaaagacttggttttgagaagataggtctctatccattttacccacaaggagtctccacgtgagacccatctccaaattaactttagacagctaacgtcatttgcctctttcagcgatcgtagaccaagccctccttctcgctttggtttacatattgcttcccagttaacctttgctcttttagagttcagctctgggccagaccagagaaacgctgaacatagcttgtctatctctcttatacattctcgaggaagcctgaaagctgcaatccaaaaattgcaaatactccaaatgacagaactgatcaagtttaggcgacccgcatatgagagatatcgagccgtccaagttccaatctttctttttatttgttctacaagcggtctgtagtcagcagaagagaaacgctttgtgactaatggtaacccgagatatcgaactggaagacttcccactgcaaatttaaatcgctcctctatctctcgtctgtacatatttgcactcccagctaagtagatggttgacttctccatgcttattttaagtcctgatttctttgcaaactcatcaaaaacactcacaattccctcaactgagcgaacctttccatctgaaagcaccatgagatcgtcagcaaaagtgagatgggttaagccaatagtctgacatcgaggatgatacccaaacttcttaaaacctgcagctctatctaacattttagatagtacatccattgctatgacaaagagataaggggaaagagaacatccttgacgcagaccccttgaactgttaaagaaaccaaccaattctccattgacctggactgaaaaagatgcagtagtgatgcagagcataatccaatgaataaactcttgcgaaaaattcaacgagtggagaacgttctccaagaaagaccattgaacggaatcaaacgccttggagatatcgatctttatggcgcaacgatctgatactgactctttatggtagtctttaacaatttcagtcgctagtaataagttctggattagaagacgatccttgacgaaagctgattggttccccgcaataaactgtggaagaatttctttcaacctctttgcaatcaactttgatatgactttgtagatgacattgcagcaagatataggtctataatctttcatttccttggtctcgaacttcttagggatgagagcaagtatggtagagtttaccccttttggtaagaatcctttttcaaaaaaagacttcaccgccactataaattcagcacctataatctcccaagtagctttatagaactcagttgtaaaaccatccgggcctggggacttatcactcgacataaaaaacagaacagtcttaatctcttcccctgtgactggttccatcagtctacttcgatcctctgctgtacacctaaatggtaacaaaacttgaagttcctccaatgtagctccctcaaagtcatttggaaccaactgcaaaaactcacggaaaaaagttctgcttcttcttttatttcttctcctttttttgttacactgccatcttgcctttgaatctcacgaattgagttatgcgctactctcgccattaccgctcgatggaatgttttgttattcttgtcaccgacttgcatccaatggagctttgacttctgtttcaaatatttttcttctatttccgccaacagttcccatttctcatgcgcttcagtttcctcgatcatggcctgtggagaaggactcttcaaattttcctcttgcttttgacatagggtatcatgcgcttcctttgttctctttaccaaattacccatcttttctttagccagttgacggatttttggtttaagtgccttcagctttttggtgaatctaaacatggtagaagttgacatataaacaggctctgttgttttccagtaagcttctaccataggacgaaattcctgcatttccgctatagcattgataaacttgaatggtttcttccccttcactctttcaccaacatcaatattgagatttatcctacaacgtaaatgatctgagcaccctcctgcctcaaatacattgtacgattgcgggaaactcatcttccatttattattcaccagaacccgatccaactttttcagtattaaatcattctcctgtctattactccaagtgtagagcgaaccatgtgaagataggtcagtgaaagcacaataattcaccatctcttgaaactcacgcatcccataagttactcttgtgtcatcccctttagaatgctctgccatattcagaatttcgttgaaatctccaaaaattatccaaggcttatttcgaatgattggagaatcacaatgatctcttagatcattccataagtctttcctttccgaagcaaaatttgagacgtaaagaaatgaacaaaagaattcatcttcttggccctccaatttcactgagcacgttatgagttggccacttttatatatcggactgagcctagtgttattgcgccacacaacccaaatcctgccacgcctgttgtgctcataatttgtcaaaatagaccagtctttaaaaatttgatttcccactgtctgcatcttgctctcctgaactcttgtctctagaatacatccaaactgaaaattttgttcctccacccatttctttataacggaatgtttagtagatttgtttagaccgcgaacattccaaaagaaacacgacattaatgagattttttgttgtttctcttactctgatcattaggaatattcctggccgattgagtagtagaaaccgttttatgagctgttttggatccccttggtaagtactgtctcgagggcggatcttttgttcccctagactcatcaaccactgttgtagtgcatgctgtcaccggagggtcttgtgggagtataatctctttctccaccccctcttttccaatagttggttcatccactacttcatctacttcacttaaagctgagtagggattagacagaattgttaccgccccatatttaggcccctctgttgctttccgcggacttctacttgtttttggtggtgtaatccatctctgaccatcctcacccagatttccaataacgatttgtgtaggtgttacctctttctctttaacctccactaaataaattgataaaaataaattggattttttagttagaaaggtttggcaggacgttatttactaaaaaataaatgagttttttaggatgaaaggtttgactagaactgaagatttatgtttattatactataaagtaaaagatcaatcttgtaactcatttttattttacttcatatagttaattagataacttttagtaaattgacctctacaatacttttaaaatctctatatctggtatgtcaaagattattttaatcatcatcaaacagtgcattttcagtttttttttttctcacggttttttttttttttttttttttggtgaaagtggtggatttgcatgaaaatttctaacgtgtagttgacataattaaatttatctaacgtgtagtagtctgaatctttacgtttcatcacatttgaagattccttgtaagcacaaatcgtcgtgtggtcggtctttaaagtcctgcaaaaataaaagtcaccgcggcggcaaaatggaagcaggcttaaacgatgttaggatatataacatgggaatatggagtggtatacttaaacatgatctccttgcattacattgacatggtcttgattgaattttagtatggcagataattcaacaggtcagcaaaaacgagtcaagagaacatgtcaaaacagaagtttgtattcaaactataagaagcgaataagcgatgagatgaaacacatttagagaggagaaaggtagaagaagatgaagttgcagcacgttgtgtacctggtggctattttcttcgtggtggctattttcgtgattgcatgtatagaagagaataagtacttagtctggattatgattattcttggtaagctctctacactcgtttttgattaatttgttttgcagaactactacgggtcttatgatctttttttgtctatcatgtgatcagcaaacaccaccaacattttgagcctcgtgcgtagcattagctatataaaaaatataaggaagcaccagaaggacaccaagatccaacgacaattattctttgagaaaaatggcggtggcatgttgatagagcgactctcgggggcagggtcatcaaacattgatttcaaaatctttacggaggaagacatgaaggaagcaactaatggttatgatgtgagcagaatcttgggtcaaggaggccaatggacagtctacaaagggatattgcctgacaactccatcgttgctataaagaaaactcggctaggagacaacaaccaagtagagcagttcatcaacgaagtgctcgtgctttcacaaattaaccacaggaacgttgtcaagctcttgggttgctgtctagagactgaagttcccttgttggtctatgaattcattaccggtggctcccttttcgatcacttgcacggttccatgtttgtttcttctcttacatgggaacaccgcctggagatagcaatagaagttgctggagctatagcgtatcttcactccggtgcttctattccaatcatccatcgcgatatcaaaactgaaaatattctcttggatgaaaacttaactgcaaaagtagctgactttggcgcttcaaagttgaagccaatggataaagaacagctcaccactatggtgcaaggcactctcggatatttagacccagaatactataccacatggcttctgaacgaaaagagcgatgtttatagctttggggtagtcctcatggaactgatatcaggtcaaaaggcattgtgctttgaaaggccagagacttcaaaacatttggtgagttactttgttttggccacgaaagagaataggttgcatgagattattgacgaccaagtgttgaacgaggaaaaccagagggaaatccatgaagctgcaagagttgctgttgaatgtacaagactaaagggagaggaaaggccaaggatgatagaagtagctgcagagctagaaacgttgagagccaaaacgaccaaacataattggttggatcagtatcctgaagagaatgtacacttgcttggtagtaacatcgtgtcagcacaaggccataccagtagccgtggttatgacaacaacaagaatgtagcaaggtttgacattgaagctggccgctgataaagacgaagaagaagattgttttcgtccaacgagtccaggaagaggttgtggcatcattggattcactggaacaggaaacttatgagcagaactaaccattgttctttcgtttatcatccctacttctttgcagactctgtctactactccaaggaagtctctaaccaccaagaatattctaaacggatgcgcttcttctttagccgagtttccatggaaatactctgtgatttcttttacaagtgataacgctacgctctcttgagcttgtactctgatgatctcttcctcagctcttttcagaaacgtttccatcgattccgaaaacctctgactgttgctttcttctgtgattgttgattggacttggtcacttgaggcatggtcagaaagagtattttcatcatttacggagagtatacagaggagctatgagaatttgatgtaatcagacacccatatggattgccaaaatagatggcatttagttagtgagaaactatgaaccacgaggaatataattggtttaaataacgtctggtctttcttcttcgtagaactaattatttacaaagtttgtttcctatgtatattgtatcaatcttttaaataagaccacactattcccctcatatagcaatttgtttattcaatagacatatctacaatcatatgttcttttttagagattaagtcaagttctctctaatttagcacttgtacgtagtactagttcatatgcaaatcaataaaacactacaattattcatattaggaaagttcctattgattctggatagaaacagagtgttaaaaacagaatacaataaaaaaaaaaattggtgctgacagaatacaagaaatttaagggagtgaattaaaattacggtagccaataattggaggattaacaacacaccggtttacaaaacaaaccggaaatcacactaaacagggtaattgactaataataagagtcatattaattaaacaaatagatcatttttacccatgtgattcgaacgcaatatgtaacttgtaatttgaatttttgtttaaacagactaaagttttcaaattagggggaaaaattccaatttcaaatctaaatgggtctaacgaaataagccggggtatttgagtattttcgtatcaactagccttaaccactaaactacaaatagaatttttctggtttcattcatttcataaccgactcaaaaaaacacttcgtctctacgattcaaatgatcaaattcaacagaatcaacctgtttcggctctaaacggtgatgaatttggcgatgagaacacaattggggaggaaatccttgtcaccgccgtcaaaagaagcatgtgattgaatcgggaaaaaacctccgattacgcaaacaatcaggaatgtaataaacccaggtctgatcgatttcaagtttgtttttgattcatcgattgttgcctttacttcataattctcttccgatttttcagaacagaatcgtgtaattgaatcttgattacaaatccttgtaattacgcaaaataaggttaggaatcacaaacccctttctgtgtatttctttgttgctccgtttatagtaatcaatctcttattgatttagaagaatcagtgaacttcgtagtagtgtgatgatgctgatgatgatcatcttcattttgtgtccgttgattgctagtttttctctggtttcaattcaatcatgtaggttattgaaaaacgttggttacacgtgttttgattaagaaaatctatccatttagaacttcttgtgatgatttttctctgtttagtgattcatttctttggctctagtgttttagttacatgactcttaaagttctttcatcatttgataggttgatagtcatggctgcattgatctctctgacattcttaaggttacagaaggctatgggaaatctggtaacgtgatcttttcaatttctaaatttttcccgtgacatttattgatttttttgctgattgtctagcgtctttgtttctctacagtatcactctctgtaatgtctggtaatgaagtgatcttcaggaaagagtctcaaattgaggaacgagagctaagacttctcaccgaggtaaagattcttttgatacagtttggttttgttccttgccacctagctttttcaggaacttgtctctctactggcttttgatcctgaaattgtttgtattgatcagctgcccgactgctgtgctgctggtacaaatctcatgaacctcatcttccaagtgatggagttagatggttctttggatactagcatccatcatgacgaaaaaccaggttgtttccatacaatgagcattgaatctgattcaagcagcattgagagtgcaatcagatatgcctttgtccacgggtcctgcaaagtttcttctctctccctacctgagaacgagggtgtcttttcgtgcagggtgttccattctcgatatcccgagctgcagatgagcgtgaaggtagtaattttgaattgggcatatgttgcattatgtttctactatgggtagaattttcagttcaagctcgtgttaacacactttttcactctgattctctgtttttttattttcagattcaggtaacatctgctcccacatctgaaagagaggagagtggatattctacaccgcattcaataacgactccaccacctgaatcagggattccttcaatcacaaatccatggcagactccatgttcacagtttggagtattggccattaggtcatcatcatcattggctctcagtagcgaaactagcctgatggatatgccacagtacactgaggtatagccatcaccatttaagcggcatattttgatatgtctctttcatttatactttagtgcaggcaaaaaaacatctagaatgagctagcttttgtattccgagttcatctcagccgcatgcttataatgttcctttcttactgcaggatttaaaagaaaaaggattatgtatgttttgtcaattttggttttatgatcttttaaatttaagtattcgttttacgtttaagctgcgtgtttattaacaaggtttaattggtttcaagagattttttcagttgaaatggaacttttgacaaaggttctcaagatgaaggattgtttagctgtaaggaagctttgaagacagttcagtagccaacaaaggtatggttaagtagctctttctctctctccctcccacttatcatgtctcttgcactatatcaaaaacagagaataaatccacgaaaacccacacataaacgcacaaaaaaacagaaaacagaacataaatccacgaaaaaccacactcaaaacaaaatcacacacccaaaacaaaattcaaacgcacaaaacgaattcaaacgcacaaacaaaaaacatagcacacaacgtccaaacgcaacttcaagaaatagaaaacaaactttcacgggatttttttaacaaaaaatgtgaataatcacatttgatggcaagaaattgcgttgtgattattcccttatttcttactttcttatctagttgctttattatagcttgtattaacttatatatttgaaaatgctttggtgtacacgagcatggtttgtagtttaaaccaggttttcataagaaagagcaaaagtttcagatacgtgtcaatatactcatgaatgatgaggtaatcttgttatcatcattttaaactcttattataattaatgtgaatttatgtaaacctaattatatgttttaagtattcacaggtttcagctatgatcttccatttattcagaggatagctccgacggagtatccaaattctgcctcaaaattagagaatggtagtgcttaatagtatagtactgtgtgttttttctcataattaagttgacattgttattttgttcatttttttgtgtctaatgtccttttaattggcataattgatgtgtaacttgcagaaataactttgtgtgagtctgctgatgtatctatcaaggagttgataaagagacttaatgaatgtaagctttttaaacgagttggtgaagcattacaactatttttcaggctcagaactacaaaagaactttcggtttcatttgtgcaagaaaacaataatgagtaaagatgcaaccaaaacatatcttgtcacttactttttgcttctatttaggtacaccgagcaagactaggtggcaaaagggatgtcgttgtaaaagtgagaaataatcaggagacaactgaaatcttcctagcttgctttcagttagtttcttaatgtgctactacatgtttaggtacaaagtcgtgtggcgttgacaatttgatgatgatagatgtaataaacttgcaaatatttgcattatacattcagaaaacgagaagcaggtatttatcatttctatctggtgagaatttatagtcccccaagtcacactataagtccttgtttttcattttctagattgggtatgaattcaatggaggccaatgctatggaaatcctccgacgtttttttaatgatatgataaacaatggatagagtcatgttccgttcccagggtacttgttttataaattgactttttaaggattcctgtttcactgatcaagtgtttgttgacagaatctcgttttgtttttttcctatcttgctttccattagtttctgaaagtgctttcagtccaaagtcctggcgttgagaactcgatggtgcaaaaaaagagaagcatgtatttatcatttctggtaagaattttacatgtaaatccttgtttttcatttttcattgcattggcctcgaaccttgatttatactgaaactaacagttatccattttctcttgttaatgcaattcacaccatagaaagcataaaaccaacgtataaagtcaaaaaggtttggactggtgatccttgctctccaagactattcccttggaaaggtacttcaaattaccaaataaaatccctgtaagtcattcatttcaacaagacaataactcatttttgtaatttcccttaaggaattctgcttatgagcttagttcaagtgggttacaaggaccaatagccgtctcatttagacatctttcccttcttgagtcactgtaagtatacaaattcaagccatacacacacactaccaccctctttattcacattatatataagagtcgtgtgcattgttttcccaatgattcataaaacaacaacctaagaaagtgacaaacatttgataatgtatttgtctatgtcacaggaatttgaaaagaaataacttgactgggtttgtcccaagatctcacaggaaaagaacaattgctagtgaacttgcaccaagaggtatattttcttgtcaaatccccggaaccatagttatcttcttaagacaatctttgtctgtaccattttctgaagcttgttaagaacagaatcgtgtaattgaatcttgattacaaatccttgtagttacgcaaaataaggttaggaatcacaaacccctttcttcgtatttctttgttgctccgtttatagtaatcaatctcttagtgatttagaagaatctgtgaacttcgtatttgtgtgatgatgccgatgctgatgatcttcattttgtgtccgtttatagctagattttctctggtttcaattcaatcatgtaggttattgaaaaacgttggttacacgtgtttggattaagaaaatctatccatttagacttcttgtgatgatttttctctgtttactgattcagttctttggctctagtgttttagtgtctctaagatattacatgacgcttaaagttctttcatcatttgataggttgatagtcatggctgcattgatctctctgacattcttaaggttacagaaggctatgagaaatctggtaacgtgatcttttcaatttctaaatatttccggtgacatttattttttgattttttgctgattgtctagcgtctttgtttctctacagtatcactctctgtaatgtctggtaatgaagtgatcttcaggaaagagtctcaaattgaggaacgagagctaagacttctcaccgaggtaaagattcttttgatacagtttggttttgttccttgccacctagctttttcaggaacttgtctctctactggcttctgatcctgaaattgtttgtattgatcagctgcccgactgttgtgctgctggtacaaatctcatgaacctcatcttccaagtgacggagttagatggttctttggatactagtaaccatcatgacgaaaaatcattctcattgtcgccttggttgttatatgcatcatggtaagggaaagaaagataagtaagcatagttagtcttcttttacataattaatggacaaaagtcagaattaatgcaaaaagaaaatgagtgttagtttcctagtgtatgcaggaccacttctgccttcgggaaagataaagttcacatgtagcattacaaacaatttcaaaagtgatcggtaaagaaggttggtaagaacagcaaaaacattagaaaccgaaatcagataagtttatacattattttatggttgataaagtgtaaaatttctgcatgcagatcttcttttaacagtgcatcatcggaacttagtttagtttatggatactgcgatgatggttgcaaatatggctctcatctacgagtacatggccaatggcaacttgcaacactcgtttttgtgatacttactattaaggtaatctgatctcacggtttgtatttctgacccgctttttagtcgttatatgccgttgaaattttatttgccgtttgcaactttgtccaggttaaaatttataagtatgaatgagaagcaagtaagcaacctcgtctgcgaatattggtttagtaagttttatttctttaatttggctataatttggttgtgttagttttatcttggtcaatctcaatgtatatatcaaaatgttttattttttgagcagcaaagaatttggagatgatatggacatggtgcagccaagaacaagcgactcttggaagatttaactgggttacagtaattctcttttaccactcataaaaaaaaacacgcatacacagcccaaaaagtttcttacactcaaaattttaaacacacaaatccacgaatacatatacatccaaaaaaaaaatccatgcacacaaaattgcaaaaacaaacttcacaacttcacggtcacgaatcatgatcacttaaactccacaacttcacgatcacgaatcacgattacataaactccacaacttcacggtcacgaatcacgattacataaactccacaacttcacgatcacgaatcacgattacataaactccacaacttgacgatcacatagagtttgcttcctctccaacacaatttcaatattgattttttcacaacaatttctacaattttaactcaattcttgtttaatattctttttgcaatgtatttcgagcgttagtgaacttgtaaaattgtttgttatcagttattacattttttaagatttatttttttttgctatagaatttgtaatttgaatacccttgttcttgttgtaattcttgtatttaatattctttttgcaatgtaatttttgagcgttagtaaacttgttattcttcgtcagaccccgagaataaagttttagtgttacctggtaaaatgaggtctccaacactttcttaaacattttgagagaaaataaatagataaaagtggatcatcatcacgatgcagaatctagatgctcacctctcgtcaattatgttccaactttggttcaaatccaacaaggttctttgaagaaggtagaaggtactggaggtagtgatttataatgatcattatattcagcaacgaagggtaagtaagtaatatgtttgctctcacattctttcgtggtacacacggttcagataaacaaatttatttgattcttaaattattaatttaagatgaacaaattttaaggtaaacctatattattttttttacacaaatgcagaaaagaaaaacacttctttgtttctgtcattaattccctccctctatatatatatatttaaatctattatgacaaaacaatccaatactggatactttttacaacaacatgcacagacaaagctgagatctcaccttaagaaactaatgagattgagttatgttcgtcttcatcagacgaagaggttgaagacgacgacgaagaagaagaagattgtcttcgtccaacgagtccaggaagaggttgtggcatcattggattcactggaacaggaaacttatgagcagaactaaccattgttctttcgtttatcatccctacttctttgcaaactctgtctactactccaaggaagtctctaaccaccaagaatattctaaacggatgcgcttcttctttagccgagtttccatggaaatactctgtgatttcttttacaagtgataacgctacgctctcttgagcttgtactctgatgatctcttcctcagctcttttcagaaacgttttcatcgattccgaaaacctctgactgttgctttcttctgtgattgttgattggacttggattgcttcgttgatcttggcaatgccttgagaaagcttggagacgtagctgcttagtacttctgagtccatcgcagcagctttcttgacgttactaagctcagaacagagacttgatacaacttggagacctagtttccggcatttaatgtcatctgtttgtgtattgttacctgagagacgtgtgccttctgctcggattatctcttgtacaacgaaatgcaagagagttgttttcccatcagcgcctttgacatcgactagcttgagaagtgtatcaagcttgaacgcatgtgcatctcctcggtttgttccaacgttcatacggtttcctgtctttagaaccgcttcaagaagctttaagaacatcctactgttcctcagttcttcacaagcagcctacacaaacaatagaaatgaagtcataatctgttacaatacaaccatatggtaaaaagagagagaatagcttgtaatatatacctcaagagtctcaaaagatttcttcaagtattcaacctcggactcaaagttggctacatagagcattgcatcaactcttttaaaggcgaaagggatgtccaacattgccttaaggaatttctcagcatgtccaagcttaacaggcgaatcatcattgtacgctttcaacttgcgctcttcttcttttgtcggtgccatcttcagtaagctctcaagaagttcagtccccagtgtatcagcattgcctgaaaaagcataactaagaacatcaatgtaaccaagaatctccacaccatcaaagaagcaaagctttcagaataactcaaccatatcatcgaaaaaccattaacaaatgcataagaactctaattctggagatcaaaggagaagaaaatgagaaactatgtatgtgacagcatagtttaccttcaagaagagcctcacaaacttcttctatagtgacattaagtgcacgaagcaagatggcaatattctgagccttcttcgggtccaggactctgttctcttggttcgggctcgggagaacacatcttggagttgtctgactctgatttggtttgttgtttaacgacttcgccacaaacaacgtctcaatcatctcctcatctaatctgcaaaccacattcataatctcaacaaccacattctcactaaaagcatatagtatcatataaacgagtatgtcacattaactcacttgaaagagcttgatcgaagatgatcccaaaccatctcacgatccgaacttgctctaactttatcccaatgtaacgcctttagcttcggtttcggagtttcctccgccgcctcactcgcacaaaccgtctctggagtctccataggagacgaagtcactggtaagttttcagatgggatcacaaaaggatgtgaaggcggtgtaagagaaggcggtctcgagattgtgtccgctttagtagtcacctgactccgtcgtccccacaacggcaacggtgggggaggaggaggaggcggaggcacacgagactgtaaaatttgaggtgaaatgttcgatatccgtggtgatacatctaagctatgactaaaatctctatccggagaagatgatagagactgcgaattccgggaagataacttaggagatgtaactggtgacttatgagaagctttctccggtgaagaacaaacagaagaagaagacgacgacggtgaacgagaacgtaatgcatctaactgcttaaggaaaccttgtcctccatgagagttagaaggagaagatagtaactgagattgcaaaccttgccggagattactcataaacgccggtaagacctccggagatttctgaaaacatctatacggtgatgtagaagcagaagaatgcgacggagatctcaagtaagcttctggtgtatcatttggtcgtcgttccggtgaagttgaagtagatgataatggagagttctcttttttgttattctccggtgaagttgttagagatgtaaccgtcggagatctaaagatttgattcaatcctacttcatcggagtttttcaatcccgacgataaagaagctaacgacagtgacggagaccgaacaaatctataatcggttaactccgccggttctggtgtggagataaccggcggttttggttcagatctcttaggactcattgaaggagagatactgataaatgttgatcttcctggtgaaccagagcttgaagatgagcaagagatagtgtcattgttaacagatctaggattttgacccggaagtccgacccggtttaacggttctcgcccgctttgtgagccacgtggagagtaaaactcatcttcttcatcttcttctccgattgaaccaacatctggatttaaacggaaacttcgtttcatcaatggaggaagtggttgaagatctggagattcaagttttcttgagcttgatccattattactaagagattgttcatcgattcctctttgattcaccattgttcctaagtaaagaaactcagagctgttgttattggtggagctcgtggtggtcctctgtttacttctagcctccgcattgcgtcgtgttggaggcgccgttgccggaggaggagggtagacacggcggctactgtcggtggtgtatgttttgctatcatcggagaagttaagatcttggttacgtttgcttcttcgccaatagagtaaagcgataagtagagcgactaaagcagcggaggaaacggcggagatagcgacgataaggagttttttggagttaggtggggatttagtggcgtgagggacgattagagatgagatattcgccggaaaagaagcgaaggaggctggagaaggtggtggtggagatgaagggtataaagggaagaaaggagaagcatttgggtctgatgaagatggaggagtggttgaagagaatggtagtttaggaagtggtggtggtgatggtggtgacggtggtggtgaatctatagggaagaatggttcgtggagtacacgacggtcggcgaagactagatcggaggatgaagataagagtaagtagaagaagaataagaagaagagcattgtgttatcttcttctttcttcttcaagagttcaagatctgagaaaagagaagagagaaactttttgaatagagtgatgaatccagctaagattctgctggtgatggtttgataattttgtttttggtttgttctcttaactcagtgatggtgagagagtagtagagagagtagagagaaagccaaaagaggtgatggaagaagagtggttgattcttaattttatttttacgtagtggggtccatttcagacagtaacatatgagattataacacgtaggataagacgtggactttgtaatagtccgcagaagtgtacacactgaaagtaaacactgttcattgaattgcaccgtacgcacaatgttgaaaataaaaatgcgagtggatttttattttattaaaaagttattacggcggtttgacgacgtctgtaataaagaaaacataaaataatggtgtgttaatgtttgaggaggaggaagtggtagtgggtgtattgtgctgagttctttactttattttgaccgacactgtctcaggatgtgtaaatggtcggttcatgtgctttcgccgaatgctgtatgtacaaagcgtaaaattggaggacaggtctaactggtgtagataataaggaggaattaggacatatgatgagaaacttatacagtagcatcgtttgataaaatatcgatcgttgcaaatagttaagttaaccataaacttttaaatggctacatcatggttcatgcaataaccatatctctaaatgcgtcccttaaatcttcttaataagccagttatacttcctgcgtcttatgcaaatgtcgactgtgtgaatcctctttctgttttggggcaacaaacattagaccacaacatggttttgtttgtttttgttggattttgcaatcataaaaatggcactagaaattgatggtattgaatatgacagaaatactgaatttaccaggactaggactgcaaaatttatcaaatttaaagcaaataatgtctgattcttgtaaaatttgtgggcctgtgaatgttaagaaaaactataaagtgaactattaatagttcatataaaagttcaaataaaaagaggtgctagaaaaccataattggactaagaaagggagtaaaataattggtcacgtgggaaagctactgaaaatgtaagagtacaagagtatcaggaaaccaccgacacacaaaattgaactttatacttttatatgcaaaaataccttataagtagtctcatcgttttatttttaaaatttatatagtgtttcaaaaaaaagaaaatcattgcggatggatgagtagttgttttacgtttgtggatgagtttttattttacaccatagcggatggttatagaagaacctctaaaactatctccattggtagtatctcataagaatttttcatagttaaaaaaataaaaataataaaagtaaaagagagattgtagaaagtttctcgcttcagaaactttgagatactttttacgatccatcatgacaattttctttttactattggtttaattttttaacaaaaatatttttttaatcaaataatcaaattataatataatattaatatttttttgtttgagaaactttatggatttctcgtggatgaaaatgccctaaatatttagttgaaattgtaagagtgatgaatcatatatatgaaagttggtcaactctcttcatatgagtgatcatacaagaaaatgacatgtgtcattctacattaattaaataaacaaattagtaaaattaattgaggaaaaattaaaagttttttgttgtgttacattttctattaatctcactcttaaagtgaattttctaaaaacattcaataaataaaaaatcataataatgtatcaagtactactttcattctattttacttattttttaaaaaaaatttatcaatagttattaatccataatggctaacatttacgtgtgttgtagtttagatgtttgctatctaacctcatattaatttagtaattttagttggatattttcttattattacgttttatgtgaatcttatttatcatatgaccttctttatgtttatttttgtgcggtctgataacttgataacattgatatacaatgttttcacgtaatggtcatccgaggcattagacatatccacacagaaatatgagaatctatatggctatatgcaaaggaacggctatatgcaaaggaacagaattaaagtgttgacttaaattgctagcatatcatgatgtggttggtgtactagatgacgaaagaatatatggaataaagaattgtttgttaaaattaagttaaacaagtttcaaaatacataagtaatataattacatattaatatatcataaaatgatgttgtatgttttcatgatagtgaaatagttgaataataggtatataaatattcatattatagtaaaattgatatttcgaattatagataaatttaatcaaaaaaaattataactatataaaatagatataaatttattaattacacattaaacacacgcaaaactgaacatcaaaatcaacaaaagaccataatcatatattccgacaattttagaaataaaaacccatgcgtagcatgagtgttcatctagaataacaaattaactaacaataacaaatacgtaggtaattttataaacattgtatatataaagatcataaatttataatttatctatatgtggtataatcatatatatgaaagttggtcaactcttttcatatgaatgacacatcatcacttagcttttgccacatgtccacttaataattaatgtaagttaatggtttatggtaatttattatttaattgtatatattataaacttttacataattaattgtatcaataataattttcttttattttgtatgtctttttcttaaattaaattatttaattgattttcttatactcttggatatttttccctaaattttataattttaagtcaaaatatgattaaataattttatagtggattagctaatagttttcgtaagttgttctttttctatataatatattaaaaatggtgatacatgagaactctagcatcaaattcttggactcaaatcctcagtgatagagtttttcggttatggagttcgtatttttttttattttttttgtaaaagtggcaactatgaaaattaaaaaaagaaaattattttacatttatgtttcaacaaatcaataaggcttatcaaggtttggttctatttgtctatttagtataacttaataacatctttttatttaaacgaacagacaacccgattatcaatgcttaatttttgtacttaaatactaccaccatggatttcagagcgggtactccaatcttttttgccttttgtcttatttttttggtttaaggttgacacaaatgaaagaaattctgaaaataatgtttactgagaatagattttgttaggaatttaaatgcaaaatgcaaaaaaacaatgttgatttatggagcttagtatcaaataggaattttgtcttcttgtctattaaaaaactaatctaaattttacatttaaatacttttaaattacaagatataaagtgaaagtccgcacgtaatgcgagtactcatcgttatataataacttaataagattaataatagaaagaaaagaagcatctacactgtcgttacaaatactctgacttaatacaagtattagggtatttattagaaggaaacaacaaaatcaacaacgtgaacgttctcaaatcagatgccataaaacataatgatggacctttttctcattaatataatggtttagcaaacattaatgaactgcaagtttgaccctttgcggagatctcgtaagtggtgccatcattatgtttggattgaaaataaaaactatgcatattttagcatgtggccacctttaacttcaacattggatgaattctacaatgcatgagagataagcttatgttaatgcaatatttatatgcaatgtagtgtggtatacatatatgagtattattgaacaataatgtgtaggctgatttgttttctttattattgttttgtcaatagcgatacatccatagaacaagtctcgaagatcgagattccattgaacttgtgacgtattggattaaaatatagagatagcatattactagcgatgattttgaaaatcaatatattggaaagcaaagaatgtattttgcggaacaagtatcgttaactataaaaatttgtctataaaggtgaatcccgtaaaactctaaagaaaaacattctctacatttcagtatgtcttgagcttcccaaaatttgtagatctccatcaattacctcttgaattgccaaggcaaaatcatcgactaaagattgattttttatcttgaattcccccttttaacttatagagagattctaagtgtctagtgggtgtaatagaccagcaaacatcatgtaattgaatcaagatagatcggagagattgagaattctcttttgtcttaaaccaatagtcttgatccatgaagccagtgaaagatgagtagaggtgtcaagcaaactggaagtccgtgagctcagtccaagcagtactataataagccgtgagcttaggacatctttttttatgcccatataatagcaagcctcgtagataaggataagccaatacaaattgcggattttagcagatttcatctgcgctgaacaagtctaaacatcttatttttgcatgcgatcctaacggttcagtccgtcgtggtttcacaaaagattaaagcacaactcgaacgcgaaccaacctatttgatatcttaaaagatgagccacaatgacaaacgatcggctcgaatgagaagatattgctttcatattatgatcggttgctctgatatcttattttaaacaaaaaaaaatcattattactcctaatctgtgaacactaattttgcgatataattttgtgatttatttgtagatgatctttcgagagaattaacacctctcttgtgatcttatgcaagttagtttttgaaagattctagaacgtctagtatgtgtttatatggttttaacttttaagactataaagagaattaaaacaacaatacattatgttctaaaacattttttgtaatgaaatatgcaaatatgcattgtaattaaaaaagaaaatcatattattttgtaaatgttttgagagaaatgactgttagtttcttaatctataaaatgtagttttaatatgaaggaaaataccacttaaaatacatattttaccaaaatatgtatttacataatattatggggaataaggcaaatgcattttatttttgtcattatgcattgcacatgcactcgttgttattttcgtggctgattagctctcttcatcaacagcaacatgcatgtgttatgttgtcacatttgcaatttggtcgttaaagttttatgtgtccacaaattaggagaatgagggttcctatattattttctttggataaccggtcaaaccacatctacatccgaagaacaagtctcgaagctcgagattccactgaacttctgacatattggattaaaatatagagataggatattagtagagatgatttatgaaatcattactactgctaatttctttatatgaaatttttaaaatcaagattactccgagtctacttttttgaattttcattgacgtgcattattaattagattagtggaatccactacgacatagcataactccttttgcattcttgtatatttaacacatttcactctttctgcctctatgatatatggattctggaacgtgaatctgcgaaagtttttgttttgaaagaaacttgattttacatccctggcttactactatattaaagtcgatttagtaactaagaaaccatgatgaaataacaaaattttgatttgctcagattcattatatttcttttttagaacagagtcccctgttttctctgtttttatactttttaacatcaagtatcaagttgatgttggtaggaacaacctctagctttgagcatccttttaaggtcacattttgcaatttatgaaggtttccaatagaagcgggcagctccactagactggtgcacctacaaagatgcaatttctggagattattggcactgccgatagagtaaggcagctccaccaaacttgagcatccacaaagaatcaatgtttgaaggttagtggcagttgagaaatcaggtagctcctttaagttcttcgaatggaacaaattcatccacttgaggtttccgagcgactgtacaaacaaacaaagaaacaaagacaacaaaatttaagaacacttcaaataatagtgttaagatcactcttcttttaagcctaaaatgtgtaagaacatcaaaacctactacatacaaattacaaacgaaatgaaactacagttttgaagccatattagagagaaacacatcacaattacataccagatttccttcccacagcttcacaagtttgctgtgtcgcatgtttagttcgacaaggtactccgtacaaaaattggaaggcaaacatgtcagtggaaaacgatcccattctagtaatctaagttttcgagatatatactttaaacctcgcggtaagtacattttatcactccggtcacacttgattcttaagaatttaagattagacattccttcgaaagctctttcacttatatttaattcgcctaatagctcagctgaattgaaatatatacctacaacacttttactaccctgaaaaaaaaatatcaaaattttcttttaatatggtatgttgtcaaatgaatttaatttgtaaagataaaggtaatggaagagttataatagaactaaccgtgtcatcagtgagtacttcacaaatatctctagcatcaaccaaaaattgacgcttcccaggctctcgaatggattcatgctcatgacatacaatttctctacccaacagttctaacagattatgcatctttatccatccttcttcaatagatatgagagatttctctgctaatacgtgaaatcgttgttttgtatccaagaacttatgtgtaagatgcgcttccacgttctcaatccttttattgttgaaagtgcatgctatgtgaaggaataaatctttatcttcacgacataaggcatcgtaactgaactttaaaatgctttgaatattagaatcaaggtgagtccttaaccttggtagtgcatttatccactcctgcttagacattccccgaaaatgagagcccataactcttagtcccaatggtaggttacctaaaagatttgtgacttccaatgcaagttcttgaaactcatctttagggaactttttaccaacagcagacatacaaaagatttggcaagcttcatgtgttgacggataatccaccttgtaaatatggttgatgccatgtgccttcaaaagtttttggtcttgtgttgtgatgataatccgacttccatgaccgaaccaccgagtttcttttgcgatagcatctagttgcattgactgatcgatgttatctagaacaataagtacttttttgtcattcaacctattttctacaactcctaaatgaggaacctcgacatccatatggttgattatttgagacataaactggttttgtaagtgcaactttgcactatagtcatcagaacacactggttttctatacattagctcttttatattctccataaaggcgcttagttcgaaactatcagaaaactggctaaacaagaatctagcaatggtggtcttaccaatcccagacggaccccaaatccctatcatcctcacttcatcagagtctaggcataacaatagttccatcctttccatatgagctcccatcccaactaattcgtcgaaatccctagatggtgtggacttattcaacttgtttgaaatatcagtggcgattttttcaatcatgaccgcctcattatccctaatagaggagggtcaaagacattaaatagtcatgaacattcacatacacattcagagtttatatgtactttagaaaatttaagaagagcaaatgaaaaatcataaggacaaaccagttgtttgaaacgtaaccggcaagtgttgccacttttgctagagcttgtatccatctcctagtgtcctcatttgttttaccagcacatgtttttctgaaaacactcccaaagtcaccagtcaacttctttatatcagaaggatcaactttatagaaaacaaccatcacagtttgaccaaactcttctctacacttgattatctccgctaattcatcaagacaccaagacgaagaagcgtagttcctagagagtaagatgagtgcaatcctagaacctctgattgctagtacaagttcaggactaatggattctcctctcttgatctcattatcattgaaaggtgtgattccttttctttgaaactccttttgaatatgactaagaaagctctacggacatcttctccgcggaagctcggaaagacttggtgtgtccaactctgagatggaggaactgatgatgaaggaggtaaagaagcagaatcatctttttctttgttatctttttgtaatctgaattttctaaaaagcatgaagaaacctattgcagctgtaacagtactaagaaaaaaagaagaagtcatttgtagggtgcagagaataacagaaaggttttgtgtatacagaacaatgactctctttgtcacggtaaaatacaaaaaagctcacccaccccatttctagatttgattgcttttaacgaattttaattaaaacaagagcacacagaatgtgaataagtggggaatgtttgactttaatagtgaggtttaggtgtgcatatgatatttccatgagactccgttctattaaacattttaagaggaatattaacaatagtaactagagcagcgtcacttgttttgctaataaatagcttcccaaggtatctaaaacattcattgattccgagaagttccattacacaaagaagactattcattctctattttcttatggaggattcctggttgatcttgaatatgttgaaccatatgcctaagacagtccacgtaccctataataactccaacaaaatgagaatactgagtcagtgatttggcttaaaacttatagcagtaataaaaaaaaagaatgaagagagagcttactgaattgttttgtggatagcactgtttctgaaaactcacatggatttcagattccactcatgactttgattatttcttctccttctcttcattgtcattgtttgtatttctctccatatctgcagttagtttcaatgagacataaacccaccatcacacattgataatcacacaaatgcacgtaaataaaatacaaaacaaccaatcaacttaaaatcattaattttctaaccttcatcaacgcctcgttgaagctatcatcataagcatcaacttgaagggacttccaagatgatcccgcattctcctatatcccatttgttactcattgtttcaaactcaaacatgagctcggtggaagtgacctcctctgcttcaccttgaaatatgtacaggtgctctgttaaaagtggatatatagtatagattcctggactatacggaacactgagaccattttgtttgtccatgatgtcaacatgtaccatcaacgaactcccatcatcaccagcttcatcattgtcacacttaatcagtacgatacaagccttaaatctcatggatgtagaaataggcctctcatttaacttgatggtcaaggaagctccagtagtagctcggtgagtgaagtatgcaggcacttctgcaccgggtaagaccgcatcattactggtcggtatctggatgatgaagtctctcgcttcttgattcagtttgaagcacttagcaaaattaagaagactcaagggattgttgtaagagcaatctagtgtctccaaggactcacaaccttcagcatttatgatagagagagattctggaagctgtgggagtgataaaagctttctgcatttgtagagtctaagtccatgtagacgagagatttctttgatccatggagcaacttcttgtatatcttctccgaattctagccacgttatgatgtctagaacatgcgagaattccttgagtttttcgaagtatgacatatgcaacacagtgagtctagaccaagacttgattgatgaaggcacttcttctactgcggttccatcaagatagaggcattcaatgtttgtggaaatctcaggaaaacttttaaactgcgagcaatcggtgagatcaagtcgttcaagagatttcaagttgatattgctcggaagagcctctaacttttggcatcttgccaaactcaaagtgaacaatagatgaaggtttccaatagaagagggaagcttcaccagatttgagcagttgcaaaggttcagctcttggagatttgtgatgtttccaatagatgagggaagttccactaaacttgagcatccgctaagatctaatctccacagattagtggcatgtccaaaagaagagggaagcttcaccagatttgagcagttatggagattcaacacttggagttcactgatgtttccaacagatgagggaagttccactaaacttgagcatccgctaagatctaatctccacagattagtgacatgtccaatagaagtagggatctccactagacttgagcatttacggaggtctaaaatctcgagattagtggcatttccgataaaggaaggaagcttcaccagacttgaacaattactaagatcaagattttgaagattaatggcatttcctatagaagatgggagctccaccaaactagaacaattaccaagatcaagattttggagatttgtggcatttcccataaagggaagctccactagacttgagcatccattgaggataaatttcttgagattagtgaacttcacaatagacaaaggaagcttaagcagccttaaacatccaagatccaaattttggagatttatggcattcccaatcgaagaagggagctccaccaaacttgagcactcattgagatctaaactctggaggccagtgacatttttggtgaaggaggggagctccaagatacttgtacatccatggagacacaaaacttgtagtttgccaagttttccaacacatgatgggaccttcactaaacttacgcaatatttaagaattaactcttcaagattagtggcagttgaaagatcaggaagctccttcaggcttatagaataactcaaatccatccacttgagatttctaagcgcctacagatagataaaaacagcatataagaacatcatgatacaaatagtcatgaacacacatataacacacttccatgccataactctgtaataactatagaaaaagttcacatataaaactagaaaccatattttgctttttgagctaaaatgttgtacattagtttcgaaaatatagatatgaaaaattgaatattgaaaattacttactttgcttccttcccagagtgtatgacacgtgctagaaggcatgttaagttcaacaagaaactccggattaaaagtagaaggcaagcataatctcctaaaatttatccaatgcagtaatctaatttcttgaaattgatagttcagatcttgtagtgcattcactgtgtcgggatgagcacaattattatcagaagatcttactactgtgagattcgaagaatgtcgagcacaacttctaccatcaaatcttatgaattggagattagacattctttgaagacctttctcacttatgtttgtaacttcctccccattcttagataagtcaaaatccatccctataatacgtcgactactatcctgaaaaagagccaaaagatatatataactagagatgcttaattatcaaatcaacttaattcaatgaaagatggaatgttaaaacttaccattgtctcatcactgagggcctcacaaatctctctttcatcaaccaaaaaaagagattttctagggtcattagttgattgtgtatgagctatttctctacctagttgcactagcaaagtatgcatctctgtcgctcccgtgcctatatgtatgagagatttttcggctaagacataaagcccttgcctcacatccaagaacctatcagcaagatgtttttccaccttcttaatcttttgatagttgaaaaagcaagctatacaaagaaacaaatctttgtcttcatgacttaaggcctcgtagctaaacattaaaatgctctcaatttttccatcaaggcatgtccttaaccttggtagtgtccttttccactcctgcttggacattcctcgtaaggacgagcccatgaccttcaatcccaaagggagcccaccagcaagctcagtaacttcccgagaaagctcatagaaaccattatagggatgcttttgaccaaaggcatgcatacagaagatttgaaaagcctcatcagttgatgaaaattctactttgtaaatatggttgatcctatgagccatcaaaagtcttagattttctgttgtgatgataatccgacttccaggaccaaaccatctagtttctttcgccaatgcatctagttgtcctaactgatccacatcatcaagtactagaaacaccttcttgtctttcaaccgttcttgtgctactcctaaatgaggaatcatgatgtctttctggttgatcatcttagacaacattttgttttgaagttgcaactgtacactatattcatcaagacaaggacttggataacattctttgatattcaccatgattgtgctcagttggaaactcttggagacttggcttaacagaaacctagcgatagtggtcttaccaatcccaggcggaccccatatcccaatcatcctcacgtcatctaaatctaggcgtaacaatgctcgcatattttccatatgagctcccattccaatcaatgcttcgaaatcccttgacggtgtagcattaatcaacttgtttaattagaatattccaatcaatattttcgatcatggccgcttcattatccctaacattggaggacatcaatatgtcagttaattagtctagtcatgaaaagtatcatacgcatccaaaaacatatgtagttgcatgtcttgactctttaaaagctacaaacaaatatagtttaatatgtttttaaatatttaaacgagggcaagtagaaatccaaagggctaaccagttgcttgaatggtaaccagcgattgtggccacaccctccaaagcttttctccatctctttatctcttcctttgttttacctttgcaagtttctttgaaaaccttcccaaaatctccggtctgtttctttatatgagttggatcaacttcatagaaaatggttatcactatttgacccaagtcttccttgcacttcataatctccaccaactcgttcatgcaccacgacgaagaagcatagttcctcgagagcaagacaatcgcaatccttgatcctctgatagcttctacgagctcaggaccgattgacttactcctctcgatactattatcaataaatgggtcaattccctttcctctgaacgcctctaggacgtgactaagaaaggtttttcgaacatctgccccatggaagctcgggaagacttggtgcttccaagttcgagacaaagaagatggaggaactgatgaaggggacaaagaagcagaatcatcttctctgttatcttgttggaatttgaatttttttaaaagggttaagaagcctattgcagctgcaagagtaccaaggaaaaaagaagaattcattagtaaggtgaaaaaaggatctaagactaagcatacatggtagaggaaggattaacaaagagacgttgtgtatattgaatacagatcgttgactctgttggtagagaaagagaagcttcatggctgttacctttcaccataaaaatttatggaaaattttgctaaggacaaatcgtggtccctttcatgtagggctccaccattcatgtaatttacttggaatccaaataatacacatcatattctcgattatatactaaagaagtcacgagagaaattaaattacgtattagtcagcttccaggatagttcatacttcatactacagagcagataagtcattcctactttgcataagacagttccagtacccgataaggctacatataataatagctccaagagaatactgagttatttccttaaacagtgatttagctctaaacttgtagtaatgtgatctagttcatcttgtagcaatgttttctagttcatatagatgaagtctaacagttcttacatttaacaatagcaaactacagataaaatcaagtcatcaaactattgtcatacaaattcttgaaaattatgatgaaggtaataataagataatgatacttcaaagaaaatgtatcctcaatatcaaaatcctcgaacacaattaaaatgtgaacacaaaagctgagtgttttagtctgaaaacagaaaatttgaggcattaagctcaaaagataaaaaactacaagaggcatgagataaagaaggcttgactgatttactcttcatcgtcctcatcatcatcatcaccacctgctccattcaatgccttgactctctcgatcaacttgttcttcctctcctcgtaagtaagtttcttcaagttgtacctgttttgttaaatggaagaccaaatgagacaccaatacaccaacaagacaagaatatagatagactagattgattctgtttccctacctcttgtgttgcttgggagcaggtttcacggttttctttgggttggggtcagcacgaatagctgcgtgaaccttcttgtacaactcctcaatgctctcagcttcaactcctttcttgatgtaagcactgaagtgagtttgtaacttctctggctcatcttctcccaacagcttcatgtagtttgagacatggccaccatagatgtagttcctgtggatttcagcatcaagttgcttgttctccttgtggaacccagcaaatctcttgtcactgtgagggatatcaagaccaccatccaaagcaccctacagattcaaacagcgaaccaaaaggatattaaagaattgccagtataagcatttgctcaagaagaatgacaaataagagcactcacaacaaaaaaagagaaacaagttaataccttaagagcaccgaacacacggtttcctgttgtggtcctgataagtccaacatcaagaagagcacggaaaggtctccttgaatcagttggctcaacggaaaagtcttctccagtggcctgattcattgtgtgacttgagtttctaacaagagacaataacaatgcttcttattatcaagatgaaaccaatcacacaacatacctcaacgtttccctcatactcgtcatccatttccaacatctttaaaacacggcgagccaaaagaaggccagtacagtaagctagttcaacaaaaaaaaattacacataagtaagccataaagacagaatcaaccatattaaattggaaaacaataccagatgacacattcaatacctgcagcatagtttgtaagaccaacagtgagaccatactgaggcagttcatgtgcgtaagcagaagctttaacaatgtcaccagcaatgcttgcagatacaatctgtgccactatgtctttgttggtaaaccggacaacaaaacgatacttaggagtattgtacttgttcttgtcttggttgataagacggatccttgccctgtagtcagtctttccatctacacaaaaataaaataattttcagaaacagattgaaacaaagagagaacaaacaatatcatcagaataaaacgaatcaacaatctattacctcttcttctcctgaacttcacttggtacctcttgaagtaagcattcgacttggtggacttcacaaacacctaccaacaacaaatcatcttattttattagtctaagatccaacaatataaaggttcttcgatggtaacaaagatctacggtaagaactccattgaatacgtatcagtgacctctaaaacagaacaaaagcaaagtctcaaacttttcctatttcaattctcaagcaagttataaaaccaaaaacccatgaagaaaaacatctacgaaggtggatagaaccataggatcacgaattctcgttacgatatctaatcaaaagcaatgcaggagatttctatatgaaatgaagatcaaaacccgattttcttaagagaagattaagaagaaacgattgagaaatgagaagagatagagattaaagctagggtttaccattgtttgattcctctagcaacgagaggctttgctgtgagattgtgagtgaagagaagcaagaggcggaatgacctaaatgcgacatcttataagacaaaaccctagaaaactcctcgtgggctgaaaaatgttaatgggctttactagttatattattaatgggcctatgggcttttacattcacactccaacgaaatccaattttctactgaaatggtctcctcctctcctcgtttgtctataatccataggaacatttctcttgaccatcttgatgcaatgttatttctttgatcttctcatctacgggttcttttttgcttcctttgtttcatataaccttaacagtgaccaacttcaaataaactttgctctattttattggttctgtttcaatcaatttgatctacctctggaccaatatcgagtgaactagccataaagtagttgaaacgtaaggttgcaactctatgaacgtttctggatatgtggttaagactttttatttggtgaaggagtaaaatgtgtgtttggccaaatgagtaaatctctatttgggaagataacaatgatttcagtatctcagccaatccaaatgagtggatgttttgaaacagtttgctattcgcgggagaatttcacagcttcaatcacagcagagaagtcgagatctcctagtcccaagcttctcgccttcttaaaagcctgtcgagaaccgaaacatatattttaagattcaagctaagaaaccaatctagaggagggagagccaatatgttattgtctctgagtaactaactaactaactgacctcgtttgcagccgcggctacaggcatggaaaccgcgttttcatcgccaagagcaagagctagcctcatgtctttctgctgatgtttcaatggaaatgctggtgggtaactactcttgttcattgaaggtcctttccccttgaacatcgggttagtcattgctcccagatcctgcccatagcagaaaccgattcaaaccaacaccattatttcagagcttgcaaaagtttgatcacctcaccagaatatccaaaagagtgtcagagctaagtccactcttgtcagccaatacaagcccctcagagaatgcattcatcatgctgtatcagacgaaaaacaataagatcatgaagccatgttccattcctactactaatggtagtaattgtaaaagagacgggacattcaccttcccattatcatgttcactattagcttcattttagctccgtttccaacttgtcccaagtaaaacgatctcttccccaagacatcaaaagctgggattgattcctcaaagagtgccttacaaaaaaggattaaaacacaaacggattatagccgcacatcgagagctccttcctactaagtccaactaaaacagttcttgagatctatcaatcaatccataagtacagttttgagttgtaccttgtcaccagcagcaaggataatgagttggccatcttcagctggctttttgctacctgaaaccggaccttctacgaaccgaccacccttcccggtgattgcctaccaatgcgcaacacagctcaatcaaactaatcaaccttcttctaatcttatcatcagcatctaaagtacaaaagattcaacctcattgatcttcaaagaagtctctgcatcaacagtcgacatatcgatataaccttttccttcacatatctgctccaaaacaccgcctttatcgaaaacaacctaatcaaacaactacttcatatcattcatcaccaatgctaaaacacacacaaaagaagcaaaaaaggatttcaaataccgaaagagcagcacaaggatcagagagcatagcaatagtgtatttgcatttcttgattacttcagctggactctcacatactgatgcaccatgctccacaagctcatcacactgtcacaatcatcaaaaattcccaaaattgcattaaattactcaaaaagtttccgactttatcagatctgaacaactaaaactaaatcagaaaaccataataccaaaacacaatcaaagacaaaaaaaaaaaaaaaattaccttggagagtgttctgttccatacagtgactttgaatccattcttcaatagattcattgacatggcttttcccatgattcccaaacccagaaaccctacttccattttatctatcttctgcgattatagtgcttacttactgcttagtgatgatggtctgagaatgataaagccggagccttttctaatcagagaaccattatcatcaaatacacttactttgaaaaggaagtatttacagtttactccctacagtttgattctgtttgcatctctaactgccagttatgaacgaacaggatttcgccacgtgtttgaaataagagggattttgggttttgattgtttctcgaatatttttggtacgatgagatatcatatttctactatatacataaagttaaataatctaatatagttcttcagcatattcatgttctctaatgactaattatatcataatcgtaaacttacaagtacaatgatgaggacggtctcaaattatatatacttcttgttcaattttagtgttaacgtagattttttttttaataaaacaacggtgatttctagatatacagagaagaataatgagaagacaaattgatcttaatttgtaatatagtacttattagagacatgaatattatattattagtttgcattattgtattaccatcatcgctgaagaaaggcattactcaacacatctgtctaactgtcttagtaatggacaactaaaccaacaaaccaacatataagtctgaaatgtggccttcagattatttttatactgcgtggcctaaagcaaatgcttcacctgctttattgatgggcagtgcctgctggaatcaacatatttttacaaagaaataaaaaattcaaattgatctcttcacgaaagagaaagaaaataaataatttgaaaatttgaaaaagaaaataaagcttttagaaaaagaaaaaaaatagtaatagtttttaaaatgctatgaattaaataatataaaagatatggatagtataatttcattactttcaagaaaataattgaaacgcagagaaaaaaaaaaaaaaacaagagcccatcgagaatggatcagtaaaaaacctaaggcctatctccagcaagtgcaacttacatacattctcgaataaattctgatccgatcaagaactcataattattgtaacagataaaatcaaatttgagagatctactactaaatctaacttaaagcattgtactttcttttatctcattctcctttgctctgctttcttctggtcaacccccacgagattccttcttatgtgattgtaaagagaagatttttcagagatgggtctcttcgaatcggtgaaatcaatcgattgggaacaagaatcgttcccaacttatcaagatttagggtttttgcctctctttgcagtgttcttccctacaattcgatttctacttgacagattcgtcttcgaggtaatttacttattcatgggattttagatttgttgtttcttcaatcgcatttattgttgtttcaccaaccaacccaaaaaaaaaatattactttcggatttctactttttagttatgagttatgacccttgagagaccaatcattagtcttgtctctctgtatgattctgctgatgtttagattttgtctgaaaataaatgcaatgtatatgaagatattgtttggtaggtgaaagcttacatatttgtttttattggtgtttgtagaaattggcaagtcttgtgatctatggaaggatgagtacgaataagagtgacaacataaaagacaggaagaaaaatagtccaaaagttcgaaaatttaaagaatcagcttggaagtgtatttactatctatcagctgagctacttgctttatctgtcacatataatgaaccttggttttcaaatactctctacttttggattggtcctggagatcagatttggcctgatcaaccaatgaagtaagttgtttcgttatggtcatcgatatcttttgtgatggtcatttgctaaaatatgatactgctatgtgtgcaggatgaagttgaagtttttatatatgtttgctgctggattctacacgtactctatattcgcgttggtgttttgggaaacaagacggtctgatttcggagtttccatgggtcatcatatcacaacgcttgttctcattgtcctctcctatatctgcaggtacgtatattatacacttgtgttgtggaggaaaggatacactgactcttgttttgtttttggatgttgatgatatagattaactcgtgctggttctgttattcttgcacttcatgatgcgagcgatgtgttccttgaaattgggaaaatgtctaaatattgcggagcggaaagtctcgcgagcatttcgtttgttcttttcgcgctgtcttgggtcgttctacgtctcatttactatcctttttggatcctgtggagcacgaggtttgtttaatatccactttagcgtttgttcttgaatgttttttccttgatgtatatatattgtggggttttgatttgcagctatcaaatcattatgactgtggacaaagaaaagcatcctaatggaccaatcttgtactatatgttcaacacacttttgtatttcttgcttgttcttcacatattctggtgggttttgatttaccggatgcttgtgaaacaagtgcaagatcgaggcaagcttagcgaagatgttagatccggtacgcaataaaaactcttattacaatattttgagacaaaaacactctattaataatgttcatgtctttttgcagattctgaaagcgatgatgaacacgaggattaatcgcatgttgggaatattagtagtgcacacgctctatatctcatgaatctgaaccacacggagactaggaatttcaacatcaagtaggatgcattgcagtatttgaacagttggttcatcatcttccagaggatcgtaaccggatcaaaccgttttgaatgaatcggtttctcaatctgaatttttgagtttattgttttctctaaagtttgagcaaattcaagattttgatcaaactgctccacgttctattgttttttcttctataatttttaatttacgcttttgcaataacacaattccttgtatcattatactaatgtcatctcaaaattagctcccttcaacatctatgcaacagactaacaactaaatgaattttcttggggttttttttggttcattgcataatttgataaaatccaataaaatacttggaaaggataaaagaagaataatttttcataaatgaatgaaaaaaaaatcagcatctttaggcgcacaatagtatcgcacgatagcgacgcacaatagtagcgcacgatagcggcacataatagcgacacgcctatgggatttgtttgaggttttagctttctcgctgtcttggccgagaagactgaaaccaattgcaacaaaaagaaagataaaaaaaaacaaaaaatctcttctttgttcatcatcatcgatcgattctactgcaacaaggtacgtctttttcacttccttctctgaacaaaactctaaattttgttgcttttttttttcctgtgtcgtctcgcgctgcgattcttatacatcttggcttcaagtgatactttgcttcccaactcttgaaatgtataaattttgagactttactggagattttgagttgggattgttttcatgttcttaaagattcgagtttcgatctctatatgattcagtagattgtaattttgaatcggatgtctggaaaagaattgattttatagtctcttaggttactttaagtagtactttgcataagatctgtgatttgatgattgttatcttttgttacattgctggtggagtataataagatgagcaagaaccaacagaagtttgcgtttgatttaggttatttagcaactagtcctgttttggtgtgtttctaatctcactcactgggtctctcttatgtggaatataagatatttgatcctacgactgttagtgctttcatgctgggtttataatatggatacaactgaattcctggcattacattttttgttcagaaccaatgaactgtttgtttaggtgtcattgttatctaagtgcttgcatccttcttctgatgtgtgtgtgtcttgatacaggtctgtgagattttgataaaagctaagatatggaagatgtacttaccgagaatcctccaccttcaagattcttccaagaagatcttaacaactttgttcagccacctgaatcccttccatctcctttcatcatattctcaaacccgaaacctgaacttcctctccgaccatctctacttatcatagccatatcttcaccttccctctatattttccatagtttaccttcaaagactctccttggaagtctcatcatgcctgaagttccgttttctggaaacaccatggaaccttctttagaagacaaatcctgcaacatatattccttgagtagtgctgatgataaaaacttgaccctcctcgtctctgttcagcttcctgtatctcctgaacggtctaacctagtctcgagattgctcattgccaaagacattatccccgagcgggtgataatcttggattccattcagagccgtaacttcagaggtagactctcaccagacgaaacattggcagccaaactcgagacatctgctgagaagaaagcaacaactcacaccggtttagtgaatctcgattacttcccatcagggagtgtaatcgacggtctgagtgcttcacttttgagccggtgccagctaaagaacataagaggaacattggtgatctcatggcctgagtttggtccttcagtgataagattcgccggagctctgctgaagaaaattgtcccgagtttggatgttgcgagtgtgaacaaagatctggagaagaattcttcaagaactggtcttaaaaaggatacttggcttgactctgatctatatacatgattcagagacagagtaatgaaagcttctcacttgtttcatgtttctatgcttactaggaaaaaacagagaccttatttacgcttgtgttgttctcattgcaaaaacagttttgtttcatttctacattgttcttaggtatgtgaggacttgtgatttttcttagtacacacaaattattgggctaacaacaatttagcggagtcgaactcaagtgaaaaatgtggaaccacttgactgaagacacttccccgttttggttacaatctttgtaaaacgaaacgaattttcttcatcccaaaataagccaacacatatcatgggaaagattgcttcgtcctcttcagagagaggaagaaaaagaagaagtgaatatcacgcaagagatattgaaagagaaaccgaaagaagaagacgaagaagagaagaagaagcaggagatgatcatgcatcatggaagagaaagcaaaagaagaagaagacaggttattaagataccaaacgacgatgtgttggaagagattatagtaaggcttccagtgaaaaccctaactagattccaaaccgtgtctaaacactggaggcatacgataaagtctaggtaaatcaggaagaaatacatgttgcatcagaaaacaaaagaacccaaatttctctgtctctatgaagttagaagaaacgggtctaagccaagcattcgttacaagaccatgaggttggagtggtctttgagtcgtctagtgggagaagaagaatatttaactagcaagaaacacaaagagaggcggatactattttccaagagtgtggatggtcttttttgtttatatagtggtgtggacatgaaacagccaattatggtgataaatccagacacaagatggtctaagaagctccctcttgctaggattcaacgaaagaattatttagacagcaacaaggtagagttctctcgcctcgggtttggaaaagacagcgtcacaggaacatacaaactagtgtggttacgtaccaaaacaaagaagaaaataaaagaggaaacctcatcgacgatgacatgcgaggttttcgatttcgtttctacgaaatggaggcggtgattccacctcctcctaatcatgggataaagcatgagaatatgtctttctgataccaaaacctgtacaagatcacagcatacaacaaaatacacaatcttatatatgttttttacaaacccaaagccattcatatagtttctcttgtcatcttggacctgataactccatggcttgaaccagcaccgaggaatcatctgtaagatccgaataacgttcagaggaagaaaactcgttaggtttactgtaacttctattggtttctgctctctgagaagaagcttcccatttctcaacaagaccatcgccttcaagcattctcacaacttcagacatcttaggacggtgaatgggaagatactgtgtacaaagcaaagccacttgaaccatttcttccacttctattctatcgtagttgctcttcaaatccttgtctactatctgttctagcttcttctcttgttgtagtttctttacctacaagtaaccccaaagaaaaaaccctagaagtgagtatttttaagctaactgaaacaagaagagaaaatgttttactcttttacttcttacccaatcaagtatcgctcctctttggtttgctgcttttccgaattcaagagctctcaatccagtaatcaattcgagaagaagaatcccgaaaccgaacacatctgtcttctcagaagattgtcctgttgagagatactcaggtgcaatgtgacccactgttcctctcacggcggttgtcacatgcgactcctcatgatccaaaagcttagccaacccgaaatctccgacaacagcttcaaagtaatcgtcaagaagtatgttcgcagctttgacatcacggtgaatgatctttggatcacattgctcatgcaaatacagcaaccctcttcctgctcctaatgctattcgctttcttgtgccccaatccaataccggtttagctgcaaaccattcacacgaatcgtaaaccgggtcaattcatgtaaagaaatcaaaatcaaggtgtttaattaactacctttgagacgagaagcgacactgccattggacatgtaaggataaacgagaagccgttcagaggaagtagtacagaaaccgtataagcggaggagattccggtggacggcaaggcttatcatttcaagctctgtctgaaactgaacctctccaccaccattgtttatatcctttaatctcttcaccgcgatgatacttccatcatgaagacaacctttatacacatttccaaaccctccttttccgaccagattcttgctgctgaagttactagttgcggattgaagttctttgaaattaaacctccttagattccctagacacatttcttccttgttttgctctgtgtaagacccaaaaattcacacactcacatttgtctggtttcacattcaacagttaacgaaaagggattaaaaatgtcattgtgggtcttaccattaatgtcaaagaataatacttgtttgttatgtcttcttctccaccaaagaagaaaaccaaagccaatgatcaacaagcaaacacatgtcaagcttacaccgaagactaccgcgattttccggtttttagttcctccatcagatgatttatctaacaacaacaacaacaacaagaagaaaagaaaaatcagtttagatatattctctaggattcaaatattactttaaaatattgaaaatttagatattactttgagaactgttcaaggtgattgacattggcttaggctgagtcccattacagtctttctcagttcctgttggacaaatctgagaattgcccataacactgcataacaagttaaataaaaactatataatataattagggtaacgtataaaagtggataaattacagagaaaagaaaaacacaattacactgttactttctcagaacagagtaaaacagagcagacaaatattctttctcgtaaatagacttacttgaatgttttggcaagtgatcttggaactggtccactcaagttattatacgacaaatccctgaaaaacatttacaaaatatatataaacacagatttatatatgtaaaatataatttaaagaagaaaataaaagaaagagaatgtacaaaaaagtgagttgggtcatgtttgccaatgagctaggaattgttcctgtcaggctgttattattaaccctcctgctccacaattttcaacacaaaaataatctctccataaataatttatataaaaaatatgataaaataaacaaaacgaaaaaatggataaaatcatacaagtactgaagatttttggagtaagaaagagtgaatgggatttgaccagtgaagttattggtagagagatcaagtgttttgagtttcatcaatttcccaatctcatgagggatgtttcctgttatgtaattgttctgcaataacctgtatctccaaacaaaattattagaaaactaaagtgattaagagatgaagaaacaatgttttaataattactacaaaacatacttacacagtttgaagatttgttaaatttccaatacttgatgaaagagttcctgataagttttggcttggagcttctctacatacacacaatagtaaaaactgtaaacacatgattacatatatgtgtgtgtgtgtgtgtgtgttggtgtgtaagtgcttacagccttatgacaaaaccatcagaacaagtgatcatgttccagctacatggatcaactgctgtgtcatcccaattcattagaactccatgaggatcagtcagtgagcttttgattcctattaaggcaacaactaaagaagaaacaaaaaaagaaaagcatgttttaggaagaaaaaaggagaaactgagaagtgggggaagattttgttgatgaacattaccttcaaagttaacacctttgtctgtgagttctgcagaagaagaagaaagaaaacagataaagaagaagaagaaagttgaagagaacaaagcataactcttttttgcttctcttcttccttgcaacatctttgtccgaatcaaaacttgtttttcttgagagtattaatctctaaggtgcagagtttgaggtttatttcttttgtataagaaatattctttttttcgattctttgtttggaggtttttaagaaaaagatggaacagaggattttgatttggaagtatttgtgagtgagagttaaagagggaaagagaaagagaaagatttgtctgccaattatttatctaatggtcctctagactgtaaactggaaaaggccagagacaaaatcgggaaatgtttagttttcaatcatgtgataaaaaaacagaattctataagatttttatggtttatatacttcgcgcacacaaaaaaaaaaacttgatttatattaagttatctacaaatatgggtccatttatttaatttcgtctctcttaccagaattcgacttcgttttttacatatatgagaataaattattgaaaaaaaactatattgtagtgcttaaaattacaaaaatgcaaagatggtttactatacaatcgtagacacaaaacaaaattggtgaaaaaaaaaaagacacaaaacaaaatatatctatatcataaaaaatatacaaatgagtttaacaatgatgaaatattacatatgtacgatttttttggtttaataaataattttgttttcttttaaatcaactcattggcaatcgactgttttcaatttcaattatgtatatttgctttgaagaaaatgtatttttctagacaatcaactgttttagaaaaacttaagatttaatattgaaaataaataattatgtgaaatgttgtattgaatgttgcatagttatactggtacatggacaatggtgtgagctagtggatttaccagccttgctctttaaaaagggatgatgctaccaaatcgaatatgtactaaaaacaaaaaatcaattaatatgttttttgggttataaaatcaatagatatgttacttactctttagacttttttttgaagtaatgtatttggattcgaagacctggttgtgttctaagtctagaggattaatagactcaacctgttctcggatgtaggaaagcaacaaacgataatcaattagacctaagataagccttcataaaaaaaaatacatcatactattaatcaattagagcaggtgaaaagtgaatttatatggtaagcactaagcaccattaatctgttattaataaagcatttatattccgggaagaataaccaagtggcctcgaagtgataaagtgtgaaaattattgtgatgtaacgcaaagttaaataaactgtgaattataaaattataatagtgggacactcgttgtgtcgatgagatatactgtgagtctgtgacttagaacttttctttttcttttttaatgactccctttaactctgtttttattcccactcatcacagttaatatatgttaatatcttcataactattcattaattatattaagatatttgatcctttttctatctatgctctaaattcgtgctaaaatatgttttgtcaaccatttgaaattaaatatcgtttatcaatgttgtttgttgataatataacatgtgctttcgccaaatggatggttttcttttcttccgaatgtgacaatgtcaattggatattttaagcggtggaatattagatggtactttagagggtagaattagaacttgataagacggaaaacatatgatcgaaatgaagttaaaatgagaaaactacaaaactcgaaattccaaaagaagaaataatgattgagagcttaacatttggtctaaaataaaagaaaattgttagagaaaacaaaagtttgaaaagaacttaccaaatgtagtacataatagttatagttaagttgatcaagaaattaataatgatgcgacttaatgttataaaatagtgattttcccccattttgtctttcgattaacatatatggaaatttgatatttttttctaccatgttgttcccaatcggatgtgcgtatattattattttacatgagtctagtacttcattactttactactgcacaatgaaaaaatgattgatgaagaaattattggatcgagcaactgctaagcttatatacaaacacaaaaatcaaatctttgtctacgcagtgattagtcaacagacaagccactttttaaaccacaaaagcaaactgctttataaagcaaaagctgttctcctctatctttcatcattactctaatttcttagtgcattatcatttatttcatatactacaattttattttggtttttttcgggataatgtcatgatttgtatgtcgtgtgcatggatacacgtgtgatactaagtattaacataacaaattgcttatttcttcttcatcatcatcgttttctttgaccacgtctcatgaatttgcaaccgcattgtaactttgtatgcataataatgagatatcaagattgattgtacttgatattagttttgtttgaaatctctgacagttaaaaaataatagtgactgactgatattaattatgattcgttgattattttgttataattatctgctcgtctttcgaataaaactgtattagtccatgaaataaatcattaatgaaattttcctctataaaaacaaattaaaggaaatatgaaatggacttataagcatcaaatatatgcataagaatgatagcaaccggaaaaaaaaaactctacatcaaaatcagattgcacatctctagttatgaacatatatagccacatcaaaatcttacaatgtaaatggttaatagtataaaaatcatgttattgactgtgtcatgtacatcttatgtgtgtcctaattttctatccaatttagatgaattctttatggtttcatttagcacaatcaaaagaaaaaacagaattcacgtataaaaagaaaaagagaaaaagaaaaacaaaagtgggattaattagcagatctcccactgataaaagttctataccctcaaatgagtgggaaataattataatatagtttttataatttttgtgattaaccttgttttgtataatttaaaacctatgttttttctttgaaaaaaagaggtcataatattattatttttgaaaaaaaccagggtcataagatttgattcatgacattgtaaaagatgttgaggtgttgttgcaattgtaatctagttcttggatatgtctggcattttattatataaatgtaacaaactaaaagaaaaaaatgcaattaccttacaaattataaagttataaacgattgatttttcgtacgttcattgagagagatgtaaaaagtaaaaccccacctcttgtcttttcaatcatatatgttctttacttgttattcatttcattaccctcacctttttttgttaccatacctttatttgcacaatgatataattaatgaactgttgggaacaaatcccatgaataatcgactggtttgagctcgcataaccaaagcaagatctagctgcctcgaaattagcattcacttcccaaaaagactcattacagattatatgggaactagactcggtaacatgaagcttgaagaccaacaattgaatgtactaaagaccactgcttgataagttaaagtcgtcaggtaaggagaactcttagatatcttattaggagaaaccattgagagaccaaaccaacttttttttatgtcaatcctagtgtagacacttgagttatagtaccaatcctatacattgtagctggacttgttagatttttggtatatgcctaagcaataaagtgtcgtccaagttatgaacgtacatctttttcatgggtctccttctattattctagttttgattccataatccatattacctcaattgtgaccacaagagaaatgaaaaacaaattaaataagaaaaggtagaatatgttcttctataaaagttggattcaccaaatcaatcaggacaactcacaccttatatttattttttcttgattttctttacatagtgcatatatgatggacggttacatattttagactatgaatactacttgtttaacattcctattatttttattagacttactagttactaccaatggtaaattttgtttaagactgaaactaaaaaaaaaagttacgtccaggaatagaatgttaatgaaacattgaaattcacctaatataaatgtaaaaaaacaagatatatggagaaacaaaagacaaagtacgtttcacattaaaaacagaacaaaccaaaatacattttcatattatcgacattaaagtcggcccccctaaagatccttcaggttaaataaaaatgaaactggtacatgcatcaaatattttcagcgtcatatcattgataaaagttgtgtctggctaaaaccaattcgacattactttagtatgattgtattactcatcaaaaaggtcattttcttagactttgtgtatacatcgttgtctaatacatgttctttgtttgtgtttttttcatactattacatgtttcttgttttgacatcgtactattacatgttcttatatcaataaatactactatatattcagtcaccaaaattaacatagaagattaaaatttataagcacacaagattaaaagttatccaaagcttaaacacaacaaagcatagaacataaaatatttatggtgcagcaaccagagaacataaacaagaaatgctttcatcagaacatcacatgttctttcttattcgaaaacaaaacacaaaagatctttacaaaaaaaaaaaactataaatccagaaatagatcactcttcttctttaatcacttcttctaacagaacccaagagtagattttggtgagcaacattcaacagtcttgacaaatctctggtatagaaccgaacctccaagtccaagctcctctagttctctctcttggctaaagtatccgttcacatcagctacacaatcagacgccaatacctcggttccaagattagcatgcaccgctacagaaaattcttccggtccaaaacaaaccagaaccctatccaccaactccttaaagttcaaagcctttagatcataaccaactgtttcaaagcttgcatagctaaaaccatcttccggggtcacatggatggtagaaaccgcatccccttcaatcgaattcatcgagtaaccgcacggttcaaagttaaaatcacagatttcagagcctggaaggatgtttctgatcccagagctaatagtcatctcagaagctgaaacagagttggttttaaagaacaccgaagcttttatattgtctagaccagtcatacacatctccaatgtgtacacgggtttatcgcaaaccgcagattcttcagtagaagaagcagagtaaacatgccatctctgagggttattatctgaacctcccatcacaaaagctttgcttcctgcattgagcttaccaaaatagtcatcaagtaaagcaacttcctctgagaagctacggtgagggtaagattgagctcccggaaaaataaagctaccacgagtgtagcgaacagatttgacagtgaggcaaagtgaatcagccagcctaaggatatgcgggatcgacaagagaagcttagtagtcccgcatgttttgatgatgatcttgtaaggataaacaaagagactagattcagagagcacgtaagagtcaacgaaagagtttgtgagagaggaaacaattgtgcactctgctggagtcaagatctcatctaactgggatttggtaagagaacgaagactctttccttggggatcaagaaagtcagtagtctcaaagaatgagatttcgagccttttctcaaatccttcgaaacctgtagcagagaccgccatttttcaaaaggcgaagagactatcgaaaaatgagttttgaaagagaacaaaacaagaaaaaacgaagatttatcgcgaacattgatcaaccacagttagtaagtggttaagaagaaaacgtattgaggaatatcaggatggttttccagtgatctacataagaaaaaacaaacaaacataagttaacaacatgtataagaagactagaagagaatcaacaacatagttttaagacaatacttcaaaaaacagtagctaaactcacgtttgagtaagcagcagatctgaatttcttgattccaccgtttggtctaacgtcttcaatgctgtaacgaagaggagcttcgaagaaaagactgtccctactactactattactagacttctttttaccacctttagtctccatttctcattcacctgtgaagaacagagcaataaaaagccagaactctgtttcagagtaaggcaaaacaattgttattaaagcaaatcaaaaggatctaacttgcttatatgggtaatcaaattccgacaaaaaccctaataaaaaattgagaatttacttgaacaaaccctaaaaacataaaaggcgattcattgaagaaagattacttacaagtcaagaaatggattcttttaagttaacgaaccaaacaatctgattaaaacccttgagagcccaaaacctgtaaacaaacgcataagtatcgatcgaacacaagagagaatgatcaaagaacattttcaatacaagaaatcaaagaaacaacaatcagagatttaccctttattagattgaacacgaaaacaagaaatgattataaaaaaaaagatggaaatttatcttttgaagtttgagtttctatgaaaataaacagcacaaggggttttgatttttatagtcagatgctagtggattgaaatcatagaagaaaagcatctcacttaatttgaaacaaaattgagtataaaacaatctaacatgcatgaggcgtgatacatttacaattcacaagttagataacgtcaatgtttaaattgcttgcaacactgttgttgacagaaaatgaaaatgtggttagaatatattcaaaagaaccaactttttttgtggatacatccaaaaaaaccaactttcggtttgttcaaaattccacaaataattaaaatgccattggcatatattccttggacaaaagctttttaaaacatgtatgcaccagattaggaccaatgccatataggatacgaaaacacattagaggttattattaatgtagaaatcttaaattagtacatatgcggagtggtggaattattatgtaatctcgcatcatacggataattcatactattagcaaacaacttcgatatctaatatacatataataggtattcttaagaaaagtaggaatgtgaagcaaagctcaaagaaatcaacaccattcgcatatttttaggaaatgagttttagaaggaaaaaaatttgttctacaaaatgtacaccattttacagtttgtttgattcaacctcatgaataagaaatctcaaattaagcccaagatacaaggaaaacgcccattagttaaatgaagcccagaccataacaaaaaaaacacgtgattaaaaagcatgtatagagtctggtgcgtggaagacaagaaaagcaaaaattctgtttagcagacaagacaagtgtcaaattatcattcgagaatgtgagctccaagtttagttagggttttgtataaatattgtacacactttctttcattcttaaaaacttgtgagaaaagtattgaatcaagaaaattgcttcttatccgatctctctttcttctcagtcatgatgaaacaatatttgttcaagatcgccgatctcttaactgctcctgtaaccattggtgttgctcttgcttcagtggctgtcgtagttgtggttcagcatcgggaatttctcatggagatagccatgaagaagaaggagaataaggcggagaagaagaacttgaaggaggaagagacggtggagaagtagtcggcggcaaacttgaaggaacccgtggagtagaggagtttacttgtttgtgttttaatgtttcttttgcttaatcagtttgtgcttttaatcgtttgtttaacatcggcagctaatgatgtttagtttcttttactttatttccttctttttttttcaagttttattagtgttaagcattgaagaactgatgactaaatccagtagtttgctataaatttgtttggattacctcaaccatcatcttatattttagtttcttccagagtataattaataattatcagtagaatatgaatttttgtttatggtaacagtttttttggctttgacattaaataataatcatctatttttttagttattctctatgtttcataatataattttttaataaaagtacggaattttgtttttctacgttaaaaacagaattcaatattaaactaaagataattttgacaataataaaatatatacggcagaatagatcgaccgtagtcataactcataaaatctatataatttgatgaacatctttctaaaacatctatagtaaaaaaaaaaaaaaaaaaactctaaaacatttgtatatgaaactggtggagtgttggtattaaattgaaggatttggctacattgtaacaaaaaagatcaattttaatattagaaacaaatatgtcagttagaaaaaaagttaaaacaaatattaaaatttatattgaagacattttttgagataattgtgaaaccaagggtctaattgaaaaagacaacttggagcttacacttaaatggtaattttactattaaattgaggaactattttttttttttactttttattttattatgcttggcgaaaaattacttggttgtcaaacaaaaaaaatacgtgctttacaattatattataatttaattaaaattgaaaaacaccattttattggattgattttttttcttaaagtggtaattttttaaaagtaaaattaccattcaagaaggtgtaagctccaagttaagttaggtttactgagtaacgtccaagttttaagacttcttataaaatacatagtttcgttcattgttaaaaactcaagagcaaatattgactcaagacaagtttttcttcattaacttcttctatcggatctctctttttctctctctcaatcatcatgatgaaacagtatatgtccaaggtgaccgagttctttaaggctcctatgaccaacggtatggctcttggtacagcggccgtcgcagttatggcaagcaagcgagacctattcatggaacagttggccacaaagaagaaggagtacttcaaggaggagaagtcggcgacgggcttgaaggagaacgtggtggaggccgataagaaggagtcggcggcggacgtgaaggagaacgcagtatagaggagtagcgttaatgagttttagtttggtcttttggttttgatgttttctagctagtttgatcagtttgtggttttttttaatcgtttcttttaagttttaacatcggtagctataatgatgtttagagtcaaaacttgataataataactaatactttttctttatctcaacctaattcttatatttagtttcttccagaattatctaccactagaatactgaaagttttgtttcttttagattctaaacttaattgagacaaacaaagaagtgttggagattacacaataaaagtaaaagtacgtaaaaaagatcctctgaggaagcttgttgcttattccgtcgtctacgcaacttggaagcagagcaataacatgctacacaactcgcatcacatataaaccggtttggattaaactgaccttaacccttcttataaaagactctgtatcaattagaggctttactttaagtcttccgtagctgagacactctgtctcacgcagagtcttttgaacagattttaaaagcgaagagagatctacatcttctcatcgtcgtcgtcatcatcaacaattcgaatctgaaatctgcaattcacgagaagaagtttttttttgtaacaatggcgaatccaattcaagaggtacaattttttggaatttcatcgattgatgatttttttctgtatttgattttttttttgttttggtgatgatgaatgaagattattgagaaacaagttctaacggtagcgaaagctatggaggataagatagacgacgagatagcgtctctggaaaagcttgatgaagatgatttggaagttttgagagagaggagattgaagcagatgaagaaaatggcggagaagaagaaacggtggatgagtattggacatggtgaatactctgagattcattctgagaaagatttcttctccgttgttaaatctagtgaacgcgtcgtttgtcacttctaccgtgagaattggccctgtaaagtaagtttgtggattcttcgtccatgtgatctttgagtttctttagagcttgtgagggattagtaagtaacaatgcttgagttttttgctgctgggcttcgaaaagtttgtcacttgttggtttgatccacaaggtcttcttctccatagctactagacatgttttagcttaagattcaagtttatatatgccttgtggattaatcattgcctgattcttccgtgtcatctctgagtttatttagagcttggaagtggtgtagtaataactaacaatactcttgataagttgtagcaatgctcttgattagtggatgtaatatgatgttgataagatatatgaggcacagaaccaaaagtggtgcttccactagacccgtttttagcctaaggttcaagtttataccttgtagatgtttctgtattgtctgattcttccctgtgatatttgaatttcttagagctttggaagtgatataggaacaatgctcttgtgtgtttgtctctatgaagattatcgctgtcgtgtttcatccgagtgtgcgggattttttgctgctgggtttagcctttcttcaaaaagttattacttgttagttttattgttttggtcttgataagagatgttaggacagacatggtgcttcttgtctatagccactagacctattttagcataaggttaacgaaattctctctacataccttgtggatttgtttacattgcctgatctttcctgtgatcgctgtcatgtttctttggaatgattgatgtttataaatggaaaaatctttgtgcaggtgatggataaacacatgagcatattggcaaagcaacacattgagacacgtttcgtgaagatccaagctgagaaaagtccattcttggctgagaggcttaagattgttgttcttcccactcttgccctcattaagaacactaaagtcgatgattatgtggtatataataataatgcttaatctaatctcttagaatatgatttatatggatgatacaatgttgttgttgttgataggttgggttcaatgaactgggagggaaagatgattttagcacagaagatcttgaagagagaatagccagagcgcaagtgatccattacgagggagaatcatctcttaaacaaaagtctacaacacaagtcagaaggaacgtgaggcagagtgctcgttcagattctgactccgaataaatcccttttcttatcaaaggtttgttcgtttgtatcctcttgttagttgtaatacttgcaattcatcgttttgatgatcaaaatcaatgttgatcgttagattgatgaacatgcaatatctagaatactacattgatgttttatatgttacctagtgagagtgttggaatgaccaaagtctttttgagtttgttctttaacttttgaaaaccttctgtctcataccatgtcttctcgattcctccttaagtctgaaacctagacaagtcaacaatcgaacaacactttccctaatttttttaatttattagtaattgatagtggagtacatgaaatgttttatttaaaggacgaatcacgttacctaaactctcatagaataaagtcattaatggttgcattagatctcttaaacttgggaaaacaattatataggacacgtgatcattttactcaacttggttaaacaacaatactattaaactaataccccaacaacaaattttaattaatatttcttatcgatgcaagctacttctactactactactaaattattcgacaagaatccaaattaatgatggcgaaacttcttggtttcatcgatatttaacatatatcccgatttcgatcaaattgcaataatgtcacaaatccatacgaattccacatactaataataaaactaaaatacaagtcatggatgggtcatggtcatgtatacaatactagaaaaagtataacttgtggacatcataaaagatagcaactttgattttgtctacaaatataaaatgtagatgccatattccttgaataaaaaatgaggccaaaaacataaaataaacagaagaaaaagaagaatatgattcttttagaaaagttaaactatagtagaacagtctgtctctctttgtttgttgtatttatatatagtaataaaaagatttgaataggcaatattagttttatattataataatcactttcaaagtaaattactaattatttcgttttttttaactatttgttttgtaaattactaattaatttgtttttttttaactatttgttttgtaaaacacaaaatttgattttttttgtattttacactgaaaaatgggaaacaataaaatagaagatcgttacagatacgcaaagcactccattccactctcgtcccgcttcgcctcttttagggcgcaaccaagagacagagaagaagagagagactcgtaagcaacaataaccaatagctctctctctctctctctctctctcctctgctgattcttcgctgactcttgcctcctcgacgtcgtcttcggctttgtagcatctcgccgaagcgtcgtaagttctcttcttctctaacctctttgcccttgagaatcttagatcgaatctgctcctcctttactggaatctaacatctttaaaaagtcgagtttcgttatactcctccaatcgcttctccaagttcgtgtatgttgttgaatttgaaggaattttttttttttgtaaaaaataaaagtcttgtctttttcagatgggtcatgtcgatttcgtgtttattgctttagggtatttgaaaagtcgtcgtctttgaacaaaagattgaacctttaatgacattcttggtctgtttgttgtttttgatctttgaacaggttgatttgagagagacccaatttggattgttagaaaatgggttacataggagctcatggtgtagctgctcttaagaaacacaaatacagtggtgttgatcactcttatcttgccaaatatgttctccaacctttttggaaccgttttgtcaaaatcttccctctatggatgccgtaagtatcttaaagatctcctagtttcttggtttgatgaaagattggactaacgttttcgttttttctttccatgtgggctctttgtgatccacgtacagccccaacatggtataagtgatttctgtttcacagttaaactcgaatgttgtatagcaaaggcgataatacttagaatggtttgtgtgttttgttttgtagataacacttatggggttcatgtttcttctcacatctgctctcttaggctatgtgagtttggtttgattttcacaaattctttattctcttgaagcttctagttgctttgctcatatagatttcttcaacctgtttttagatatactcacctaagttggattctccacctcctcgatgggtccactttgcacacggcttacttctgtttttatatcaggtctgcttcttttttctatatcaacctaatttcatctgcttgttaagggtcatgtaatctgtcttcctgacatagttggtgcattgtcgagtgaattctagacatttgatgcggttgatgggaagcaagcacgaagaacaaattcatctagcccactaggagagctttttgaccatggttgcgatgcacttggctgtgcgttagaaacaatggcatatgggagtactgctatgtgtggaagagatactttctggttttgggttatttctgctgttccattttttggagcaacatgggaacagtaagcgtttttatactttgtttaactctgtttcatcgatacaaaattctaatactttgctttcatgctcttcttttgtgtttagctattttaccaatacgcttactcttccggtagtcaatggtcctacagaaggtcttgcacttatatactgtggccatttcttcacagccattgttggtaagcttcaacaatctaagaatatctctatcaccaacaattctttttcaatcttctatactttttttcttactctcaaggtgcggagtggtgggctcagccgtttgggaagtcgattcctttgtttagttgggttccgtttttgaacggtaaagttccacaaacctttcgtgctttttgttggtttctcctagtttttctccagagaagtttattttatgccattcgaacttttctcggttcttttcagagatgcaaatgtccagaataatactattctccatgattttctttgctgttataccaacccttgcaatcaagtgagttttccacacttcatcggtcttatcggtctcttctcgagctgagaaaaattgctaactttttctatgccttgctctgcttatacgcacactgcttcattctacagcacgtctaatgtttacaaagttgtacattcaagaaatggaagcatgcttctagcattagctatggtatagtctcctgcaaccaaattttgatttcgttacttatatttcaattttgttcttaacgtccatatgtaatgccaatatttttttctgtattcagctatatcccttagtcacgttaattgcaggagttctgatttggtaagtctttttctattttgttctatgacttactctcgtttacacattgggacttatcgatattcttgtcttaaacagggattacttgtctccaattgatctcataagaaactaccctcacttagttgtgttgggaactggtcttgcatttggattccttgtggtaagtaatttggtttcaaaatctgtattcatcattaaactgaatcatttagtgacggggttatgattgcagggaagaatgattctagctcacttatgtgacgaaccaaaaggattgaaaacaaacatgtgtatggtaaaagtccaataactttcttcttgctcgatcaaaatgttttcttcgttgtcctcactaactttctctcttgcacagtcactgctttaccttccatttgcactagcaaatgctctaaccgctagactcaacgacgggtatgtttcttttctttcgctttttcgtcttcgtcagattcatatcagaattgatttgaatcatcttctcagggttcctcttgtggatgagttttgggttcttcttggatattgtatattcacattgtcactatatgcgcattttgcaacttcagtcattcatgagatc

SEQ ID NO: 463 - DNA, 18284 bp, Arabidopsis thaliana
cttcattttcttggtatattattataaaataataactgatcacacacacacacatatatatatatatatatatcaaataattttttgcttttcgtattattgcggttgttaatgtaaagatttttgatatattctaccttttatatcttaagtgttccttacaaactacagagacaataatcttgtttttgctaaggatgtagacatttctttacaaatgaaaaatttatgatttacagaaagtgaatcctatgttaataataattataagaattttgatcacatattttcatgattcgttttaatgtatatattaacaatacatagtattgtctaagcaaatttgtttatgtattttcagttgggatgtaaatcgtcttggtgagcttcccgagtatatgaggttgtgttttcttattttatacaatgaaatcaatggcattggatgtgatatactcaaatataaaaagattgacgtcattccttacctcaagaaatcggtaagtttatttttttgtagaaattattaattcaaatatgtcatagtttaaatatttggtgtgtttttttagtgggcagatttatgtagaacatatctagtggaagcaaagtggtacaaaagaggatacaaaccaagcttggaagaatatatgcaaaatgcttggatttcaatttctgccccaacaatattgatccacttttactgcgttttctctgaccaaatctcagttcaaaacttagagactttgtctcaacaccgacaacacatcgtccgatgctcagccaccgttcttcgtttagctaacgaccttggaacttcgccagtaagtgatctatcttctaacttgatgtaattcatgcatatatagtatatgagtaattgagtgaatgtttttcttttttttttggtaaaacattgagtgaatgtttgttaaaatgtagactgaattggcgagaggagacgttctcaaatcggtccaatgttacatgcatgagaccggagcttcagaggaaagggcacgtgatcacgtgcatcagatgattagcgacatgtgggacgacatgaactccgaaacaaaaacggcatgcaattcttcgtcacgttctagaggttttaaggaagctgcaatgaatctggcacgcatgtcgcaatgcatgtatcaatatggtgatggtcatggatgccctgaaaaagccaagaccattgatcgtgtccaatccttactcgttgatccaattccattagatgtaaatcgtcttggttgaagtgtaaggactctactacataaaatcatttgtacaatgaaatcctcaaccataaaaaatgttgacgtcagcccctttctcaagaaatcattaagttaaatttcatattgatgtatagatagattatggtttaaaatttctttatgttattgttcagtataagcccttctctggtactgggaaaagcagcgaactaaggttttgaaccccccccccccccccgacctcagttctcctgtgccctagctgagacttattgcttagcagtgataacctccgcactacggcgctccaatgaacaagagttctccgccttagtatatttagaagagtggtttcatcttagtgggcagagttatgtcgaacatatctagtagaagaaagggggtacaaaagagggatgcaaaccaagcttggaagaatacacgcaaaatgcttggatttcaattgctgacccaacaatgttaattcactttgactgtgctttctctgaccatgtctcaatccaagtcttgaagtttatcacaacaccgtcaacaaatcctccgtctagttaatgacctcggaacttcgctaataaataaccaatcttcttacttctagtagtgttgagttataaaatcaatttaaataatcaacctactaacttctagttgtgagtgtttgattaggatgaattggcaagagacgttctaaaatccaatgttacatgcatgagaccggactactggagcatcacaggaaaaggcacgtaagtacgtgcagtagatgattagcaacccaagggactaggtgaactacgatacaaaaacggcatgcaactttctacaagttttgtggaagctgcaatggacctggcacgcatgttgcaatgaatgtatcaacatggcgatggtcatggctgtcccgacaaagccaagaccgttgatcatgtccaatccttcctcgttgatccaataccattatattgatttcacacttttatagtaacaacaccagtttattatattttgtgatatgttggatttcccaaacaagttcggaccaaaaaagatcaattcaaaaacaactatcgatgtccaaacgtaagcaaccatggacttgcatacgtacaatcttatagcctaagactcacaatgtaaatctatacatttttacatctattacgggttcatttaggttttacctaattttaactctcaatctactgccactacagtgaatcaactactggcagtaactaaagctttaatcaagtcggctcatagcaacaaacacaactacaaacaaacaaacaaacctgcaacgagacatgtctcatttgagcctacaatgggatatatctatcaatagacagtaaatccacacacacaagaactaatcagaagatatatgagctactcatctcaaaagttacacttacatcacaaaagttcgttttcttcctctataaatcatttatcctacaagatatacttgcaaagtgaatatctgtgcaagacaattatgttccaaaagggaaaaaatcaagagtgaatatatgtgcaacgcaaatcctttctaaccttgactcccaaaagaaaactttagtgttaatgaaaacctaaaggcaagttatctgaacgactatgaacaaaaaagaacatccacagcaacacagattggccataaagctcaagatacttaccaaatttgcaggaggagagaggaaaagccctaaaatagataaaaatcataatcagtgaaacaaattggaaggggataagcatttaaagaaaaaaaggaggcctaaccaggagaagtgataaatctcaataccttgtatgttttccttgtgcagcagctctctctcccctccaagcaaaacctccggaatcacagtaataccatttatcagatactatagaaacaaaagaattcactagtggaaactatagaaagaaaaacaaatgtaaaagaattactataaggatgactaactatttcaggcaaaactcaatcaatcacaaaagaaactatatatgccctaacgcagataagaaccacggacaaactctaaaacatactaaagtagacaaattcatccaattttaaacaatagacaaataaagatgcaaaaggttcacagaaattatcgttttgctttcacataactcccaataaacaaccattgtaccttctcctgtgtgccattaaagcattgaaagatgttaaggagtgtctttaagcattggtcgatgtcctggagaaaaacaacatcaggcccttgagagaccagaagagataataaagcatctcactatccacaaatgatattcagagagcttccatacaattaaagaaaaattattcagaatgaccctctgcttattaagatgaaaagtttaaaaacatagacttctacaatgagtaaagtcgcaaatgattacacagcagtataaagaaagaaagcgccattgtcttacaatagagaaccagtaaagtcccctgagaatcgtcggtaatgagaactccacccatgtcgacattgtaaccaaagcgggagccctaagtagcgaactggaagagagccatactcgaaagggaattgttgtaggatctcatctctctggtgctcttgtaaaccagccatatataaggtggacttttgaagacttatctttagccccgagtgaatagcaaagtcttcaaacacttctaaagtattctcaatggattttttgtttccctcaacaaacaccattaaatcatcagcaaaacagaggtgagttaagtttaacgtcttacaattcgggtggtagtctattcttttatcacttgcagccttgtctattttcttggacaaaacattcatgcatatgacgaacaatagggactaagagagcagccctgtctgaatcctctctcactaccaaaatagcctgcgagttcaccgttcacttgtaccgagaaagacgctgtagagatgcatacctttatccaattaatgtagactccggaaaatctagagcttgtagagttgtggtgagaaacccccattggactgagtcaaaagcttttgatatgtcaattttcatggcacatcgaggagaaactgtttccttgtggtaatcctttataatctctgttgctaggaggagatttttcattaatagtctatctttcacaaaggcagattgatttgaagagatgaacttgggaagaatgattttgagtctgtttgcaagaatcttcgatatcaccttatagagaacattgcagcatgatatcggtctatagtccttcatcatcacagcttcttttctcttgggtatcaaggccaaaatagtggagtttactcctttgggtaggaagcctgtcttaaaaaaagattggatggctaccacaaaatcgtttcctactatcgaccatgtctcgttaaagaactcacaagtatatccgtcagggcctggggatttatttgaaggcattgagaagagaactttccgcacctcctctgcagtgacttctagtgtgagcttgtcttgtcattctcatcacatctataatccagtagagtttccagttcctcccgcgaccaatccacgtagtctggcggtttgagcgttaaaaagtctctgaagtatcgaactgcctctgcttttatttgctgctgatttgatgcaatatgtccatcatcacacttaatctctctaacattgttacgaacctcccgaatctttgcagcattgtagaaagttttattattttggtctcctatcttcatccaatgcagttttgctttttgcctaaggtagctttcctcaatacccgacagccttaaccacttctcatatgcgtccgcttcagctaccactgcctgtgaagatggccttgtcatagtttctgcttgcttttcacataaagttttataggcttcttttgctttttttgagatatcaccaagtaactgcttccccatctttctgaaatgtggcttcagaccttttaatttttttgataagcggtgcatggctgaggtagaatgaaagagaggctgagttgtcttccaaagctcttctgtctcacttctgaaatccgaatacgaaattaaagcatttataaatttaaaaggcctcttgactcgttgttcctgctccataatatagaatcgacatcttaggtgatctgaacaaccgcctgattcaaagacgctgtaggactgttcatactattgcatccattgcttgctaatcagtaccctatccagcttcttacatattactccttcctttctcttgttacaccatgtgtatctctggccttggtagctcatatctgttaattcacaatgtctgattaagtcttgaaaatctctcatcccttggagaacgaatggagatgattcatagagtgaatggtcctctccttctaatatctcattaaagtctccacatattaaccaagctttgttatagaacaaaggggaatcatgatgatatttaatatcactccacaaatcctttctttctgctgcaaaatttgatgcataaacaaacgacacaaagaactcttcttgtcttccttctaataagacagagcaagtgatgagttgtgacgtcttatatattggagatacacgcacgttatcttctattatctttcaatagtaatttgatataaattaagataatgtgcagtgaacgagtggcgattgttaagccaagtgaacattatatactttattttatactttctccaagcttcgaatggagaatttatttccatacgactaactctacctaaaagggccatgtttgtttgccaacataacacgacgatcacgagatacacataacatttagaatttggagaagatacattttgtttgacttcactttttgtgcgaatggctgttctacctgaaggggccattagtataatttttttgtacataataacgtcaccaaatataacacgagaatcacgaggtacacaaatcatttaggcttggacattatctaatcaaataagctatgatatcaaatttacatacatatagtggcctcgtgggtataattacacaaggagcttttggagaaaaagaagtgtgtgatttaaatgacaattatacaaatgtgtacaattatcagatccaaagttcatgttttaaatcatcaaaaaaataataattgatgagttaaatgatatttttttcatttagatttagttagattagttgtacggttgtaccattatttaataatttaaaagttgaaatgattataatgtataaaagttgaaaatattgtaacagatatagattaagcatttttgcggtcaatatattataaaagcttttttagctattaattgaaaaatattttacacccttagatcttttgatctcctaattatataaaatattttcttctaccgtttgtctatataaccatatgtgttgtctagtgcatgtattcagccacgaataagagaatagtctactaaatcaatggcaactttacgtataagttcagctcttatttaccaaaataccctcacccaccattttcgtcttcgacgtcctcaccgtttcgtatgcaagtccatgaccaaaacgacgccggatactactcttgttgaactcagtcgacgctccggaaactatcaaccttcaccgtggaaccattgttatctcctctccatcgagaataaatatgcggtaaagttttgtactatattttcataattttttattgttgcacctaagtttcacttttatttatgaattcttttattaacaagttgttactacgtgcatgtttaaacatatgtatgtatatacagagtgaaacagaagtaataactagagatgtgttgaagaaaaaagtgaagagcatgcttgatgatgagaagaagagccgtctcgagcaattagagctcatcgatgatctgcaaaaacttggggtttcgtatcattttgagatagaaataaatgatactttgacagatcttcatcttaaaatgggaagaaattgctggaaatgtgacaaggaagaagatttacatgcaacctcactcgaattccgacttcttagacaacatggttttgatgtctcagaaagttagtataatataatgaaattttaaatttctatatataataaattttgttgtgtgatcaatatcatatattaactgaaacaaccgtttatttcagatatatttgatgtgatcatcgaccaaatagaaagtaatacgttcaagaccaacaatataaacggtatcatttctttgtacgaagcgtcgtatctttccacgaaatcggatactaaattgcataaagtcatcagaccttttgcaacagaacaaataagaaaatttgttgatgatgaagatactaaaaacattgaggtacgagagaaggcgtatcatgccttagaaatgccgtaccattggagaatgagaaggctagacacgagatggtacatagatgcatatgagaagaaacatgacatgaatcttgtcttgatcgagtttgcaaaaattgatttcaatatcgtacaagctgctcatcaagaagatctcaaatacgtttcaaggtaatactatcaaagaaatatagatactagtctttcgttgttaattattgtatacataattcgttctaatcctctttcgttaatgatatgaagatggtggaaggatacatgtttgactaaccaacttccctttgtaagagatagaatagtcgagaactatttttggaccgttggattaatatacgaaccacaatttggatatatccgacggatcatgactatagttaatgcccttgttacaaccattgacgacatctacgatatctatggcactcttgaagaactagaactattcacttccatggttgaaaagttaagaaatattctacctttttttggtcaatcaattggttattttgcagctgtaccatggtctaccactagaccattattacagaaatcttctacttaagcttcttcattttcttggtatattattataaaataataactgatcacacacacacacatatatatatatatatatatcaaataattttttgcttttcgtattattgcggttgttaatgtaaagatttttgatatattctaccttttatatcttaagtgttccttacaaactacagagacaataatcttgtttttgctaaggatgtagacatttctttacaaatgaaaaatttatgatttacagaaagtgaatcctatgttaataataattataagaattttgatcacatattttcatgattcgttttaatgtatatattaacaatacatagtattgtctaagcaaatttgtttatgtattttcagttgggatgtaaatcgtcttggtgagcttcccgagtatatgaggttgtgttttcttattttatacaatgaaatcaatggcattggatgtgatatactcaaatataaaaagattgacgtcattccttacctcaagaaatcggtaagtttatttttttgtagaaattattaattcaaatatgtcatagtttaaatatttggtgtgtttttttagtgggcagatttatgtagaacatatctagtggaagcaaagtggtacaaaagaggatacaaaccaagcttggaagaatatatgcaaaatgcttggatttcaatttctgccccaacaatattgatccacttttactgcgttttctctgaccaaatctcagttcaaaacttagagactttgtctcaacaccgacaacacatcgtccgatgctcagccaccgttcttcgtttagctaacgaccttggaacttcgccagtaagtgatctatcttctaacttgatgtaattcatgcatatatagtatatgagtaattgagtgaatgtttttcttttttttttggtaaaacattgagtgaatgtttgttaaaatgtagactgaattggcgagaggagacgttctcaaatcggtccaatgttacatgcatgagaccggagcttcagaggaaagggcacgtgatcacgtgcatcagatgattagcgacatgtgggacgacatgaactccgaaacaaaaacggcatgcaattcttcgtcacgttctagaggttttaaggaagctgcaatgaatctggcacgcatgtcgcaatgcatgtatcaatatggtgatggtcatggatgccctgaaaaagccaagaccattgatcgtgtccaatccttactcgttgatccaattccattagatgtaaatcgtcttggttgaagtgtaaggactctactacataaaatcatttgtacaatgaaatcctcaaccataaaaaatgttgacgtcagcccctttctcaagaaatcattaagttaaatttcatattgatgtatagatagattatggtttaaaatttctttatgttattgttcagtataagcccttctctggtactgggaaaagcagcgaactaaggttttgaaccccccccccccccccgacctcagttctcctgtgccctagctgagacttattgcttagcagtgataacctccgcactacggcgctccaatgaacaagagttctccgccttagtatatttagaagagtggtttcatcttagtgggcagagttatgtcgaacatatctagtagaagaaagggggtacaaaagagggatgcaaaccaagcttggaagaatacacgcaaaatgcttggatttcaattgctgacccaacaatgttaattcactttgactgtgctttctctgaccatgtctcaatccaagtcttgaagtttatcacaacaccgtcaacaaatcctccgtctagttaatgacctcggaacttcgctaataaataaccaatcttcttacttctagtagtgttgagttataaaatcaatttaaataatcaacctactaacttctagttgtgagtgtttgattaggatgaattggcaagagacgttctaaaatccaatgttacatgcatgagaccggactactggagcatcacaggaaaaggcacgtaagtacgtgcagtagatgattagcaacccaagggactaggtgaactacgatacaaaaacggcatgcaactttctacaagttttgtggaagctgcaatggacctggcacgcatgttgcaatgaatgtatcaacatggcgatggtcatggctgtcccgacaaagccaagaccgttgatcatgtccaatccttcctcgttgatccaataccattatattgatttcacacttttatagtaacaacaccagtttattatattttgtgatatgttggatttcccaaacaagttcggaccaaaaaagatcaattcaaaaacaactatcgatgtccaaacgtaagcaaccatggacttgcatacgtacaatcttatagcctaagactcacaatgtaaatctatacatttttacatctattacgggttcatttaggttttacctaattttaactctcaatctactgccactacagtgaatcaactactggcagtaactaaagctttaatcaagtcggctcatagcaacaaacacaactacaaacaaacaaacaaacctgcaacgagacatgtctcatttgagcctacaatgggatatatctatcaatagacagtaaatccacacacacaagaactaatcagaagatatatgagctactcatctcaaaagttacacttacatcacaaaagttcgttttcttcctctataaatcatttatcctacaagatatacttgcaaagtgaatatctgtgcaagacaattatgttccaaaagggaaaaaatcaagagtgaatatatgtgcaacgcaaatcctttctaaccttgactcccaaaagaaaactttagtgttaatgaaaacctaaaggcaagttatctgaacgactatgaacaaaaaagaacatccacagcaacacagattggccataaagctcaagatacttaccaaatttgcaggaggagagaggaaaagccctaaaatagataaaaatcataatcagtgaaacaaattggaaggggataagcatttaaagaaaaaaaggaggcctaaccaggagaagtgataaatctcaataccttgtatgttttccttgtgcagcagctctctctcccctccaagcaaaacctccggaatcacagtaataccatttatcagatactatagaaacaaaagaattcactagtggaaactatagaaagaaaaacaaatgtaaaagaattactataaggatgactaactatttcaggcaaaactcaatcaatcacaaaagaaactatatatgccctaacgcagataagaaccacggacaaactctaaaacatactaaagtagacaaattcatccaattttaaacaatagacaaataaagatgcaaaaggttcacagaaattatcgttttgctttcacataactcccaataaacaaccattgtaccttctcctgtgtgccattaaagcattgaaagatgttaaggagtgtctttaagcattggtcgatgtcctggagaaaaacaacatcaggcccttgagagaccagaagagataataaagcatctcactatccacaaatgatattcagagagcttccatacaattaaagaaaaattattcagaatgaccctctgcttattaagatgaaaagtttaaaaacatagacttctacaatgagtaaagtcgcaaatgattacacagcagtataaagaaagaaagcgccattgtcttacaatagagaaccagtaaagtcccctgagaatcgtcggtaatgagaactccacccatgtcgacattgtaaccaaagctctctcaggcagcagagggaaggtagagaaaattcaaagattagatccttcaatggtaattaagatatttaatgtacagatatctaggacaacagcatttcctgatacaacagagagggaaaatggcaatgtggtttcacttgccagtgatgaatgggtgagctaatgcctgtgacacagtcagtctcctctcgggatcaaggatgaacattttgtccaagagatccctgaaatgagctaagatcttgggatcctcaccagggtaacctttaatgatggaaccaaaatctttcggcttcacgtttacgatcattctttttatcagctgaaaaggaaaagtaactaatttactcaccatcaattggttttcaaactacgaagtgcctgagaaatagacggactagtttttttacctttccactaacggtgtcttcctctgtagcataaaagttcaagtcatgatcaaagtgctgatcaataaatgctccctgttaaaccaaataacagaaacattagaacatgcattaaaaactgcttctcttaaacatacaactatatctccaccatacatatggatttgcctaaggaaagttatcatttggaagacattttgatcagtgatcaggtgacattcacaacacccaatctagtttaatgctaaccttgcgaagcatctttttagggaagggacctttcagttccatatgaaggcgtaacatatcattgtttgtggcgccagggaaaagaacttttccactataaagctcatacagacagcagccaacagaccatatatccaacggatggtcataggtgagccccagaactgcaatggaaagaatagaagcttcagtcacatattcttcaccaatgaaaagtcctctttacaacccaaaatatgatacttactaatttcaggggatctgtaaaagcgactaacaagatacggtgtaacttcgtttttgcctgcaaacattgcattaccaaaatcacaaagctttaagacatttttcccctcattgacctggacaatcaaagacccaacagttagaaagctattgaattaagtaggagaaaaccaatgaaaagtgtgactgaccagcatgttgtcaggttttatatcgcagtgaagtaccccacaattcttcagatgtttaagagcaatgaatagctgctttgaataagccctaacagcagagagttggagaccaatgttgcgaccaaacttcttcaagacctcacgaagattcaaatggagcgactcaaacaccaagcaaaggtgattacggtacttaaagcttgaaagaaatcgaacacagtggcgcctgtcttctcggtcagcgcctgccagcttcttcaatatttgaacctcaatctttccagctttatgcctaaacaaaatgtgattcagtaatcagatacaaaagcataaagatgataaaacatatgaattcgaaaaattagttggggcctagagaatgcaccacctacatcgtctcattgttacggataatttttattgccacctcttcaggttcagctggtccagctttcaagtctttagcacgaaccacagtagagaagacaccttttccatgagtagcaatgacttcatatctaccatcaagtaactcgccaaactgatagcctaaaaggagaggagactcaatctttacaacgaaaaaataaaacgtaaaagtgcgttcaccattcatgattgaaatgtagagagaaacacacttactataataaccctctgcatcatcccaattatcatgaagcccgctcctcaccatgggaacaccatcacctttccctccctaaaagaagtgggtttaatataagagaaaagaaaatattaaaaaccctcacaaaattttcctcaaacactaaagaaaaagggtttcatgatgatcaaaacagtaaacttaagatgacaacatcagaaggttagtaaacagtacaaatacacggttagacgatatgaagtagttaagttaaatacataccacttttcggataccagccggggactctccaaagatatcatcatgaaacatgtcagctgacctttcactctggacatataaaagtgtataagaatataagatcatcatcacatatatttatatataccgatagtataaacctaaaaccaagaattactcacaaccacacatgatcaccaataccaaagaaacaatcaaggtttcctttgctaacgcaccttcgggctaccttcaccaagccccgcttgagcttgattcttctctgagtctgaaattccagacatagtaggtggcccaccggctattaatggtgccttggcagcgacagtatcaaagtccaagttagttttggcctggcctacattagctgctatgacaactgcaggagaagtcgacactggagcaccagtttctggaacaatatctgccacaaaaacagaagaatcactgggaatgcctcaatgctaaacatctcaaaacaagtttttacatttgaacgtgggagagtattgtatggacaaagacattgtctgtgagatcaaccagtgaaatctaatgaaaacaagttacagctttttgttaaagagccattcacatataccacgagtagaaaggtgaaaacctcatatttgaagaaatcagagtcgtgaaatatggtgatcacaataaagactgaacgaatacctttcccattatcctgagttaaaagttcattttgctgctcgggcttcctcttatgtttctccagtatggcttccattcgcttcctgctctcttccttgattctatttagtaattcttcttcttcttcctcaggagatttccatgtaagtccttcgtcattatcatcttgaccatcctcatttcgggacctgaccgcaaaatagttacgagccacacaagatacccaaaagatttctgatctacaacaaaacattaacaaggatgaggttattgaaaaattacctttcatcattggcccacgtttcttctaacttatcacccttagaattatgggccttcaaagaatttggctttctcatttctaggtcatctaccgcatcatatcttgtgtttctagactgtttgtgcctcatctcaccgtagtccacatcactacttatgtacttctccctatctttctgggtttctcttcctctctcccaatctttttcaccctccctttccttttctctcttcctctctctgctgttatacctggttctatctctactcctacctctctcattggctctatcccgtaaataatctccttccctctcctttctcctatccctatcaatgctgcgctctcgttccttctcttttcgtctttcacggtcagactctatctcccttctcttctctcgttctctttccctcctccgatcactatctttatctctccgcttacttccttccgaatccctatctcttatgcttccctccctgtccatatctctctccttacttctatctctttccaagacttctcgactatattgcctgtcattttcctcatatcgcccacgtcgatgatatctttcctcagtcctaactgagtcaactctgtcatgatgataatccctactagaatcatgatgtcttcctctgtccgaaaactcatcctccgcaaaccttgacctagaagtttctctctcccgatcatgtgacttagatctactccgggcacggccttcgttagactgcctgctgtttgacggagaaaacgaacttctgccattatcataacttaatttactaactctctctgaaggacctccagcttctttatcccacctcttatcctccctttcagattcacgagttagaacaccattagaactcttttcttctccttgacgccctttttccccaagtggaggctgaaagcatcgcaaaagatattcagaatacttaccagaagagaaatacatgacactaaaaacgcaagaacatacaattaaaaaaaagggaaaaagaacatctacataaaaccagttcttacaaatcaagcgaaagccatcagtctccattgaacgcctagtgcaacactcaggttatctaaagaaaactctcaaaagaccaaagctttatcattaattcaggcgtaaatgctgtttgtaatatgaaaaaatcaatcaaacccaaatccacccctctgatcccacaatccaaacagaatttaggaagaaaaagacgtattagagggattagaacagaccagattattatcttcaaatttgatttcgcctgattcgccgtcggaatctgccgtcttcatcaaaacatcaccaatcccatcttcttctaaaatctctccttcctccacatcctcctcctcacagccgttactaacaacaattggagccgccggagtaacatccaatatctctgtctcatcgccggcggatggaatttcattttcgcgcttcttatctcggtgatggcgatgcctgtggtgatgatgcttgtgatgacgatgcttgtgtcgtttcgatgctttttcagtgtcatcggacgacgaagatgaacggtgatgcttgcggtggtgagattcgatctgcttatcgttcgccatcagagagtatcgtcgtaatcgaaattagggttaaggctcaagaaattttggtatagaatcgcgaccagaattgcttgtaacatctttttaaagggattttatgtaaataaggcaaacgtggcatatgtgtattattttatttaaggcaacaaaattgaattagatcatagaggttgatcattattatttctttaacaaatgattaaaacatttttacatatatagataaaaaaggttttgtgaaattggtataaaaaacaattttgagatatgactccatattactagtgttaaatttgatatgccatattttaaaatttaaatcttgaaactcctacatagaaaatcaggaagaaatatatatttttggtatggtagaaatcaggaagacatttatatacaattttttcaataaattaattttcttttgtaattgtaataatttatttcaaaatcttttaaaaatgagtttggcccctttaatcatgtgttaggctaatgtggtcatgttccattaactctagaattactaatgacgagtcatagacaaaattttagacttcagggttcttcgtttggtcaagagtcaaacattatgtatacaaaaagaatggatcattgttggacacaatcgttgcaccacattgtcagtttgtcactaacagaatccgcatcaagctttaaaatgaatttctcataacatacacgccaatatttatttttcattagttttatggttcttcgatttcttcttcagaactatcatcttcaatttccttttcggaatcatcttcgagttcatcttcaagctcttctttgggttcagcttcgaattcttttccatcccacacgtcatctttcatcgcacattttaaatgaaatgcaagactaggacaacgcaagcatgtaaaagctccatgggagcaactaatcttttgtcggcagattccacatttccaatctccgagaccaagatgaaaaatgcgagaaatgcgatgatcatggcagttgatgcttataactcgtggtagatatatacaatccttgtggaacatcaaattacattcaagacatacataaggattacgcttaccttctacgctacatgcattacaagtaaatgtgaccactctcggcaaaagagtaagcatatgcatatggttttttgggtgataaatacttgatggtggtggatctttaagacatttgagatccatgttgatgttgcatatcaaacaatgaaaaaaatcatcaagaagataatctctacaaaaatgacaatggtcacctgcatagcccaatgcctcgagtgtgtagattttgagagaatgtttgcatggagatggatgcagaagtgagcgcttgatgcattccttatgcccccaaaaatagcacttatcgcagaaatagccaaaaccacctttctttttgcacaaaatgcaagaaaatctgtccaatttctcatatgctaaaggatgatcgtgaaaaggaaacttcttttcggtcatggtgagtgtgtggggattgggtgaatctagaaagcataaatttcaatcaaaaaaagaaaagaaaagaaagaagaaagcttcacttgaatatttctcttgtaaggcctcttcattagt

SEQ ID NO: 464 - DNA, 83650 bp, Arabidopsis thaliana
gatcctcattgtcattgatagtcgtaggcatttttgttgttcacttgtgttgttgaagtcttcccctccatttaaaaatatgagtaaaattgggctgttattttagttgtggtaaccaactcacatttagaatttcagaaagctaagatttcaataatgatgtgtattgtaaaaggtttatatactcggctctcccaaatgttctaaacaatagtttgggtttcgtttttcccaattaccaaacaaaattttagatatatgtccatttcggaacgagaccttgtctttaccgtattcgtctcgggtttctagtcccatatccgctcgtataattaattgttttgagacaatgtaatgcattgaatatatatcaacttttatatatactaggtgatcatccgcactgcgctacagagttttctatatatttgtacatacaaacaaacgtgttggtcattatatgccattgtttcttctaatagttctcacaaatgtttaggcattggaggatagaagaacaaacgaattagagatatctaacacaacaatggtgtggtcatctgatcaggttgattagaatattcatgtggctgttcatacggtagctcgtgctcgcttccttcttctcctccatggccattggtgagatcttcaacttcgagaatctcaaccctccgtttcatcttcctttgcagttttaatgcaacatcggatggtcgaaaccgtccgcaaaggattacttgacgttcctttttgttgatcatgtgtgtatcaacttcttcataaaaaagtatccaaaacatgtgttagtattgaattttctataaatccaccacgactaaacctacataaaatggtgcatatagtaacatcgataaaatttaacgatgtctttctaaaattttcagattttccactcaaaaaatcctccttgaactttaaatcttattttcataacatccttctttgctcatttcatccacatattattttatataaccaatataaaccaacctttcatattgatgataatcctcctagcttttctacaacaagcattgcaatccaagttaatcctcatcacaacacaacattgcttctgcatttcaccaccccaaaaaaaaaaaaaattatcacaaatccaagaaaattattgttcaaacaaataaaagaaaacacaaaaccttttccgacatgagacgaaagagcaatattgtatgatatgtttttggttaagaaaacaaaagtatacttataaattaagattttggaatctgattctctaacttaggtagagcagagaagatatataagaaaactggttttgttatgttacctaatatccattgagaagcatctaaattttctttgtttctagatggtttaacctaaaccgaagtttcagataaattaatccggtttaattatatatccggttattaaactggtaactgatacaaatgtaggcgaagacgctcaacgaacttcaacctcgtcttctccgtccacttcactctctctaaactctctctcagatctctctctctctgtgattcaacaatggcggtttcttcttcttcgtttctatcgacagcttcactaaccaattccaaatccaacatttcattcgcttcctcagtatccccatccctccgcagcgtcgttttccgctccacgactccggcgacttctcaccgtcgttcaatgacggtccgatctaagattcgtgaaattttcatgccggcgttatcatcaaccatgacggaaggcaaaatcgtgtcatggatcaaaacagaaggcgagaaactcgccaagggagagagtgttgtggttgttgaatctgataaagccgatatggatgtagaaacgttttacgatggttatcttgctgcgattgtcgtcggagaaggtgaaacagctccggttggtgctgcgattggattgttagctgagactgaagctgagatcgaagaagctaagagtaaagccgcttcgaaatcttcttcttctgtggctgaggctgtcgttccatctcctcctccggttacttcttctcctgctccggcgattgctcaaccggctccggtgacggcagtatcagatggtccgaggaagactgttgcgacgccgtatgctaagaagcttgctaaacaacacaaggttgatattgaatccgttgctggaactggaccattcggtaggattacggcttctgatgtggagacggcggctggaattgctccgtccaaatcctccatcgcaccaccgcctcctcctccacctccggtgacggctaaagcaaccaccactaatttgcctcctctgttacctgattcaagcattgttcctttcacagcaatgcaatctgcagtatctaagaacatgattgagagtctctctgttcctacattccgtgttggttatcctgtgaacactgacgctcttgatgcactttacgagaaggtgaaattgaattgaatgaaacagatgaagctgatgttgtattgaatgatgaagctgatgttaaatcactgcttttgtttacaggtgaagccaaagggtgtaacaatgacagctttattagctaaagctgcagggatggccttggctcagcatcctgtggtgaacgctagctgcaaagacgggaagagttttagttacaatagtagcattaacattgcagtggcggttgctatcaatggtggcctgattacgcctgttctacaagatgcagataaggtaagcataagcaataaagttgtagaaaatagctagcgtgtgagtgaattaacacacacacttggtattattaggctggtttctttaactgaatgtgtgagtcgtgttggttgttttgatagttggatttgtacttgttatctcaaaaatggaaagagctggtggggaaagctagaagcaagcaacttcaaccccatgaatacaactctggtactattcttaacgaattgtttagatgacaaacatgtgaagtgtgtttaaggattttgatttaagggatatatctatggaatgcaggaacttttactttatcgaatctcggtatgtttggagtggatagatttgacgctattcttccgccaggacaggtatatgaaagaaactttcattgcctcttctatgaatagtgattacaaggaatttacttaattgttatactcaaatctctagggtgctattatggctgttggagcgtcaaagccaactgtagttgctgataaggatggattcttcagtgtaaaaaacacaatgctggtaagttttattttgacttaataaacttcctgatgggtttggtgaatcacttcgacttagaaagtttaaaatacgattagctatagcttttggctatgctaacagtaacattgtcgctttgttgttatgttggcaggtgaatgtgactgcagatcatcgcattgtgtatggagctgacttggctgcttttctccaaacctttgcaaagatcattgagaatccagatagtttgaccttataagacgccaagcgaagacgagaagtcaaaaacagtttccaaaattcctgagccaaatttttcccaagtaaattttttaatcttcattgttcttggtcttgctctacttcttttgcatctttttcttcacttgtgttgtatctgtatttttgttttcaagaatcatcattttgggttttaaacaaataatttcctatccagaatcagcccaccggccttaagaaaagagagttactagacacggcctattatctgagggcatatctgttgtgtctgtattttttttgggcacggccttaaagattgtgcccaagccaagcaatctattgcttagatctcaatttacttagtagaacgaacattatttggatttgaaaattagacatatatcaattagggctgaaatccaacataccacaagcccaattcttgtaaagaactaaagaaggactaatcagagattgaattaccattgttgtttcaaaactcaacttgtttgggtgaatatccctttttcatttcgtgttttaaatttttactaaccattttattatttattttgttgtatacaatatgatttaaatcatgtttaaattttttttttttaacatcaatcatgtttaaatttattgtatttttggaaaggaataagttagcaaaaacttttagtaaatatatatatatggattgcaatggtggaagtctagaacctttttgtaatcaacaataatttcagattctgatatgaaaatctttttaataattctgatctctggaataccgaatacatccatgatcatataagattgtaacattaacacaaaagctaacgaaatgataaaggcgattaaagattaacagttcctgaagagaaaaaagttcttacaaactaatctaaaccacttactcctactaaaaacattttgatttttctaatcctaataacttaacaaaatatatagatcctaatacctattatccaataatagagggaaaaaaaagaaaaaagaaaaagcgaggcaaaacgcttaacaaaacgtcaccgttcgtagcccgcttttttaaaaaggtccggtatgttgttactccgccggtaaaaactccggccgccatgaaaacaaatcgccggaatctaaacacccatcgaaatattcgaaaagcccatcatcaccaagatcgcaaggtccgaactccgtaacatgatcctcaaacccacataactctccaacctctgatgaatccgacgaggctcgtaccaattccgtcaccgtttcctcacacgacggaggaagaagcgtttgcggtggcgtaagcggcggtggcaaacccagctcgtcatcagaagcttcgaaaaggtatccaagatccggctgagtttcaccggagcttagcgccgccgtcgttgtcgataactcattctcgaaactcttcatcaccgagtcaagatcttgactcactgggtcaagccccgagtcatcgaacaaatcatctcttaaccgcttcacgtccggcgagtcgaggtctaacccgtctctgactcgtttattcccgacagagtcagtccgagttagcctctcctccaataaatcctccatagctgaaccggtggtacgggttatcgctttggttaagatggtacggttttaatgagtggcaatactgtaattaagcgtgagatatgggtacagaatcggaagaaggggaaacacgagattttatagtggagagaagatataaagagaagcagatataaaagtcggtaacgaaagagaaagcgagtgatttcagacgcagactttggcgcgtgtataacgaatagtttgggcatcacagatctttcacttttttttttcctagttctttttttttctggtttttatttttatttggttttatattttttgggatttcaaatgtcgttttctaatttctgaacgttattattaattggtttaaaattcggtacgtacgttgcaggacacatgctcggtcagttaggttttttgtgttcatcaaaaaagttgtataattaaaaacaaaagtgttgtataattagagagtacaagacgttacgttgttgttgccttacccaaaaaaaaaaaaaaaaagacgttactttaaaatccaaattacagcatttaaaatcattaccaaacacatctaaatggttttgtttttgttttgttttaaatcaagccgacaacaaataagtgaaatatacataaccaaaaatatgtattaaaaaaaaagagagtagaagacgttacattgttatttgtaacaatattacaaggcatataaggaagaaagaataaaaagaaggaaacgttacgataatagaaatcttgaggatgagtgaaaacaaagaacatgtagaattttgtacaacacatcacgtgagtacataaagcaaaatcaagtacacaaaacttcccaccataaattacgccggcccaccattcttaagtatcattgccaaatctaattgattatagaacaaatgttatttatttcgattaaagacagattttataattccctagcactaaaggtttttctattgagacatcatgttattttatctttctttttttgttaaatggaaaatttatttaatctggaaaaaataaatacgtatctgatagtgaaaaggtacgtatagctaatcataactgggacttgggactgtcgagcaaagtgatcagttagccatatgaaaaatgagtattcagatgttgcattggtgaactagacattcttataccaatctttatgtggttgagctatgagaaccatggatggagaagctatatatgtacatgtaaaaatcaacaaaaaaaaaaaaaactcgtggaaattattaatgagaccgggaccatgcgtgaagaaactatacatagaagctatgtacaattctgactttatttaaattcttaccgcaatttctttctttacatgtctatcaatttgtggattgtacataacacgaaaatatgaaattaatagataagtctgcgtttttatttatcaattatattattggttaggcaggcggtagaagctaagttagctaactatagtctttaaatatatgcgaaaagttatgtggttaaaatatcagaaattcgaacaataaaaatacaaaattagttaggtgttcttaaacaagttaaagactaataaatcatttgaaatgtgaattttcgtcaaattggtattgaatggagattttgttagaaatgggaagaaacaaaaacaaaaaaatggtatagttctgatagaacgagttttgtaatgttctaattaaagaattgagaggcgattctggtgcgcatcgctttcacgtcctctcgtcttcacttagcgccacgacgaagcttaaagttgtaggtagatccccattaaaactcgcaattcctaaaacaattaatttgattaaatactgtagatttgtcccatagccaaaaaatttgacgtacgacctcacaatctacagagtaatttcattaaaaattttatacacttataattaatatttcccaaaaatgttcgcaacaattaattatcttcgttcaaatcttttttttttctttctttttgcttcattttcgaactcgttttcttatctttgaattttaaatagtactacatgtcgtggttcgaacaatatatatatttttttttgtcgtaaatttatatctttataaagattttcatatttttcgagaacgaaatttccggccgacagcgtgagggtttgctgtggagatagtacgtggacatgtgtagagaacatgacacgtgtctatattagaacactttccatcatcacatctcagccgtcgattaagttttctgccaattgaagtcttcatcgcagttgtcgttcgatcaaaataacaaatgggttaaatagtggttgttacataaactcatgatagtatatggttattagacagaaaagattattacatatgtgagaatacttcagaataatgacggccaaagttaatcatctcaaattataagaatttcgaaaagctactcacttcgtaaatcatttaaattctgaattacagacgtcggtaggtctttaaagaaataaaactgataaatggttataggaatcggtcataaactaaaaagatcaacaaaatgttcgttcgtgtttactcgaattttctttagcttgtgagcttgatgcagaactatatatgtcggtacttactaacccttgcatatttgtttacatgacttggattattaggatccaaacatatttcgtatataaaaaattaatctaaaacgctcattaaagcttttagtttctctttaatggttatatatcaataggcaataaaagttttaaatgtccgtacacgtcacgtgattccgacattactagatcatcggtggttaggttgatagtcgctttgtgaattgtgggtgcaactaacataattttactttctctttatcttaatctcaaaactttcagaaataaaacctaaccggaaatagaaccgtacaatttcatatatcaaggattttaacttatattgtagcatgctcaacttggttttgcgatgttttcatatctattattatttcaacatattttccaaattattttatctaaataacttacttatttgcaaattaattagtctataaaacatatctttttttggtcataggttattattgtacatacttattaaatatttttaattttattgtattacatattatagatacatacttgaaactacgatcacaatagatataaataaaaacgattttatgaaagagaattctctctgcaacctatctcagtctggaaaatattaacctgagaagatttggatatcgcaatcttaaaaagttaaaattatgtcaagctcagatagctgtaagaaagaaatttcttaattactaaatatttaatctttttaccatgtgtagatgattgattaggatcttataaacttgtacccaaaacgactttagcacccaaaaaataaaaggttatatcatttcattaatttgtatgctcatgtataacacgtcatttatgtggccaatatggacggtccatgtaatccagacaaaattgttcgagttgtaattctttgtttggtatagcgttttgttgggaagcaaccgaaacaatcgttttcgagcaaagccatttgcaaaaactatgaaagccttacgaaaagagaaaatgatgatagtcaactattataatgctctaatagttggaccctaattgtaatagatttacgtataaaaaaaaagacaaattttggatagaccttgtatatcagattttccagcacatgtataaagccgtgcaggtctatgtacatatctcgatacacagctatatgtcatgccaatacatatctcgattaagattagcttgactagcaacctaagtccacaactactactattgtgaatgactagacttttaactcgtttaatatattgtttgtgttagaaagatataatagattttaaaagaaaaaaaagatttgagaattatgtatataaaacaaaaagaagacatgttaatttgcttcaatcatatcatttcgtgttagtaattctatatcttatcatccacttttgacttattcaattaacttaaagtatcataggaaagaacgagatagcacgtcatattaaaatggatggatgtgattcacacttgcacaattctcgtcttgcgctaaatttctgtccaatttcgtctgccaacctacaacttacaaggtccaaaagccctttaatataattacgcattattagtattttccaatgtcaagaaaacaataaatggactataactctctgcttaatgcctaaagggctagaacaattagtcaattagtggatagacgattttttagaggtttaaatagttttcaaataaaaataaaatatatttctgtattaatataacataataaaaacaagttaatagaaataaattgtatattttaaattaatcaaaatacataagcaagaaatatgagtattcagtattcactaattttaaaatacataaatttaaaagcattaggctaaattcacctatcttaccaaaatctatctaatacaattaatctgcatgataactggataatctgctaaatctaactagctacttaagaggtggtgatctacgcctagaacgtctaatcatgatttaggagattttaagcggctacacatttacaacataacatattataaatattatattataaataaaattcatagaaaactatctcttagaaaaataaaaatatgaaattataaacaaaacttagataaaaccatttataattcatagcaaacaatatatacaaagctaaaacttataatttaaattgatatagttggaaacaaacaatatatacaaagctaaaacttataatttaaatttatatagttggaaacaaacaatatatacaaagctaaaacttataatttaaatttatatagttgaaaactaaaaaataaactaaaataaaacttatggaattttagacagccaaaacggttatttagatatcacataaacgtctaaaatctagatgacgatcaactagggatgtcagacgggcgagcacgcgaccaaatggggggtccgtgatggcccgtgcttcttttccataagtggtggtccggtccgccaacgaccacatgcgaccaatcgaagcccatattcgcctcgcaatgtccattggtctaacggtctggcccgcaatcctgttctgttctagttgtctctgaaacacactgtgttgttctcgtctctgaaacacagtgttgttctcgtctctgaaaccttcgcttatggagaacttctgttctattgcatgcctttgaagacaagagactttgaccgtaataaatggttattccacaagttttgtaattctgtgttatcaccaaacacaaactgttcagtctactccatcgttaatatctaggttcaccattgaatcttccaccagctataaccaaacaacgacgaaaaagagatgtcataactatttaactacacaaatagcatctaaaaatagcaacaaaaaaaatcaaaaactagtcattacttagtacctatgaaattgtttccaaatgtctccaattagaaccttggatccttcaacgatggtgatactaccaacaccaccaaggacgagattcttcaaggcattggaaccaataggaccacaattgagtaaacagatactcgcttcttccaaagtcccttgacttcacctcaaaatcctaatcaatcaacgattacttcataaaatttcctcccaacaagattcgttcgaagatcgatagaataatacaaatgtagagttcgaagagactaacatagtatacatgagttgacgatcgtacttggctttaggttccatcattgttagagatgagagatcatatgttcgtaagtcgtaaacagaggaagaagaacaagcgcgtcgtccacaagtccgcagacattaatagataaaccatgactaatccacaatccaaagttccaaacgcacccaacccgcaatgcccgctctttttttggactcccttatacaggcccatacctactctgcaatattactaaacgggccaggcaaaggcccaattgatatctttaccatcaacacttttttaaaacattgattttagtaaaatttatgttgtttaggaacgtcaaacgcttaaatagcttttgtttgacttgtagttttgcaaatatataacttctcttttgacgtataaaataaaactgaagaatctgaaatttggataacatgttaataatcttcttttaccatttttttcaaaagtattgtagttaaaaaaaaattgattattgtaagaaggggaaaaacatgaaggactacaagtctacaacgataaactaacgctgtctggttccggtttacagttcagatccaaacccaaaccctgtaacccgacccgattaatctcatcgaattctccgtctcgaacgccgttacaatccaacgagtttctcaacccaagattctgactccgtttcctcttcttagacggtaactctccctcagcaacaccgccgttaactttcgcaaccgttcgtgtcgccacgtgtactctccgtaatatcttgaaaaactcatccacctcttcctccgttaccgtccgaacaacttccgtcgacggtttccctctgttaccgtcagattttccgttatcttcttctacgcgttcttctttcttcaaagagttgttcatgttagccagaagaaaatgttaacggcgtcgtttaagcttagtcaagaaaaaattatttgctgattttattttgctaaaatttataatgaaactcttatagccgtcggtgtggaacttagacggtcgatattgtcaacaactaaataaattggacggtggagattgatgctaatgacatcatcatgcgatgttttaaagcgtaagtatcatgacgtcacactttattgacttttggaataaaggaagtccatgtgtggaaaaattggtatcggctatatttttagagtatatgtaagaaataacttttgacttcaaaagaatacacaaaataaccttggaccaaatagtatttgtcggctacagaaattttggcaatagttagtctattttagcctttctctttcttcttccttcttttgtttctttttcatcttctttacgagactttagccatggagttctctttctctcttcatctttaacacaattcatcttcttcagattcaccatgtcattttctttttctatttctctctccctctcctaaaataatcttcaccacctctcataaaatatatcatcatatctctttattttgttcacctacatgttctctctttctttttccatagaaatctctctatctctcattctttattttctctttttacctgaattttccgtcaatgtcgttgtgatataagagattagatttgattttaaaacaaatgtctgattttaaaatgcatgtattttaagaacaaaacatgttattaacactgatatattaatatttgtcatgctatccaataaaaactcatgaaataaataaatatttgtcatgttatccaataaaaacccatgtaatattgtaacaattctatatgtttttttaaacttcgcgatctataagagaattgcatgctttttataaatatttcgtgctatttctgagaaacacattatttcagagaaacatatatatcgtgtatatatattctgtatgtattttaaagaattgcatgatttttgtaaatatatcatgctattttagacaaatacatataaactttataactaaagccaatggcattattgtaaaaataagtaaacacaaggatatttttgtattttctctttttcagaaaatgttatttacctaacttttctgacacaatgtcattctctcaattcttttccatttcatagttagtttctaatattacccatatttttatatacatagagatctatatttttataatttaacaaagaccaaaaaaatttggccaaacaacaaataaataaggaagactaagaacttgtgaattgtgatcatcgttaacgtggggaagattttcttgcgattattattcctagtcttatttatttatttatttccactatcaatttaaaatgacacgtaaatttgtaatgatttttcgaataatgtaagcactaattgatattggtgttttaacttttaacaaaagaaaacaaagatctacatatgggcctaaagtaaaagccttttagttaagtacattataattgggctttatatcttaacaacgtcgaatcaattgtagggccgacgtgggcggctaagctgtttccaactttccaacttccgaccagctccacttgtgtctttcgctctctctacacttatgttttttttttttcaactctctgttttgtctgacgtgtccacttactaataatttttgaaaaaactttccacatataaaaattgcttgatggtcgtcgtcgatggctgcattatttatgaatgtattagtccacatggtgaaatgtctacattttaaacaccacgtgacactgataatccgacacttgtatgtgtgaaatcaatgtaatgatcccttactctttcttttttgtttttctttcaatagaacaaaaatattgcgaatttatctaataatgtttctgtaatactaaaattattttaaaagtttttatttaatatattgttaatttgtctaaattttgtcacgaccgtttttcttcatgaatagtctttgacgtagttgaacatccattttgtatacactgttataaatttgcacacattttgtgtttcaacaatttttaaaaagtatatatgtagtgtacaactttactttattattgctttactttttttttgtctattgtcgttgaaaaatgacatcaaatgaatctgttgccttccttacgtaggaaacgttttgttgaaatagtaataattagtaagggtcattgtatattggtggagaaaatgtttttcttacttctgtaattgcatcgtcttttcttcacgtagggtaggcaatcacatgcattcaggcgtgcgttcactgttttcttttttcttctagctttttgttttcctactatattgttgcagaaaaatgtttagtttaaactaaattaattatccaactctttaaagtggcaatcttgtaaataaaaaggggagtaggtctggaccaatgtggcaatgcgagcgatatgttaaaaaagctgtggaataaacaaaattttggaaattaggagttcctttcgttttatggaattgaaagaaaatgacactttcaatatttttttggtatttctttagtaaaaaatgttttaaatttttaatcgatcgaatcgtaatgaaccttacaaaaaaatcataaaatttgaagttgatatataaattttaatctagagatgttaactttttggattaatctggaagcgacctgttttaagttgtttcaaaactattaggaccgaaaccaaatagaatcgagcaaaaaatgttagaaatttttattttattttgtgttctttaggttaaccaaatgttcgttcatggtgtaagatatcaaataatggatgagcttaacctctaaaatacaagtttaaattgatcggttcaaatcggaccgaacttaaatgattttgcaagttattagagtgatcatgatcatgttatgttacggaatattacagagtaacttaacttaagcactgacttagttgacccaaaaagagaccattgacttcatgaaatgcttgagtgtggaaaaaataaaacagagttattcaaaaacgttttgagttgtgaattattctcattaacattgtatttatttggtgcacaaaaaaaaaaaaaaaaaaaattgtatttatttatacccactaaagatgggaagaagacttgtaaattatgatgaaaagtccctcggttggtagcaactagcaaatgtggggatggaacaatcctccacgttcgaaattgttcttctttagcacaatcaagatactgcaaagtaaactacctctaatgtaattaattaacctcacaaattgttatgttaattaatggtattgaattatactcgtcgatcttttgtaagatatttttgttgaatgccgaaaaaattatcagaatctataattgatgtttttgtttaagagtcaatttgggagaatgagttaaattactatagaatacaagtatacatcacatcaaataatatgaataattcactaaacaatgaaggagtagttactagtcactctcttttatttatttttaattaaaaaacgaatatatatgttattgtagtttaatactattaataaaataaaattctattacttcacttagctaaaagacccacagtgcagtaacagtgagaagtaaatttcatgaataatgtattacaatacaataataacttgttcgatacaaagtattattcctttcacaaactaaatttatttaccatatatccataatataattccaaaaatagtatgttttattaccatattgtaaaagggaaaaatgtcatttaaatcatcactttaccattttcgttggtttaaaacataaactctcgatttggtgatttaaatcctcaattttatgttgacgtttaatttaatcacgaattctcgttaactaagccaattaagacacatcgttaaaaaattttctaattaaaatttttgagtttttctctatttttcttcagaatctcttatcttctttggaatttctcttcttattcgaattcaaagtaatctttcatctttaggtcgattgacgataccgggaaaaaaaattgtgtctcaattggcttagtcaacgagaatttgtaattaaattgaaaatcaacatcaaattaagaatttaattcacaagatccaaaattcatactttaaaccaacgaaaatgataaagtgataatttaaaaaacattttccttatccctattgtaaaactattttcaccaatcttaaccgaaaaaatgaaataaaactgtccaaaaaaaaaaaaccaaatgctaataaaaaacgaatttaatttcccatcttcgttttttttctttcttttaatgctttaataaatttttattgagatctgtgtttgaacaatcgtttcttaaaagatttttaacatctttttaaattcctcggtctcttaaatttaccagttacataactttcttttatttttccgacataaattaaaagttttgtctttggtaatagagaggcagaaaaatcttggccatagatttgtcatctgttttcgattcgttttgattctttactttatcttcttcttcttcttcttcttcctctttttgaatcttttatcttctcacttttctttttcacttttgggaagctcgaagagctgagaggagtgtgagagagaaaaggatctttgaagtcgccggaataatttgtttaaccggagctctgtctttgactctacgcttctctctcttcttcttccttcttcgtcttcttaatcgctttctgctctgtttttctcgttcatcaagctacatctactagctctctcagtgattgatttctcacagtttcatcgatttccatgcgtttaagacctaaaaggtaactgggtttgctaaagtttgttactttgaatggtttttatagtttctctgttcgaatctgaagtgggttgttgtgtttttgctggttattgaaacaggacttgttctggggtaaaggacttttcttgttcttgagagagttcattttgaggcttttctgggaattttgagaggttttttagggtttaagggggtttggttttgaatttcgcacaccaagtgttcgataaaatggctgaacgaaagaaacgctcttctattcaaaccaataaacccaacaaaaaacccatgaagaagaaaccttttcagctaaatcacctcccaggtttatctgaagatttgaagactatgagaaaactccgtttcgttgtgaatgatccttacgctactgactactcatcaagcgaagaagaagaaaggagtcagagaaggaaacgttatgtctgtgagatcgatcttcctttcgctcaagctgctactcaagcagaatctgaaagctcatattgtcaggagagtaacaataatggtgtaagcaagactaaaatctcagcttgtagcaaaaaggttttacgcagcaaagcatctccggtcgttggacgttcttctactactgtctcgaagcctgttggtgttaggcagaggaaatggggtaaatgggctgctgagattagacatccaatcaccaaagtaagaacttggttgggtacttacgagacgcttgaacaagcagctgatgcttatgctaccaagaagcttgagtttgatgctctggctgcagccacttctgctgcttcctctgttttgtcaaatgagtctggttctatgatctcagcctcagggtcaagcattgatcttgacaagaagctagttgattcgactcttgatcaacaagctggtgaatcgaagaaagcgagttttgatttcgactttgcagatctacagattcctgaaatgggttgcttcattgatgactcattcatcccaaatgcttgtgagcttgattttctcttaacagaagagaacaacaaccaaatgttggatgattactgtggcatagatgatctggacatcattggtcttgaatgtgacggtccaagcgaacttccagactatgatttctcagatgtggagatcgatcttggtctcattggaaccaccattgacaagtatgctttcgttgatcatatcgcaacaactactcccactcctcttaatatcgcgtgcccataagttttgcagctaggtgttattattagctataggagcaacgtaaaaagctcgttgttactcggttttgtcttaagttattaaagtatagcagaggcagttaatctcaagggaagcaaaaaccctaaagatagaagcagatgcagttttgtgtgttggtgttactaaagaaagttttgttgacataatggttttgatgttgtggagaagatagagaggtgtgatcgaaattgtaaatctcaggtggttttttttgaaggcaattgtttctcatttagggtttttttctatatgaggattgtctttgaaaagcctttagatgttttctaattcgtaagctctctcaatctttgtaagttttgcctgttgagttattgatacatatgtgagacctactttatttgttttgtgctacatacattgttgatggtttcgtcctctgctcttgttaagtcattgttaccaatgtttgattgctgtttctttcgggttgattcagtcagacatgaagataactagataaaccgtttgttctctgcaatcactacctatagagttagggtttaggcttatcctctttttgcattatatcagtaaagttttctttaaaagttatgtgaacaaaaacacataatgcaagatagagaggttaatgggtttggttgatgataacagtaggacaaattatcaccgctctaattgcgttggttcttaaaccatttcttttataatatttaatatttgatctaattttcttaaagcaacctttgcgtatattacaagtcttgccaaaattttcaactagttccatctttgatataaagagtatatagtggtgtgttcttttgtgtcaagccatctctcaacttcagactgtagctgcttttggattttattagtttcgttttagtgaacagaattatggatatacattgaattgaacgtgcatattcattttgtttttgttttttcaacaaattaaaatgaattctaagatgtttttgtttttttgttaattgaattcttaagatgttgacagaaaataaattgaagtcttaagaataattgatttgagattttaagacttgtacttttctttggagattggagatttgacatgctcgaagtcgatgtatacaatttggttttttatcaagtgtcattctcattcgatggagctttttttttatcaaaaacgtggaaattagtgatttctaatgatctgaaataaaaattgggtttacttccatggtttttttttggacaaaggggtttacttacgatcaagcaatcaattacatagttattctggattagtcatttggtaatatttagcatcttatgaagaatcttaaacacgtccattatacaactaaatatgttgcaccatttgatggaaaaaaaatatgttgcaccaaaaaaatgatccaagatgttgaaacttgaaagaaaaaatcgaataataataacaaataggctttctggctttctatgttactgaaaggcccaatgcacgtaaacggagagcccacattacaaattaataatttttgttgggctagtgagaccataacgctatcatacgttgtaaatctgtacagcaagttaacaattacaataataatcagattttacactcttttatagataagtcatggtcaagactcaagagtcaagagtcaagaccaacaatcaatggcctagcttgtacaacaaaagacttaaggctatatagttttaatcaattagagtcacataattcacaaatatcaacgattatacaacggttgttattgagtagttaaaacatggttgatatagattagtgagaaaatattgattggttgacaatatatgaaagtgaaattatcaaaatgatattatacataagtttttaaaatatatccaaactcatttttattataattagaaactttttaaaaaatatagaccgtatgtgatctatttttatgaaacttaataacaaaatttatttgaaaatattagattgtaaaaaaataattattcattctgtagtttccggttaaaaaatgtgcagaaagatgagtttttagtttgtgggttcagtaacattataagctaatatttttttattagttgattacatattattcaaggattacatatgttgatgaatcctttaatttactcgtgttaacaataatccgtaattttttaagacgtgagggatacataggagagatttccatcgagatgcatggttgtttttgattccctcactcctgataagataaactagaatacgtttcgacgtcaaaatatttaaagatttgcttaactgaaaaataaagagaattttgtggaataggtcagaactatatttttaaattagctaaaggatatttttaatataattttgttaatggtcaaaaagacctaaaaaaaattcttaacaaaaaaaataaagagaatttggtaaaataggatagttttatgtttttcaataagtaaaatggactatttatgttttaaattatctaaacggtaatttatatagtttgaaagtagtataaaaaatattctgattcgttgctaatcgttctaaagtgctcaacaactacaacgaacgaccaagtccctttttccccgtttaggaaatgatgatgttaacttgtaaatatttttaaaatggttgaacaaatactgtataacctacttggattcaatgtgtcaattgttttactgcagaattcaaaaatgagtcaggattcgaacaaatgtaaatgataaaatatatggttgatattaaaatgttgcaatagcggcgaagccatgccacattgccacatatgctttgcttcaaagtcaagacacaagaaatgtgcatcgttgacccaccaaacaatattatgccggagagttgtagttcttttcaacattcaaagatcgaatagacaaattaaggcttccaatatatatatatatatatatatataaataaagacaaatatctcaaataaaggactcataattcttataaaaactatattataaacgtaagaaaaagaagaaggagaatgtgaaaagctctatttcgattagtattttgtaaactttataaacaaaatgatatgtttctctaacaaatactttaagaatgaactttgatagtttggctatgactttaagatatatatacctttcacatgactgaacgtatatagtagctttgaaaacaactaagaacaacttttttgcacatgttaatgttatcggtttctattaaattccataataaataaaaattgttttcttcatgcctgcatttacggctacatctttgccacacctgttaaatattcttggtcgataatatttgattcattttttgatccctttcatattttgtttccatgacgtctaaatacatatgtaatcgaacataagaaaattccatttcttaactataaaatcctttacatattttgtgtagctaatttagtaggtaaattaaaagttaatgtaggcatgtttaatatgttttcgattaaaaaataaacgtaagaaaattctattttatatgtttgacggtggaaaataaattgcgaaaaggcgaattaatttaatttattccgtcggcaaagttgaaattatgaataacatttaatatttacagattagagaaacgcgtcaacacaaaagattatattcggacgaaataatttaatttatttgacctttattgggcctaaaccgaagcccattatccaaacatataagtgtagagggaaacatgaagcatccgttgtatttttgatagggaagaaaaaaaaacacaaaagcggcgttgatttttttagattttccgacaagatttctcgtgagaagatttgtctgaatctttctttcgaagaggttttgagttaatttcaaaatggttttggagaaaaaatctgcattgttggaagatttgataaagaaatgcggcggttgtgcggtggtcgacggtggtttcgctacccagcttgagattcacggcgccgccattaacgaccctttgtggagtgctgtttctctcatcaaaaatcctgagctcatcaaaagggtttgtgaaaatttgtgttttttttttcttcatttctgattttgattttatccctaattttgaaaattaccatgataccatctttaggatttgctatgaacatcataagttattaagcataaaaatttgattttttcttatattctgattgatattttggtgaaaacacagatctttagggttttattgttaattcgaagatttttaatttctgggtctgaagatttggataacaatggacagagtttgatgaaatttttgtttaggttcacatggaatatttggaagctggtgcagacattgtggttacttcatcttatcaggtaataatataaagccaacaccatttttttatttgatttgttcattctctttcttgtttaacaatctatctcttttgtggttgtggttgtggttgttgtaaagatttacaaagttaggatttttaattagtttcagtctgacttcactttgaaagtatttagattttcacttaccggctttgttatttcaggctacgatcccggggtttctttctagaggtttatcaatagaagagagcgagtctttgcttcaaaagagtgtagaattagctgttgaagctcgtgatagattctgggagaaagtgagcaaggtttcaggacatagctataacagagctcttgtagctgcatctattggaagctatggtgcttatcttgctgatggctctgagtacaggtgcccttttaagcataaatgaattcacaatacacattgttttggttttgaatagattttcaagattctgtcgatgagggacttatagttgttcgatgttcttcttgcagtggtcactatggtgagaatgtaagtttggataaactaaaggactttcacaggagaagacttcaagtcttagtggaagctggtcctgatcttcttgcttttgaaaccataccgaataaactcgaagctcaggcttgcgttgagcttttggaggaagagaaagtgcaaatcccagcatggatctgcttcacatctgtagatggtgagaaagctccatcaggagagagctttgaggaatgtcttgaacctcttaacaaaagcaacaatatttacgcagttggtattaactgcgcacctcctcaattcatcgaaaatctgattcgcaaattcgccaaggcaagtagtagttgaaactttgttggattgtatggcaaagaaacatcaaaagtcttactttctatgtcactttatgttttcagctgacgaagaaagcaatcgttgtttacccgaatagcggagaggtttgggatggaaaagctaaacaatggctggtatgtaatgttacagtcttgttgaatatgattttactgcattaaggttgaagatatgaatctgttttgattttggggtaaatttggcagccatcacaatgctttggtgatgatgaatttgagatgtttgcaacgaaatggcgtgaccttggagctaaactcatcggaggatgttgcaggactacaccttccaccattaacgctatctccagagatttgaaacgaagatgatttttcttcagggagaaaagactgaagattctttttcaactttttaactagcttgaccattgttagggctatctatctgttttctgttgttttcttgttgttcacgttttctttgtggtttgatgatatgtattcgtaaactaggccttgggcgttttcaatgtaatggcccataaaatattttctttatcaaaattacccgatttgaatctttaatacacaaagtcccaaacttatgttgtaattttgtggttcctcataatttgtttttttttccataattaacaaccacataattatatttagaattactatttgaagaaaaaaacaggaaagtgattctttaaatatgtagatagttaaaaagcttgttctatatggttttttggcttataaacaataaaatttgtatccattcttttattgaattggtaccagaaagaagaaaaaaaatcttttgatccaccaaaattcaagacttccataaaataaaatatgtggctaccaaacggttcatgtttggtgtacattatgatttaaaagaaaaaaacaaacaaattattaaccgtacatcaagtaaaaacaaaatattttaacgttttaggtaagacaaatacaatacttacatgaaatttcgagaaatcgaccgactttataccctttattagtagtagttcaaggaaataatatagtagtcgtacattaggcaatgtgttaataaactaagtaataaaactatctatttgtctcctatacgtacatggccaagtttcatctaattattaattttcagatcagttaatttaaacggatatttttaatttgttgatgtgaaaaacttataccataatacaaaatattgtggcaaaaattagcgtataagtgctgtaaaaaaaacattaccgtataaatgaagaccacaaacataaagtttatagctaattattattatctttattcaaatatattattatacatttgcatgatgcatttatctttgtagatctgtttattagttatttttgatgatcatgcattgatgcatagctactatatttatgtatacaaatgaaaactgtgatttttgtaaatgtaaatataattaaatataactatttaaataacatggtaatttaactgaatatttgtttgttaataacttaatactaataaaaattgcatactttcttcatctccaaccgccaaaaataaattttgaaattaactacggaagagattatgaagatttatatttaatcaatttatatgtttagaatttagaagtctttgtttaactgatttgttgtatatgaagtaattaatatcttccaaaacatttactgtgcgaccattaattatatgtcttcagagtacgatgtattcaattaggtcgatactattatattagacaaaaaatatgatgatgtaaaacaaattagaagtcgagttgttttaaaatccatatataaaatttaatctttttttttttttttttgaacaacccgactgtaagatattataagaattcagaaatgagcatctagaaaaattacagtaagaaaacatgtactaattaagtgaaaataagactaaaaagaaagagtcaaagagattctgaaatccaaacagaaagggacaaagagaagacatgaaaaccccttcgccgcatactacgtggcgcttcacgcattggttactctgtctctcataaaacacccaaattcgagacctctttttcttaaacttttatactacaaacttattagcttcacattttttatatgtaaatgcttgacttcctaattgactactagaatacaatcaagtggcaataacaaaatgaatccatagaacttgttttgacccatgttttaaggaaatggtaaatcttatatcaaatctaatttgcatttgcattatgtatttttaatatctaaaaccattaaaagacatttcattttaaaataccacgaatttatcaccaatactatattttttgcaatgcatcataaatcagttctcagaagaattctaaaacgtacaaaagaaaaaaccgttcattttttgacataaattttcataagcttttagtaggtcatgtggatttcagttttacttatttccatgtagcttttaatttggtcattgtaatcgattacaagttgtctacgtttgattttattaagaattggtacaatggagtagatatattttaagtataaaagaataattccaaacactaccgtccataccatttattgtattttatcatttcgtgactgttttgaaaaaaaagtctcagatgtatcgtgttactaacttttcatctagttcgcaaatcccaatggaaattacatccttcttttaaccataatataccaaagctaatcaaacccttcaacaacaaaaaaaactaatcttttaccaaaaaaaaaaacctaagttaatcagcagttcatagaagcttaagtatctgtgatcgcttgacaaaaatatgaataaaaattgaataagatttagtgccatgatgatttaacacgtaaacctttgtgtttccctttatccattttacaaagtgccctacacaaatatatgctcatgtcttataccattaaacggtgactattttaagttcaaattttagataaatatgtaagatataaatttttggttgaatatttacattagaattatggagcagcatataaaaataaatctgaaaaagtataaaacttcaaaatatttatttatgtacaaaattataaacaggtctacttttagtatttattaatcagacaaatttgactctagagccttttaggttgtggaaaagggaaaagcttttggattggtcagtggtaaaagcaaagagccttttatgactgactcatatagacacatacaaaccacggtcaacaccacaagtcctgctagaaagtcaactgatccgacgatggtttaaaatctcaccatccacaatttttcattttgctcttcaaattttcttgcggtggtttaattttaaattttgttacaaataagtgcataagtaatctaactgttgaagttaattttcctttgagtttttctgtttcctgggccatgcaattgaagttaaatatatttagaatctcccggtttggtgaaaaatacaaaaacatattaaatcacacaaacattctgatataccaaaagttaaaccatctctctctctctatatccatctatgagttgtgcgtacaatttggaacatagttttaatcagtgatattatatattattttgattcgatgctaatgaatgtattatcatcaagaatgacgagtaccaagaagaaacgatcagtatttttctaattaaaaatctggactctttgtctaaaaatatgaagaacaattattagggttcatactcatcctcttcttaattatatgcagaattaaattaatataaactacatttcaaggaatatgaaatatatatatatatatgaaatggttatagatcagtgattaaaatctccaaaataccctcgtttttcccttatattaacgagaaaaacgtaggtattttgggtaaaatacactagttggttgatcattaacataaacaagaagaaaaatataaaccaaaaaaaaaaaacacatcaagaaactgcttctactagttatgcaaaggatccggacaacttggtactattcttttactctcactgatccctttaccgacaaaagaatccaccggtggaaatttcccggcgccgaagtacttcttcattagatcttcttcttgtctcttacccgaagccggagtttctggaaatatccgaattgcccctacccgtgaatatacacagaagagatggagcatataagaaagcaagatcaccattagaagtgtagtagtcaaagagcttctccattctcgagcatgagtcatatcccaaacctaaaccctaacataaagtcgtcttcttgattaaaccctaatcatcgattttatatctcttctttctgtcttgtcttctctgggttagatctatcttctatgactatttctgaagttgagagagagagagcaaaagattgaagttttgttttgtgagaagaagagtggctttcatgcaaatttaatggcccacgtgaatggttatatataaatacaagacaagatcagagaattgattaatttagtttttttttcgtttcattactagtacatattttcacatatctaattatgataaatagtggtatagtactattattggtgtacaactgtgtatatacagtatattatttaagctgtacgagcatatataaaaattaatttaaaatagttttgtctcttgttctggaattgtcaagaattattacattgtacattgctttataattagattctgtatctaaaattacatatacaaatataaacaatttatatattgattctttagacgtacgggaaaaacagaactttcaaaaatcaataaatgcaccacccaccaacgtacttacccatttttggtatgaatttcaaattgttgtcgttttggagttagctttatatagatgatgtagaataggtttactttggaacattattgatgtaatgacttggtacagttatatatacaagaaaatttgaatttaatgggtttgaatgtggatcattggatcttatgctaaacaaaaaccgtgccaccattcctttcaataatttttgtttatcatttttgacatacatgactaaagtctaaaacattagaccgtaaatggctatgagcatagactgtatattaaaactagtagcattgtgtgaaaggaattgtcaattaagatttcatagttatttaactacaaaataattattacaaataccaacaaagaaaacttcatattttattatgtaagcgtctcttgagaaaatctgaagatagtgtgacgtaagcaaatagtgattacgtttggttttgttcaatacaacacaaaattgttcctttggatgtttgtatgttagagatgagtttggaaaaagggtgtcgtttcattaactgcactttgccgttttgtgtttgttttgttcctctttctttctctctttggtttcgtctcttcttcttgccttctttcgcatcttcctcttcgtgtcagaattatgcaaagatcccatcatcattattattatgcgattccaaaatgcttttgtagtatttcagatataaggaactataaaattgtggatattataagatatagtatgtgattaattaaacatagctaaacaaaaaaaaagtgatacgtttgaatgaagaaaaaagagagtaaaatcattcaaacgtatcactttttggaaatcggttgtccgaagataaaagaatcatagtcttaaattataaaaaaaggaaaaatccacacaaaaagttaaagccaataaatacatatattccatccatttgaaattaagttgtttcttaaaacattaaaattttccacacaaatatatcgtggctttcatattgactattgtataattccgaacattcacaatttttttttgactattgtaattttatattatattatattatttttaaatagggacaaatgagatatttctttataaaagtcatattgaatcatatatatatatttttttctttttcataaaacgatacttagtttcaataaaacatttgtctaaaacacacttaatttaaaactgataagaatattatttcttaacattcaatcggactatttttcctttggaacattttttaaaaattccattttggggtttattttgtatattcaggatatataaattttctataagtaattttagttatacgggttatacccaactggactaattttgaatttcttttaaattcgatttatgttcattatatattttcacccaataggagttttttttttctttcttttcggtgttgtactactagtccactgatttaattttcttatgaaatagtgtgaaagttagacttacaaatttgttctcagcccaatcatgataatagctctataaaagcccatgtccatgtccacataaatcctaaaaaacatataatgactagagtaactacatacatagctgatagctctattatgattaaaccggtttgaactctgtttacacataacctgccataccaactgttgaaccggatcggtttgttatgttagccgatattgaagagatagattgtagttgtacaattacaaatttacaatccaaacaaataaataaaatctaatcttttgaattgaagatatagataaaatacatttacacacactttgctttaaattaacaataaatttaactaacatgttttcaaatttttttttttgtataaagtaacattagtttataataattaaatacaagtttaataaaaaaaaattctaatttcatttttttatcggctttctaatttcatttttgtttccttaaatacatttatacaccgaataaaattatttattagtttcctaaattatttatatatctctgaagaaaaaagaaaagtaaagtaaagtagccgcctcatcctcctcgtctcttctcgttagctctctcaatgaggagcccgatttagggtttcctccattggttatatcaattcgatcatctccacaaagctctcgaagactctttcggtgatctcatcttcttcttcttgtacgaatctctcactctctcttcatttcgcgttataggggtttctccaacatttgcgtttacgattctcactttttctgcttctatgaatacattttgatctgggtttttcgttgattgaagtattagctgatccgatttgacaaagtttgaaactttcgttgcttaggttaatctcttgactagactttttatcttgcttctgtttctcaatccgattaggcgatgaactcaggttttgtgcgattgcaatttgtatatatgactattgaagcttatcatatagatctcttgctaatcttggtttttaagaactgtattcctctttcaggcttgttactagcatttacaaattttcagtttgatgttgcttatgagaaggttacttattgcaggtttagcctcctggaggttactttgtttgttactagttccaaaacatgccgaaagagaggaaagaacggtccgtatctcttgataagtataaacgatcgccactgtgttgtgaggcaagccttgctttgaagccgagtgagaaacaagttaaggaatgggaagaggctcgttgtcctgtttgtatggaacatcctcacaatgggattcttctcatttgttcttcttatgaaaatggttgtcgaccttacatgtgcgacactagccatcggcattctaactgtttcgatcagttccgcaaagcttctaaagagaaaccttctttgtctttacttcgtgaggaagaggaaagtaatgaaccaactgagatggaagatgtggattcagactcaactgctgtaaatctattaggagaagctgcatctgagataacagttgtggatttaagtgatggtgagagaggagaagaagaagtagaagaagaagaagaagaagtagtagtagaagaagaagaagaaggaattgtaacaacagaagaagatcaagaaaaaaacaaaccacaaaagcttacttgtccgttatgtcgtggacatataaaagaatgggtagttgttaaagcagctcgatgtttcatgaactcaaaacatagaagctgttcttgtgagacttgtgatttcagtggaagctattccgatctgagaaagcacgcaaggcttctacatccaggagttaggccatcagaagcagatccagagagacagagaagctggaggaggctagaaaggcagagcgatttaggggatttacttagcacactccaatcttcttttggaggagatgaaataagtaacgatgatgggtttctatttgctgatactcgcttgcttacagtgtactttctcatccgcgtgtttagaccagaatcgagtggctcaaggagtagtagctggtctggtacatctagagctaggacacatacaagtgggagaagaagatcttcaagacctgcaagtctttggggagagagctatgaaggtaatacaggaacatcacctagagatgaggagaataatcaatcttctgatgaacaagtgtctggaactcggagacgtcgttctagaagaagaactgtcattgatgatgatgatgaagaagaagaaccgtgatgctctgcagtttggaaatttggtctttggagtttatgataaaatgggggaaaccttgtagtaataaccccacttatgaaaccctattatgtaaaatttctttggagattgaaaaaagtttctactattgggaaacaaaatgttcaatatttcattaccgtttaaatatctttttgataatgactcttcaaacaacaaaatgtaaatctcttcaccatacaaaaagacaaaggaattgtaattaacatttgtcatagacaattatcttctctgcagctttacaacactaaaaagagcttgaaactgaagtaatttaagcagaggctgctggctctgaagttgctgcttctgctgctgcagctctcttcttggcaaagtattcatctgctcgtgcttggttctttgcaacagatggcttaacccatttctttcttcccggcaacacagtgagtgtacaacctgaagcttcaagcttctcttttgcttgtgttgagaaggcacgagctttgaaggtgagcttcatgcttagttctcctgtacccagaatctgaaatccaagaccaatcaaaacgtttaaataaagaaagaaaagacgaaagcacaatcgaaagaagtaggatcaacaagtttggaaaactaaccttaagagggagtttcctttctctccctgaaggattaatcaaacccttttgcttcaatgtctccaatgacacttcatctccctcttgaaacccagctgtttctatgtctttgatattaaccggtaagtatttaggtaatcctgaacgcatacctgtttaaagaacacagtaacgcaacgatgcatcagaaatatatctctattggtttgagctaattagcaaaatcgaaccatgaaatatctctattcactaactacaatcttgatccatagttgtcaattcatggctctcttacccaatattaaatctatgaaacaaatgtgccctaactaaataaaactgaaagcagcatcaccaaatttaaacagagccttttggatgagacatttcatcgaacatttgggctacacaaaacttggataccaaacaaaaacaaaactttacctccagcgattcctctaagtttgggaagacgacgataaagagcagtttgaccaccttcaaagcctctcataatcccaggacccgatcttgatttctgacctctcataccaaaaccacaacttgctccttgtcctgcagagatacctctaccttttctcttctgcttcttcctcgaacctggctgtggtccaagattatccaaacggaatctctccggagctacaactgccgacgacgtagccgccgtttggctaaccacaacaaggggtctcgcaaattgctgttggtttctcgttttaagggtttggttgagtttcagagatagaatctgacttgggtttgcccccaaaacacttacatttccctgtacacatttcaaattccaattttacggattcattcaaaattgacatttgtagaagaatgagagattaccttgaatgaagtagaagataagtggagacggtaacaatggcgggaggtgagaggatttgatgagattgagagtggagtagccatggtcacagggaacaacagatgaaacaaagcttcaaggataaggttgaggaagatagatagagagagataactttcttgagaaacttaagagttaaacgacatcgtcttacataatcacttaattgtttattgggcctttcacagcaaatttaggccttttcgttttcaataaaagagtcgttactcgttcgtatcaattcgtttgtgtccaaagtgggttttcagataagctcatgtctgaattagtcgggatgatcaagacaccagtgccaataaaagaaacgataagaaattatagtatttatactaacttgatatatataaacacaaatatttatacacataacacaattataagttcaaactacaaccccaaatcaacacctgaaactacaaccccaaatcattacacaatctcaattaaccacatagaaaattatatatattggtgaattttgtaacttccttaatctttaatctttgcgaagtcttttcttcacgacaagaagagaacaatctgtattttgtgtacacctgcatttaattaaaagatgtttgttatctcaacttttccatcaatactaagttttttaactgatattttgaaattaaaagatgtttcttactttttgagactttgttgatcgctcgtaactattaaattgatatttcgttcttgaattatcttgcggattagatctttagggtctccatcatcagtaaatgtctctgccttgatctgttttcaacatgattatgatgagatcatgagactaaaatattgcaacaaatggttgtcatgaaaagaacttcatttttttcttttaaaactttggtatttaaaaatatatatatgatattgtattaataacaagttaaatgattcagtcaatagattattaccccatgatttaaacatatcttcttggctttctctaatatacccaaagcaattttcatattcttttcttgagccaatcttatgagttctgaatctgcaaaacacacataaaaactgatcaattttcaacaaaagaaagtactaggtgaaaatggatagaaaatttgatatttattgaaaactcccaacaaattagtcgataaaatgacttactaggtgaaaatggatagaaaatttgagcaaagccgactgatgaagaaagtacggtaggaggagtaaaggaattttgtggctgttttgcaaagatataaactttggagctctcaatggtatctttttggttttcaagtgcccaaatgagtaaatcataacttgcgttgctctcgtcaataatcagcataacattcttcatcttctctctttgtttcttcttctcctttcttcttctagcttctgctaaaacctcttgtcaatgtgcaactttatagtatatttggaagtggattaacttgtcaaaggaagtaatataaaaaaaaatcttaggtgattgggtaattgaaaggcatgggttaacgacttgattctggcttcttctcgtttgcaaaataaaataaaattatacacacaagtaatactatattaaacccgtgtgtagtggcaaagtaggtttggattagaaccaaaagcgtaaaatcgctataacttcaagttcaatcccacaatatgcaatcatttaaagaaattacataacgatttatagtgatttaatctccatgttatatcacttgatcatttagatttcggttcagattctgcttaacttgtgatgagtttgcggaaaacgttttactgaaattttcaaaagactagtcatatgcttattcaaattaggatagagacaatgctaagtctaacaaaaaaacatttgtatatcaaaaaagaaaacaatcgaataatatgatctcattctacaacatattaccaattctccattgaaatattccattaataaaatggtgtgagtggaccggtgtttggtaactgccggatacacgccattgatgacataaaacattattctctttgtcggaatttttaatcataattaaatatcattagagagagttggtaaaagaaaagacataattagctaaacgggctaaaatgaaaagttaatgggccaaacagacatatatccagcccattataatctctgcatctcctacctctgaatcccaaaaaccctagcgatttttttcttctctcccgagacgctctgtgatagcgaaagcatctgttgtaatctaaggtactcgatgattctccttttccattttagttctcatttgaagtatatagaactgtaaaaatttgttaaagttataattttgggttttaacggaatttaaagtctcgaactttcgattctgagtatgattttgatgctcatagtactactcttgaaattttagatgatgttaatggagatatttagcttaaagatgcttactttactcatctgttgagcataggatcgtcttaatctttttactcattacttgtaaatttcttcaagcaattgagacatgtagagatgagttatgtttttttcttttttggtgtcattgtgttaaaggttctgtaatggagaaatctagagaaagcgagttcttgttctgtaatttgtgtgggactatgcttgtcttgaaatcaaccaagtatgcagaatgtccacattgcaaaacaacacggaatgcaaaaggttttgatgaatctttcttgatatcatcaaatcaaaacaaagtttttgtttcttggttggtttaatcttattgctgtgcttttatcgttcagatatcatcgacaaggaaatagcttacacagtttctgctgaggtatgcatcatacattttgtttcggtttcatggagtagcaaaaatctctctgctcttgatttgtgttgttagtcaattgttattaggcttatgaatacacacacacagtagaaaaccagttctgtgctatgtgattactttcagacctgaaaaatggatgactgttttgttattcttgcaagaatatttcatcatgatctttgcttttggtaggatatcagaagagaactaggaatatcattgtttggtgaaaaaacgcaggcagaagctgagctaccaaaggtttgtttatacgaaacagatttttatgtacgtgtttttttctgaatccatgacttgtaatttttgatgatacttctctttgcagatcaaaaaggcatgcgagaaatgccagcatcctgagcttgtatacacaaccagacaggtatagtcctcaagctttttgattatgtggtttcaagttcttgtcttcttgtttcaatttcaaagtaaatgttttcatcggatttgcagacgagatcagctgatgaaggacagacaacatattacacttgccccaattgtgctcatagattcacagaaggttgatgtttccatcattgtgattcagatattcacagagcataccagttttgtttcttacattaatgttgcatattcaatgattcagtgccatcattagaaccttatgtatatgtaaaccaactcaattttgcaatgtcatgtagtgttctttaatcttacttattgacaaatattatcactttaatacgaaaagaatatccaaataagcaccagagcaaaacttgtaagcacgctcactaatacacttgcacgtcaaaactaatcttactccttaatccaacggctacaaatccgttgactacgatgactatcgtagatgcactgtacattatcaccacaccaaatcattcccacctctcagtttaaaaacccaacttaaacatttaaacctctcaaacagtttcaaaacaagaaccatggaaacggcgtcgtttaatccttcgtcttttctggctactttcccgtcgtttctcctcctcttcctcgccgtatacaccatcggctatttcctagttttccgtacatggaaacaatcatcacatttaggcgctagctgcttaatgtcactcttccacggcactcccgccgttataatggcttcccacgcgctgctcacaactccacgcgccgacgtacactcattcgcttctcccaataccgccgtggaatcaaacgtactcgacttcagcatggcttatttcaccgttgatcttctccattacttaatcttcctccctaacgacttcatcttcatcctccaccacattgcgaccctatacgttttcgccacgtgtagattcgccgtcggtcacggagctcacgggcttctcctcctcttgatactcgcggaggcgacgagcgcgtgtcagaacgtctggacgatcaccgggtatagaaaaaacgacgtcgcgttagcgaggagagtgagagagcttttgtctccgccgttttatcttttttatactgtggttcgtggattggctggtccggtggttttgtatgatatggcgacgttttacggtagcggtgcggcggatggagtggttccacggtgggcttggttatcgtggcttgttgtgattgggtttgctattttggttagtattttgtgggttttacgtaattggcttgattggtttagggagaataactctagcaagaaatacaagtgaattgtttaattgatagattcttagcaaatttcatataaatttatttgatttgtatttgtgtaatgcaatattaacagaattgtacttttatgtgaatctaaatcttattgtcatttgcattgtaaatatttcttaattgtttgtaaaattaatcttatgtaaaattatatatatgttaatcttatgtaaaattatacttgtcaatacttgaatgcttaaaccttttcttttcagcccttgaattttgttttgaatttttatataatgatgtcaacatcctttaatatatgatttggctaaaaagttgcctaactcatggtataagtaaacagttttagaaatgttcacgccacatttggccctcatgggatagcttggatgactcacatatttggtaaattatattaaaacgtttacttaaattggagttgaccaagaaaacaaattaaaagaggaatgtgtcatgtcccctcatgagagtttttagataatgttttttttttctgttcacaaaatatatatttgtttttcataccaggtctcttgctggttccatgtttatttttcacgaatggactctcccatttgtgagaaacttattcgtcaggaaaataaagaaattcaaatagattgattacacaaaatttaaattagccaagacgccaagacacatttgaatgacatttttaaatgagatgtggctcttaatactcaaatctgacctattatttgcaaaaaacaaaacatttaagttgaaaattttgtccacaagtggatgtaattatctccattggtttggtaaaccttgtcattttatttttagtaaggggttttggccgcaaaaatagaaaaaaaactacgcaaaccgcaatcttcatgagatttaatattttggattttattgggcctttccacaattttggctcaaatgatatttcactgacttgcaatagatatggcccaaataatcactagacagttttgaagaaaacataagttgtacacagtttcctcagacctaataaaacgtgtttatgtaaaaagtaaaaaccttaaatttgaaaatttataaatttttcagctaacttttaacattttccttcaaaaatatttgttaaattcgaaatagaaaaaaaactattgccaaaaccatacaaaaatggaaattcgataattcaacgtgaaatggaaattctcatatcgctccttctatatatacatggctttgctcatcataattttcatcaagcaaaaactcttactttcctctgtctttcaaagttcgttctcttaaatttttcttagcgatctttcaaaagtttccacaatggagatgttacttggtggacaagcaaccaatggagctcttcgttcaaagacgaagatagtttgtactcttggaccagcttcaagatcggtggagatgattgagaagcttctcaaggctggtatgaacgtagcccggttcaatttctcccatggttctcactcttaccatcaagaaactctcgataatctcagaaccgccatggacaacactggtatcctctgcgccgtcatgctcgacacaaagagtcctgtgatacgaaccgggtttctcaaagaaggcaaaccgatacagctaaagcaaggtcaagagatcaccatctcaattgattacaagatacaaggagattccaacactatctccatgagctacaagaaacttgcagaggatctcaaacctggtgacgtgatcctttgttcagacggaacaatctctctaaatgtcttgtcctgtgacaagtatctcggtcttgttcgttgccgatgcgagaactctgctcttcttggagaaagaaaaaacgttaatcttcctggaattgtagttgatctcccaacactcactgagaaagataaagaagatattatgcaatggggagttccgaacaaaatcgacattatcgctctctcttttgttcgtaaaggatctgacctaatccaagtaaggaaattacttggagagcactcaaagagcatcatgcttatgtcaaaggtggagaatcaagaaggagtaatgaatttcgataagatcctggagaattctgatgctttcatggtggctagaggagatcttgggatggagataccaatcgaaaagatgtttcttgctcagaaaacaatgatcaacaaggctaatgctcatgggaaaccagtggtcacagccacacagatgcttgaatccatgacagtctctcctcgcccgactagagctgaagctaccgacgtagcaaacgcggttcttgacgggacagattgcgttatgcttagcggagaaactgctgctggagctcaccctgagactgccgtgttaacaatgtcaaggatctgcaaagaagcagaggatttcatagattacgacattctccacaagaaaaccctaggaatggtttcgttaccgttatctccaatcgagagcttagctgcttcagctgtttcgactgcgcggagtgttttcgcgtccgcgatcgttgttctcactagaggcggttacacggcggagcttgtggctaaatacaggccaagcgttccgattctgtcggtgattatgccagagattgctgaatgctcggactcggtagctcatgtggcgagacgtggtttgatttaccgtgggattattccggtggtgggatgttcagctagagattcaacggaggagatgattagattagctataggatttgccaagacgaagggaatttgtaagactggagattccattgtggctttgcacaagattgatggttcatctattgtcaggatagtgagcgtcgagtaatccaattcttaactttttttgtttaaccattgtttttggtcacatgataataaagttttaaacataattttcagtttcattatttgtcgtagttgttgaaattttgaataacacccaaacaaactaataattttaaataaagttatatcacaagttttgttttggcctaaactaaattttctcttaagcatgaagtgaatctgcatcaaccccattatcagaatcaagccactgcatttcctgagtcaagtctttaatcatcatatatatatcttgacaaagaggatttgatcgatcttcagcattaaaggccttaacttgatttctaatctcaatccagctccaacctggaactttctttacacctctctccttcatcatcttcttcacacttgctttctcttcccatttcttgagatcactatacatatgagacaacgaaacatacgtaaaatgatcttctggttcaatctctagcaaatggttagccacttgagtagccatttcgatctctccacaagccctgcaaactccaaggaaagttttcaataccattggatcaggattcaacggcattgattcgattaactctttcgctttgttcacgagccctgctctgcctaagagatcaactgcagctgcgtaatgttccattcgaggttggattttgtaaaccggttccattaaattaagcaactcgagtccctcttgtattaaaccggtgtggctacaagctgtaaggattgctgtgaaggttacatggtctagcttcacgttttggttacacatttgggagaagagatcaagagagacttggcctaaaccatgttgagcgtatccaagaatcattgcgttccaagctactgtgctgtgtttggaggaaatctgttggaagcattttcgtgcactctcgattatgccacattttgagtacatcacgatcagagaactgattacaaactcgtttgatacgaagcctgatttagtggcgagcgcgtggatctgctgacctaattggagtgttgctaggtccgagcatgatctgagaagtgcagagaaggcgtaatcgtcgacttttatctctgaggatcttaagtagctaaagaactttaccgcatcctcgctgagacccttctgggcgaaccctgtaatgatcgaattccaagagataagatccttagattttaaggattcaaatagagacagagcatcttccatggtgcctgtaggaaactgaatatacatagagatcaatgcatttgttgcagaagttacttgttccaatcccttctttattaccataccatgcaaagacttcccaaaaatttgatgttcttcgccagagcaagcgcttaacaagccggtgtaagtataaatgtcggtttcgacccaatgtctttgcatttgaataaacagttcaaaagcagattcctttagctcatgtttagagaaacctgcaatcatcgaattccacgaaatcaagtcttttgagccacccaagccatcaaaaactctctttgcatctgatactgacccacaatctgcataagagctgatcatcgcattgcatatagtgatctcgtgttgaagcccgagtttcaaaaccttagcatgaacttgctttaacaagttacaaaacataggatcatcaagcaaagtaagaagtggagcgaaagtgccagcatccatagtcacagcagctttcatctccatcaaacccaacaaccaaaaagcagtcttgatatctcgcacttgcacaaatccagcaatcaaagcattccatgaaacagagttaggctctgaaatctccttaaaagcctcaaaagcatcttcaactctttcacatttcgcatacatatcaacaagcgaacttccaacatacacattacactcataacctccctttataaccaaaccatgcacttgctctccaagatcgaaccttttcacagaagcaatccctttcaacaacctactaaaactatacccatcaacatcagatccagatctcttcatacatgtaaataaacaccatgcatcctccaatttcccacagcttgtgtacccagaaatcattgtgttccaagacacggaatctctcttaggcatttcatcgaacaacatattggcataacccaagaagccaaattttatataagaatccaaaattcgattggatacgtatatatctgagatggaaccacatttaatagcgtaacagtgagtgagtgaaagcttttggaaagagtttaaagagctctctagtagagaggctaacaacgctttcattcatctgtttctctgtgttcatatgatgtcaacatcaaagagagtttattttattttatttatgtataaaaatatattttaattatgcttttttttggtcaaataatcagtttattattaacttatatatatacctgaatttacctagtaatggattatcaagtggctagttagtttgataaatttgtgttaataaccttatgtggattaataatggcttaattaagtaaatcaaaacacatttgaagtttgagttatttgtaaaattgtattttttcagttagactggaaaaaaataccttagttttttttttttttttttctagatttcggtcatgggtgtcacgacataaatttatatatacatatatatgaagtatatttgaaatctatttaaaaaaaaaagtcatagatgagtcgatttaccaatagaaactacaaaatttacctttcaacacttaaaaggcttcttaaaattttgattgatgcttcattcgtttatcaaagagacatacggcttaaaagttaaaaaccacatggcgagtctaaatccgtatggcagaaaactatggacttttctattaaatttttaaaacaaagttattatatatttaatatttggtgtatttcttttaaatgtaaaatgtgttgcaaaccaaaaataataattattacaatggtttgtagagatgttgctattggctaaaaataatttgttgtttttttatatttgatattttaaaaattctggtaatgatattatattgtttttttaaaaaaaattagtggattcgaccttaaactataataacccaaactagccgttgcaagtgcatttccgaggaagactagccgttacgctcttattcctttttttttctttttctttctttccttctttttaatccttccctcaaatatctttttttcccttcaaaatcattaaaaccctaagcgacgctgttaacacttgcgaattcaattttcaaaatcaccgatccttagactccatggcgtccaaaacagcggctgctaaagatatcatcactttacacggatctgctgccatcgtcagcgaattcttctgtacgtatcttcattttttcttagactcaatttcagatatcttcttctcgatttgatgttttttttttccttcttcttcttcctccaggttacgctgcgaacaggtgagaattggatcggaacttttcaatttcagtgtctggaaatcttcgattctgtgatttttttacagtgaaattgattcgttattggtttctgggtacagtatattgtataatcgtgcagtttatccagaggaaagttttgtgaaagtgaagaaatatggacttccgatgttgcttattgaagatgaatccgtcaaatctttcatgtctaatctcacttctcagatctccggtaattttacaaatgtcagacttttattcaatgattccttttgtgagagagtctgagacttgattttgtttttggtctaaagaatggcttgaagctgggaagttgcagagagtagtgttagtgattatgagtaaagctactggtgaagtcttggagaggtggaattttcgtattgagactgataatgaagttgttgacaaagggtcagttttttgtttttagtgttgatactttcgcaagtttgtttgttttctttgattctttgtttcattatgttatctttatggaactttttagtgtgtcgagggagaagagtgataaggagatcatgagggagattcaagctattatgagacaggttgcttcaagtgttacttacttgccttgtcttgatgaaacatgtaagaaccaattcataggaactttgagtgatcatcatttcggaactagtttgatttggattctcgtttttgattgtgcatgttgtttgtattaggtgtgtttgatgtattggcgtatacggatactgatgtggctgttccattcacttggatcgagagcgacccgaagttgattgctaatccacagatggttaagttacacggttttgataccaaggtaaggaggaggaagaattttgaaacctttatttatacactttgaaatgtctaagtattttggtggtttcatactttgcagattcacaaagtcgacacgcttgtctcatacaagaacgacgagtgggatgaagaagagtaacagaagtcgggacacacgtatgcaaggctctttgttcagcttgcgtttatctctttgggagttctcattgttcttaaaggcacgtgaatcctttattcacacacctatatcgttttctcttctgttttttttctttttctgaattgtatgagaattggaatcctgtacttgtgttgtgttttgttcaaaagttatcagctttttcattgtccctgtctcttgtactgaaccgttttgtttaccaatcaaactttatggctcttggatcaaaaagagatttctcaataaacaaatcaaattcctctgattcacaatggcatgtcaaaagaggtgcatatgtacagtgactgatgaaaataaagtattttggatcaaaaaaagctatttatagtgactgatgaaaaataaaaggtttcttctagccttctgtagtaaccgttttctcatctcattcctctgtataagcgaccggattgaagctcgtccatattgtctatgttttgaaacgcgtcaaactctctcagacatgtccatcctcgtcgagccaagaaatctcggtaatcttcttcggtgtagaatatcttctcctcttgatggactggtaacggatcagattcatcatagtggcacactctaacggctatccctgaattcaaatggatattgagaaacctctaaccagagagtattcgatgaatagcatagaagaaagagtggatttaccttcatcaatgcggagtatatagttccctaaaggcatgtctcggtcaagagagcgaataacctgttcttcatcttctagccaaaaagctcgtcttgttctcaatctaaacgcggatctgatagcttccttaattgcttcagcagtaccatcaatcccaactcgtcttgtgtaatctccaaatttcaccgttatgatcctcccagcaaatggctgaccatcaacgcctgcttcaaacatgacaacgattagtagtagttgccataaaagttcaaaagcttaataaacaaggagaggctctctctaagttagattgtctggttacttaccatttccaggggtgtctctccaattccaaggaggaactccatttgctgtgatgggatcagcagcaatggggagaggaagaccatcatgatcaagctccgtttcaagatttagcgttggcctgccattagctgcatacagatacaactcatatcaagactaaagtgactaacactacttccacaaaccaaacaaaatcggcttcacattatcactaacattctacaatttggtatgagttcacttttatttcactgaattataagagaatcataagttgttgcacaattgtttacccaaagttaggactgatacaaccatttctctcaaagtaattccccaactaaaaaagatttcaacaccaccatttatatatacactcaaagattcaataaatgtgagatcaataccttcaacagatgtaaatgaaataccagtatcttcaaaacctacaagaagataaagataaagatcaattttagaagaaaacccaaatttactataaaaagtcaatctagtttaacaaaccaaatctacaactttataattagccattaatggtcaaaagcctctttaaccaggtttagcactaaaagaggaacaaaactaaaaccaaaaaagatcagtctttatcttctcaatccaaatctaaaccaaaacccattaagaaattttatccaaacctgcaacaaatcaatcagaatccccaaaaccaagctaaagattgtacctttatctgtaaattgcataaaggaatcaactttagcagaagatggtgtagtagtagcaggactcttatagaatgccactttcttctttctttctctgaaaatatcttcaatctcattgtaataagacatcttcgttgatcctccacttgttgctttatcttcatgttgcttagctttcttaaactctttcaatatgttcctccacttgtccgtacacatagatggtgatcgatcaaaccctttctctctcattttcttagaaatctgttcccagagatgtttgttagatttggaagtgttgaaaagattgtccatttctctccgtaatgagattaaggttcgagtctcgtcttgtgcccatgtctctgctcgtttctttggtgctttgatgatctcatgatcctctcctccactgctttctccgaggatgatctggtgtggctgtagatctccgtttgatgtaacatcgccgatcatcatgtttatgtcccgtgaaggattgttgttatcggaaacaaacatgttttctccaaggaagaaggagagatagcagaagatgtcaaagattaatataaaaggcgcgtgagtctttaattatttgtcaaagcttatcttaaatttacataaatgatctctcttgtttgattattagatgaagaacaagaacaacccaaagatgcaaacttttaatagatctccaataataaagataagagtgttcaacaaatatgaaatggaacatatttttattgtttaaaaaaaaaaaggttctagagatagttgaagatcatctccattgaaccgtggagactgagtcattcaatcatagagaagagaaaggctcagatggaattttatacctagagagttaacttaggggtcggcttcgaacaaacagcacacaaaagctctaaacaaaacatttcttcgtattcagtgtcaatgatgcaccgaccacaatgataacacctctgtatgcaaagagaacaagcacggcattcctcagaacctttctttttccctttacaatcttctgctggacagtcatacacaagcttaaaattttgacactttgggcacatctcaatatctagtgcccggtcatcatcacaggacacacaagcttctcctctatggtaaaaacgcggcttctgaatagtctgcttgactttattgtcaatgttcaacaagtcaatcagttcatcgtagtgatctttagtcactccaaagaggccacgaagttgtaaatgcttcacttgaagctttcccgcagacttcagatccctcaagacgctcaaaataccatcgatagttatccttgtgcatccaggcacaccaatctgccaaccacaaaacaacattcggttttaataggatcccacaaatcaattcaattaccaggcacttctataaaaacttacaatattacttattagtaatccaaatacgctttaaagtaaattaaggaaagaagctcaccttgactacttgtcggttgcgcgccaccacccgcttaagacaatcatcagtaattctacagcaatctacgatcctcaaacactgcatagtaccctgagccctctcagttaaatgcagtagagcctcttccgtgatcttctcattcaacggtcgacaaatgtggatatgcttccaaagtaacgtgtcatcacaaacagtagtatgcaaagacttgcaaaccatactaactgaaagaagatccttccctcgcaagtgataaagacaaaaaccaatcgctggatgaacatacgcatcctcttctccattattgcagcgatcactacttcctacaacttcaccattcctcgcattctcatggctcaatacctcatcaacactactagcagatatgaaagcaccatgacaagatccatcaccatctaatgcccctccaaacccattattttccccactactttcagggaatttacatgtggaaaacagagacccatcaaacgccccaccaaacaatgactctgatccataactgtaaccactactctgaaactgcattgcattgttccaaaagaaactcaatccagcaaacagctgctgacggtttccatcaccaatccaaatgtcatctcttcttcttcttccatattggttattataatcatcctccaaatcctcaagccatccagtaatagccgtgaaagtattgttgatatccataccaaacggatcagatggcaaaacatcaagtatatcaacagaagaagcatctcctccagtattcttccttccattatcgaaacttgaacaccaattcccattggctatcatcattggttcctcagatagatgagaagaaaaaggtctatgtgaaaaatttaaagccatttctattaatctctatatacactttaaacctaacaaaaccaaaaaaatccctcttttgtacacaatccctagaaaaactcaaaaccccctaaagaagatagatcagatccgaagataaactaaaaagttatttttttttttggataatcgaaagatgaattaatagatctatggagagaaaaaggaaactcttgatttcagatggcaacaaaaaaatactaggcaccagaaattttgagagcttccttggaaccctaaaaaaccctagaaaagaaattcgaaattgagacgtattaacaaccgaatttgggtaacacaaaaagaatgaattgaataaatttgatttttcctttttttttttgttttccttttcttttttctcgaacaaaaactaaactagggttttcagaaattacgaaacctaaatcctaaacattatcaaagaagaagaaagatacgaatttgattgaattgaagaaattgaatcaccaaagaagaagaagaacaacgcgatcaacgggaaagccaaaccgaaccctcgccgcgaaattaaaacaagatctctttttttgtgtgggggaaatcgaattgtaatcaaacgaagtttttgattcaatcactttgggaattcaaagaagagagaaagagaaagagagaacgggttggtgaatttcgtcgaccgagtcaagaagagagaaaataatggaaacgacgagaaaattgtgcgaaaaatctcaatttattttatttttaggggttgagattttacgagggagagaaaaataaaaactattggagacaaaatcaattaaacaaacttaaataataataaaaaagaaagataagattagagtgaaatcgtcaaaatctttaaacacgtgtcattttttttgtttttttttgtcatttttcagtatgaagataaaccaggaatatatgattttttttcttttcttttaacatggattaataccagaagtgtttgagctaaatatattacgatgatatttatctatctgcatataaaaataaatgtgattacaataacaaaataaaaataaataaaaagataaatgtgattacgatgaataattctacataaatattaattttactgtgcatttctctttgtaacgttcagatcttcaatagacagttttatatgtataataaactttaattattgtaaaaaacattatattttattgttagtaaaatgtttgtttagtatctttttagtttgttgattttaaatagaattaattttgtctattgaaactacttttttttttctttctatttttgttttgatgttggtttagataaattcattattgggagattttgaaaactatcttgtttttgagttttcatttgaaaaatacatctttttctattttaaataaaaattgtaattcttgatatataagatgacaaatttatccagatttaaaataaaagttgttttattcataaattaaaacaaaattcgaaatttagaaaaacaaaattaaaataaaataaattcgaattcttaattatgttttcaactattttttgagataaaaagttattggttttagatattataaaattttgaaaaatattctaaagtctatcacctaataaacttgtttgcttatttttttggacgaaaatttgtttaaaatatttaagataaaaattaaatttgaattcatataaagtctatcactttatttattttatatattaaaattttatgaaacaatatttacaaatatttctaaaaagtctatcacttgataaagtttaattttactttttggacaacattttgtttaaaaatatttaagataataattatctttaaaattattagttacatcaaatttgtatttatgattttttttttgttttaagttttaatttttttttgttatttcctaattttactgaagctgttttagtactttatatattgaaaattaattgtttaaaaaaagaaataaagatagggtatttttcaaatgaaaacccaaaaataggtcatttttccaaatttattcattaaatattcagtgccatgagtttgagacatatttatttggtagatttatatacctagaaagtggaacaaataatgttttgctttaaaaaccacaaagattcacaataaaagaatataaatagatgtgatatagcaataaagatagttgtatcttgtacatagataagctttagtaaacaaaaaaacaaaaaaaaatatcttgtagatagatatcttaaatacgatccaataaaccaaggcaatataaaatctgaaattatttttttttgtgaaacaaaaactggcattttaaaagcacaaatcaggtaagaaatgtgttcttagttaatgacaaccagttattaaaatcatgtctaatggtttttaaaaaataaataagaaggaaagtgtaccaaataatatttgttaataagttctataaaacaacacgtaaagtttgatatataccgtgttttagcaaggaatacttcgtagaagaatataaacttggaacataataataaaagatgaacttaaaacttccaagattcgtctcttctttgtgacatattccagaaataaaagaaaataattgttcagtgaacacaacagaaaacgattactttttataagatatttattgggtcaatagtttatagaataatagaagtcaagtcatattacaaagtgttgaaaaaaactttaaatagtacaaatacgtcaaatgaaaatgtaacaattgtttttttttatcaaacacgttgaaacatggtaatattgggcccgtaaagcccataaggtcttgagaagagaagtcgcccataataaggtttggacaaaaaaaattaagtcattggagtcgtcgtctgtctttcccatattagggtcttcttcttccttttactcctttttttacgcttgaagcttcttctcttttcttcttttcttctcattgaagctttccttgttgcaggatttaatttaggattcacaattccaacacatacaaattgtttaaaaaatacaataagtcataaagtcagaatacgttaaacattgaaaatgtgaagtataatatttggttttctcttcttgttttttcacaagttaagaagtgtctgaaaaatagtcatggcttcttctcaaaaggtttctgattgggccttatgaggtattgagaaaagagaagtagcccattaaggtattgagaaaaagagaagtagcccattaggtcttgagcaaaaaaagaagttgagtcgagcaagcaagagtccctgactcagtcctcttttctcagctgtccagaaagtagaaaccctaaattcgaaaatggaaacacgaaatcgaaccatacatctcactgatgcgatatggacggagattctagcgaggttaccactgagaatcatcgctagattcaaatcggtaagcaaaacatggaaatcaacaatcgaatcagtctatttccgccgtctctttgtgtctgtgcaccgaaaatcctcaacctcgtggtcgctaatgtggtacggacaaaaagatctcgtaggtttccatggatgcgagacatggggtcttccaaagtctctatctttttacatcccatcgtctctttgtattatcgagggttcctcccatggattggttttgatttcagaaaatgatgatgattgttgctttgtgggtaatccagttttacaacagtggatcaaaatccctccacctccagttcactcttcagtgtttggtttggtgtctcgcgtcgacgatgatggctttgttttgggcttcaaagtcgttaagttagctgaagtaatagtgacgaataactatgtctcgtgttctttgagtgtgtttgtgtattcctctgagactgggatttggacttgtaagactattcactgcccttatcaaatcaccaactttggttctttcactttggatggtaccatttactttgaccatcttagtgaacctggagtgctcgtagcttatgatttctattctgaaatctccgatcagttttgggttatacctctcccggatcatccgaatcacggcttcaatagcgacttcaaaggtgctttgactacgtcccaaggatttgtcatgtatatcagaacattagctcaatcttcgtctaatgttttcaaggcttggaggttgaacaatgattcaacttggcaacttttgtggaaaatcggcctcccgtcacttatcggtgattatgtacctatggcaatgcatccatttgatagtgacattgtccatctttggagtcaagatcatcgtcatgtggtatcatggaacttgcggactcagaagaatagaatcctcggagctgaagataatgatgaagatcataaagattgttacttgaaccagcctgtttgtgaggagtgtatggatgagatatgcggctgtaaagcttctgtcaggttactacaacttgttctcccacggtggatggaatcggtgccttgtcctccccaagttgagatgatgaatacagcttcggtaatctcttacgttacttcaatgcaagagacaatgataaggaattggcttcatcaatgatttcaatatctgcttttttttcttttctcgtcttttggtttctttcttctatctagtaccatctatgtaatggaagacaaccatatccatatcatgcaatatttgcatcttcttatttttgtatcagttcaatgacatgttttgccatttcatctttctaagttgttacacaaattgtcacttcctttgaacaagagtttcttcaattgcagttttattccagccgcacgtagtttcttaaagatatgttattcgatagctttaccatatgtactagcaaaacgaactaaacgacggcgtacgtagcgtaaagtagtgcccgcttcaaaatttcgtaatcaaaaaacacaagaagacttggtagcccaatccacataattaaatactattttaaaacaaataaattaattaaaaaaataaagtagcaaaaaagtacgatcgatgaaactgagaccgttggatcaaacctatcgaattataaaaactagatcacgagaataataaaaagaaaaagaaaaaaataaagcagaaaattcatctccaaaaaaaaagaaagaaaaattcatacttccaaaggaaaggggaagaaaaacaaaaacaaaaaaatctcaagtcaacaaacaacaacgaaggtccgaagaactttgaatgttgttatcatcatcatcataatcagaatcatcaacatcatcgttgtattcttttctgggtattttctcttgttgaccttctaattatgccatctccgattatcgatttttgtagagcaatcgtattttatcgaagcccttgtttctggttttagtctcttgtctgaaatcaatctcaaaaaggttctgttttttcggggaaatgtgcagcttttgattgtttcattttccgattgtttcagaagaactggaatcgccgtaaagttcgaatttttttttgttagattgtacaaaagggtgttgtgattaaggaagaagaagaagaagaagataaaaaggttttttttttggctgttgttgtaatctgggaaagtttgggattttgtatcgatctcaggtttgtgatttgattctgtttctaaaatttattaggctgatctaggatttgagtttttttttatatggactttgctttttttctcagatggtgaaaagacgaagaagtgtgattgttttggggatatgattaaagaacctgaattgttctggtgttgagaataagaaactatgtggaaacagattctaagtaagcttcccaacaaaaagtcttcaaagcacgaacatcgtggacgtgaacacggtggccattcttcttcatcttctcatacttcaggtgcctctacttccaaaagcactgataatggcgccgcgaaatcgcatgctaagaacgcttctccagccggcaaatccgctgcttctgactcgggttttaaagatgggaatctaaagagtagtgggaacaacaacaacaacaacaacaacggtgtctttactccttatgaagcattgccgagttttaaagatgttccaaacacggaaaagcaaaacttgttcattaaaaagttgaacttgtgccgtgtagtgtttgatttcacggatcctacaaagaacatcaaggaaaaagatattaagaggcagacattgctggagcttgtggattatgtgaattctcctaatggaaagtttagcgaagtcggtatccaagaagtcgttcggatggtctctgctaacatatttagaacgctaaatcctcaaccacgggaaaataaagttatcgatgccttagacctggaggaggaagaaccttccatggatcttgcgtggcctcacttgcagcttgtgtatgagcttttcttgaggtttgttgcttcgcctgaaactgacaccaagctggctaagagatatatagatcaatcttttgtcttgcggttactggatttatttgattccgaggatcctagagaaagagattgtctgaaaaccattctccatcggatctatggtaaatttatggtacaccgacctttcatcaggaaatccattaacaacatcttctataggtttgttttcgaaacagagaaacataatgggattgctgagtttctagaaatcttgggaagtatcatcaatggattcgctcttcccttgaaagacgagcacaaagtgtttcttgttcgagttttgatacctctccacaaaccaaaatgcttgcaaatgtatcatcaacaattgtcttattgtatcacacagtttgtggaaaaggattgcaaacttgctgatacggttataagaggattgttgaaatattggcccgtgacaaacagttccaaagaagtcatgtttctgaacgagttggaggaagtactcgaagcaactcagccaccagaatttcaacggtgcatggtaccactgtttcgccaaatagctcgatgtttgaacagtctgcattttcaggtacctgtcattctccattctttctgaaataatagcacctcacatttgtttttaaactggcgaatttccccgtgctttgacatttcctgaaaaatgctctgttgctgttagtgttgggtttgacatttgcaggccatatcgtttcgacatactttaactgcattagtgtttcacctgtttatgttagcctattagattgttatataaaaagatcaaatgaaagagttgggtttgtggtaatgaaagtatctacgtataggactgttgtattgtgttctggataatatctgatgcagtttcttagctaaataaggcttatggttacatactttaattgtgttagtgtttcgccagtatatctgtgttaccttaccagcttatgagaagtcgttatagcctaccagttatatcaaacgagcaaatggaagagttgattttgcggtatggaaagtatcaatgtttaggactgttatattcagctctaggtgttactcaaggcaatttctaagctaaattgatatagtaaggctattgttaagtagaaagttacaaaagaagaaaaagtattgcgttgaagggtatctgttttggctaaacagtgactgcatacgatctttcacgggaaaagatcagtctagtaggttcaggatctttgtttcagtctattcatgctctgtctggttttcgcaggttgcagagagagctttattcttatggaacaacaatcacattgagaatctgataatgcaaaaccgtaaagtcattcttccaattatattcccagcgttggagagaaacgcacagaaacattggaaccaagctgttcatagcttgacactaaacgtgcgaaagatatttcatgaccttgaccctgagttatttaaagaatgcctcgcaaagttcaaggaagatgaatcaaaagcagctgaaaccgaagcaaaacgtgaagccacttggaaacgtttggaagaactcggagtgcgaaaggcttcataaagttagagttgtagagaagaaagagagagaaagagagcttctgtatcttctattgacatgttgttcttcagatacatacttgagaagagaaaagtttcatattggtctcttggtttgaaggaaaaaggaaactcaaagatgtaagattgttcctgttttgatttccattatttttatttcttgtttcctcttaaatcttcctgcttgttaaaatgggttatttttgctacattgtatgatcatcacttgttccactttcttgagacttgtcttattcattcatcttctgctttcatgatacctgcaaatattgcacttataggatttggccttttgtattttcagttgtatcagaaaaaaaatcgtatctttataagcaaaaaaacaccttttaaaaaaagtttttttaagttttcaacagaaactcaaagagagaagaccaaattgttggtttgagtattttgggtttgtggatttggttacgaactccataagtctaggaggaactctgaaaagatcttcatggagagatcggtttagtggttggatttgaatcttttaatggttatgacttcaactaaaaaaacactgtcgagagatgttgtttcttgtcttggtcagtgaaaattttctctggtcttagggtcttctctcagtcaccatcctctctttctatctctctctctctttactctctaatctttatccattctctctcttcttctctatgccaacgaagcaatagctatgaaaagctaaaccctttccttcttcttcttcttcttcttcttcttcgattgtttagattacttgggtttgacccaagtttgcttctttctatgattcatcaatctagatcttgctatctgggtccagaaacgattcacgcgcttcattcatgatataaagttactaccttttttttattttaccttctgggtcatggttttgtctgcttttcgtcttttgcttttgtctggatgattcataatctctcgagatctattatgttcacaagagttgttcttatgcgtggtgagatgatcttaggagtgtttcactatctttcttcaattcgggtttttagtttctgagatctgtttttgaagaatctgatctgagtttgaggaagtttgactaaatagatcgaagaagatgtttaagcagatacttgggaagcttcctaagaaaacttctgctaagttttgggataatggtgaatcccaaactctagataacaacaacaatcaaggaggaggtgatgaagttttaagccagagaacgtcatcaaatggagatactagtttggattgtgtttcttcttttgatgtattgccaaggttgagagatgtttccatctctgagaagcaagaactgtttcttaagaagcttagactatgttgtctagtgtttgattttgtagctgagcctcaacagaacttcaaggagaaagagatcaaaaggcaaacacttcttgaagttgtggattatgttatctcttcagggaatggcaagttccctgaatcagttattcaagaagctaccaagatgatttcggcgaatctctttagtaatcctcatcgacaatggaagaacaaaactcctgaggcattggatttggaagaagaagaaggatctttgaatccttcttggcctcacttgcagattgtttatgagttccttttgagaatcgttgcatctcccaacacagaccccaagatatccaagaaatacatcgatcatacattcgttctcaagctattggatttgtttgattctgaagatccgagggaaagagagtatctgaaaacgatacttcaccgcatctacgggaggtttatggttcatcgcccgttcatcaggaaaactatgaacaacatcttgtatgattttatattcgagacagggaaacactcgggaatcgccgagtttcttgaagttttaggatccatcatcaatggattcgctttaccactcaaggaagaacacaagctctttcttactcgtgtcttgattcctctgcacaagctgaaatgcttaccaaattaccatcaacagctttcttactgcgttatacagtttgttgagaaagattgtaagctcgcggataccgttattagagggatgttgaagtactggcctgttactaatagcgctaaagaaatcatgttcttgaatgaattggaggagatactagaagcaactcaattaacagagtttgaacggtgtatggttccgctctctcgccaaattgctcagtgcttgagcagttctcactttcaggtacagttaagagtttattaggtacatttacctgattcttagattcttgaattgttcataaaattcaactgcttctgtgtttttaggtagcggaacgggctttatacttatggaacaacgatcatgtcactaatttagtgagacagaacagtagaatcattttacctatagtgtttcccgctttggagaaaaacggtagcagccattggaatcaggctgtgaagaacttgacagagaatgttctcaaggttttgtccgatacaaatcctgatttattcgaagaatgtttgcacaagttccaagaagatcagcaaaaagcagaagatactaaaaagaagaatggagaaacctggagacagctagaggagattgttgcttcaatggcgaagtaagagttttttctgcactttacgtgattcaacaagaaatcggtttattgttttgttttgtttcctttacgcctgaaaggtatatacatttactttgctttgcttgcttcatttaagtatctggtttcgactttaagactagtttaattcagttaaacagtgtgagattttacctttttcagttcttgatttgtctgtatacttggttcatgtaaacatcttgttatgaaaacacgaattttctattgtctgaagtcacttagtttatcagtgaaagagattgctctaatataaaaattgtttctggaataatgatttcgtcctttagtatacagaggatctgttggcattttcctgcaagtatctttggattttgtctgttaaaaggttctgttacaacaggtttattcttctaaccaagaaaccgaagaaaagctctctgcgatgactcttagtcggtttttcgtcaggaggtttcaccagatgagagttgatgttgtctccagagatatcatcaaaccatcatctccaactccaaaccacttaaagaagtttaaactctctcttttagaacagctcggtccaacgatctttggtcctatggttttcttctattcagctaacaacagcatcaaaccaactgagcaattgcagatgctgaagaagtcgttatccgaaactttaactcatttctaccctctcgctggacggctcaaaggcaacataagtatcgattgtaatgactcaggcgctgatttcctcgaagcacgagtcaattcaccgctttcgaatctcctactagagccttcttctgacagcttgcaacaactgattcctacatctgttgattccatagagacacgaaccagactgcttcttgctcaagcgagtttctttgaatgtggaagcatgtctataggagtttgtatctctcataaactcgctgacgcaacttctatcggtttattcatgaagagctgggctgcaatctcgtcccgagggtcgatcaaaaccattggagctccggttttcgacacggttaagatcttcccacctggaaacttctctgagacttcccctgcaccagtggttgagccagagatcatgatgaatcagactctttcgaagagattcatattcgattcttcgagtattcaagctctgcaagcgaaagcttcaagctttgaagtgaatcaaccaacaagagtcgaagctgtttcagctcttatatggaaatctgcaatgaaagctacaagaacagtttcaggaacatcgaaaccgtcaattctggcaaactccgtgagtctacgctcacgagtctctccaccatttacaaagaactcaatagggaatctagtgagctactttgcagcaaaagcagaggaaggaataaaccaaacaaagcttcaaactttggtttcgaaaatacgaaaagcgaaacagaggtttcgagatatccatataccaaagcttgtaggaaacccaaatgccacagagatcatttgtagctaccagaaagaagcaggagatatgattgcaagtggagatttcgatttctacatattctcaagtgcttgtcgattcggtttatacgaaaccgatttcggttggggaaaaccggtttgggtcgggtttccttcggttagacagaagaacatcgtgacgcttctcgacacgaaagaagctggtggaattgaagcttgggtgaatctgaatgaacaagagatgaatctttttgaacaagatagagaattgctccaattcgcttctctgaatcctagtgtgatccaaccttttcttcatgttctctgattataaaaaccggtttagtgagctaaaccggatatatttgttgaaaaactggttctattttgactagccgttgggaggccactaaaaaggttgaaattaaaataacgggcaaaatttggtgatgtaataaataaatagtcctgaagaatcacctttttattatatactaataaattcagaagttatttttgtaagtaatctcatgttaaatttaaaaacaaaaagaatttttgtcatatttttttttttcataaagacagtttcattactctctattaatattaattaagcactaaaaataaaatttaacttggagcacactctcataacttaatactaaaagtttaatattagtgtttattattattaactaatatttttaaaagaggacaacaagaataaccataatgataattgatagcttatacgtaataataaaatatagttcaaaataataataaaataaacattctataaaatatacgtaataattatatacaattagataataaaaaaacactaaacatagttcaaaacaaaacaaggaagattagaaaatgtaaatacattattttatttctgtaaacagtagtatatatataataattaaatgattccacaattagatgaaacgttttctataaatgacgtaataaaaataagggaagtggccgttggggaaatttaaatcatatgcttagagttcggacctactttcagatttgcagccaaagaaaaagaagctaacaaagatttttcagttttcagtttctcagcgaaaccaccagatttggggataaaattagggtttttcgatctccagagaaaacaaaaaaaatgggagaatcaatttgtcttgtgagatctttctcgcaaccttcagagttttcatcgcgtgaaatcaacgaggttagtgcttaagatttctaaatctacaatcttggatttagggttttgataatagagattgattttgctagtgaaatttctgtgtatagtgtgttgtttgatgaatctgaagagaatttgagatttggtttttggtttttggcaggtggtaccgaatcgagtgcttacggaatcagtatcgtttggtagatatgcgaatgaaacactagcgtgggcgagatggtcagcttttactcagaatcgttacttggaagaggttgagaggtttactaaacctggttctgtagcagagaagaaagctttctttgaagctcatttcaagaaccgagcttcagggaaagcagcaacacagacgaagaagattgaacaagtaaaggttaaagatagtgttgagattgtttgtgatatacctaaggatattctcgttgattcagaagtaccactagcggtgaatagagaggtgtctagtaatgaggtggactctgttgttccatcaatttctgtaatagatgaaactggtaaagtggagaacttgaagtcagtggttgttcctgatgaggtaaatgcatttctgttacattgcaatttcctgtttttattttttctctctaaacgtccatggtgttttcagggcaattctacttctttgagcaaagaaagacctcctagttcttccggatcgaaggtctcaagctcaaaactggaatcttccgttgttatagaactggatcattcacttaagaacactaaaaaagagtcatcctcgagtagtacaaggtcacttagtgcatcgaagaaccgaagtagatcacctcctgagcccattcacatgtcaatcagctgtgtttcttctagtaataccgagaaaactattgtggggaggccccagaacggttctaggagtgcagtgaaagcagacaagaagaagagatcaggtccaagttcagttcacatgtcactcaattttgcttcttctactcttcgtacgaccaaagaagccccaaaaacactggcaagaaactccactacacagggaacaacttcaacaaatgctagaaacaaacttttcccaaagataaacgaaccaacgggagctttaaaaagctgcaagagaccattgtctcagacatccaaagacggttcaaccaatgtaattctcttcccaagtttctcttcttgcgtatatcccaagcatatttgctgagactgactcttacatatattgcaggcctctgctgtcacgttacccagacttcctcttctcagtaatctgctatcagaaaacaaaaggttactgatcaaaccatcttcaacaccaattcatcgctttatactattactttattattaactcaaccctataattaactttgcttcttctgatatacaggaaaaacatatctgtaaggagttcagtttcatgtagaatatccaacaatgagcaaagaaaaccttctgtcgggtaagcggtttaagtaccaacctcttagagaaatactatcttatgtcacttactgcaaatggcctgagttggttaattgaaagtgtttgtgttagttccctgatttatgtggacataagacgagatgtttttgtctaatgcattttgcagctgtgaaaatctgtcaactcatagcagaaccaaagcaaagtctttgactgtatcttctcccttcgtcttcagaagtgatgaaagggcagagaagaggaaagaggtagaactaaagaagatccttttactttatctttgagattatttgaggacttatagagccgtagtttaaaaaagatctcttttgttgtggatgtgtcttgtctgttagttcttcaagaaagtagaggaaaaaaacaagaaagagaaagaggataaattttcttgcggcttcaaggcaaatcaaaacactaacttagcatctgaagaacacaagaacccacaagttggtggttttcaggtatattcaactctcagactgtaacttgtcataaatttgggtattgaatctttgatgtatgacattataatcatgtgcaggtaacaccgatgaccctgacttcaccaagattccgcaggaaccaaactccaggaaaagagaacataaaaaaacctcatcaaactcctcataaagcttcctcaatgaagatcatcaacaccaaaaaagtagtcatggagaagcacaaaagcagcaagatccatccctcctccaaacagcagacaacaaaaagaactcaagaaaatatgtctcctaatattcttcagaactaaccagagacaaaccagatcaatcgattcctcttcttcaagtctctagatcatcgtaaagattcgacttttcactttgaagattccgaaagttttgtcccttcagctagtaatctcatctcaagcttatggtttaggtgactagcccttgattcagattgtgtaaccacaagcttttaaggagctgtgtagaatagatagaactcaagtctacttactcttcaaagtaactatgtactcaatagttctgtagtatcaatcttgtatcatttgtatacatagagatttgaaataaagaattatgtctacttttcaatttctcattgtgtttctttcttgaattagtatagacaggaacatggcaaagctttctgttttacatttgttttaaacgacgacgttttggtatgatgttgtgatgttgtgttgttgtggtgtgggcctctcgtttcagaggtgagagaaaaaatcttatctctgtggactgtgattgtgtgatgtttccatatcttcagcttttcttctactacatgctctaatcacgtccttgtagaggaaaagaaaaaaaatggctgcttcatcttcctctttcactctctgtaatcacaccacacttcgtactctccctctgagaaagacccttgtcaccaaaacccaattttcagttcccacaaaatcatcagaatctaacttctttggctccacactcactcactcatcgtatatctccccagtctcttcctcttctctcaaaggcttaatctttgccaaggtacatttctcgactcttgcattgatagattgtttgctacagttgggtaacaactagttctgggaattagcttctttgttagaccaatgttttttggacaatctaagttctgttccatttcttttttatatgtttttgagtattacgatataaatattagcaagacaatagattgttagatacacagccatttttgaataagaaacaaaagatgtaaatattgggttttaagtctgaatttaaatgttataagaacagatttatgaatgtgttagtgcagaatcaaagacaaaatcaaagaaacttgtaatcagtgtttgttttagagaccataaactttcacatacctgaaaataagcaaatgctagaatgttcttgaatatgttcaatcctttattcatatgatttaagctgacacggcatatgaactctctttaaccttctgtgaattggtctctttgtgatgtttggtgggcagcaggttaacaagggtcaggctgcaccagacttcacactaaaggatcaaaacggaaagccggtgagcctcaaaaagtataaagggaagcctgttgttctctacttctaccctgcagatgaaacccctggctgcaccaagcaggttgttaaatctttactttctcctccttcccgcattcattgatcgcatatttagtgtttctaaacgtaaatggttttacttgtgtacaacaggcttgtgctttcagagactcttatgagaaattcaagaaagctggtgcagaggtcattggcattagtggagatgactctgcttctcacaaggtacacacatcaaaaatctctggtttcttgaataaacccatttcttttttccggattttaaagagagtggtgggactttaaacattgttgcaggcgtttgcaagcaaatacaaactaccgtatacattgttaagcgacgaagggaataaggtgagaaaagattggggagtgcctggagacctgtttggagcattgccagggagacagacttacgttcttgacaaaaacggtgttgttcagctcatctacaacaaccagttccagcctgagaaacacatcgacgagaccttgaagtttctcaaagctgcttgatcattctctctttctcttctttctcttctttcatgcatgtctcatgtctgtctccatgagaccatgaccttcttatattgtttctgttgagtatgaattttcaataataccatgttataccaatgagaagggagttggctttggtctagtacaaagatcacaacaggataagtactgaagtgtggttaaaatgttagttggttctgtgtatttgagtctctcgttttcattgtgaacacctctactatctctttctcttgtatcaattaacacttcaagtaaggtacacatatcaggtaactctagctagcccttgattaaaattgtcaaacacaaagctttaaggaattgtgtagaatacatagaactcaagtcttcacacaatagttttagtatgtgaactcaagtactcaatagtgttgtggtctcaatctaatatttgaaatttaaaacggttattttcgcattgtgtttctttcttgatttgagtatagacaggaataaaggtagagcctttggactgtatgaagaatatggcaaagctctgtttttttacgcatttgtattaaatgacgtcgtataagtcggagcaccgagggcctctcgtttcatgagagaaacaaaaaatcttatctttctgacaacggtggtggtgtgtgatgttgtcagccatggcaaagacagagctacaacgatctctctctcttttcttcttcttctgtgtctgtctttaaatagagtctctttgaaacgaagcagctttgtcctgttctgatatccatggctttaccttcgtgcttaaagactggagctttaatgtctccggccactggatttaatttttccggcagtcttatgaagtcagacagcggcttcgccgttccgacaaagttacagagtactcgaaaaggtgatcgagagagattgagagtccaagctattttcagtttccctcctgcgtttctgacaagaaacggtcgagctgagaaacagaaacagctcaaacaagaacttcttgaagccattgagcctcttgaacgtggtgctacggcctcgcctgatgaccagcttcggattgatcaggttctttctctttcttgtgggaaccattagggtcttgagaatagtcttggtacactagggtctagagaatgtgattgagagactaatgctgagtgactcttgtctgtatggagccagttagcgcgtaaagtggaagcagttaatcccaccaaggagcctttgaagtctgatttggtcaatggaaaatgggagctcatttatacaacctctgcttcgattttgcaggcaaaggttagggcttgtgttgttgttgtgttgtctaagtttgtgttcttttgccttgttgtgtcattctcttttatctcttgaacaatgcaacagaaaccaaggttcttaagatcaataaccaactaccaatctatcaatgtggatacacttaaggtgcaaaacatggagacttggcctttctataactcggtaatgtttcattgtggcttgacttggctcttaacaaaggattaagaccaaacttttatcatcaatatagctctttggagagtctttgctttttataagtaagattcctttagcagagtttgtaaaatgagtctcatacattatagcaaactacaatgttttcataggtaactggagacataaaacccctcaattcgaagaaggttgctgtgaaactccaagtgtttaaaattctcggatttgtaagtacaaaactcttactgctatatgtgtatccactataagagaacctttactgattcagacaccatatgcttctgttactgattggtgtttgctgtgcagattcctataaaagcacctgatagcgcccgcggtgaacttgagattacctatgtggacgaggaactacggttagtagtgaatgatagttttcattttcatgttttatcaacaaaatatccaaaacgtttgaatattgaaacaatgttgtttttttgcaggttatcaagaggtgacaaagggaacttgtttatattgaagatgtttgatcccacttatcgaatccctctttgatctaccaaacaaatggtaccgagccatccatcatacatacttgctacaacttgctatgtctctcttcatcatgtatgtaatctaacataagaaaaattaataagagggaaaaaatgagacgagcttctgtcattgtttcaacttgttcaaatcaaagattctgaatcttgatttggttgagcagttagttccaatcctaaactatgtgatgctcaagcagtacaacaagaagaccttgaagctcctcaaaaatgcttagatcattttctctctatatctcatatttttctttcatctttcattcatgtctcatgtctggttccatgacctttctacattgtttctgttgatttatgaatcttcaataacactacaagttaaaccaattagaagtgagttggttatggtccggtacaaagatcacaaccggagaaggattgaagagtggtcaaagcgatggtcagagttggttggttccgtcgaaacaggaagaaaggtagagcctttttgacaatttgaagaaaatagcaaagatctacttttccacatacgttttcgacgccgtaatgagtcagaaacaactagggcctctcgttttagaagaaaagagagcaaaaaaaccttatctttgtgactttcggtggtgtgtgtgatgttgttgtcggtcatggcgaagacagagctacgatctctctctttttcctctcttatgtgtctatcttcgaacagagtctctcagaaacgacccagccactctttaaaactccattggaaaagctttgtcctgttttgatatccatggctttaccttggtgcttaaagactggagttttaacgtctccggccgccggatttaatcatccatcggacagtggcttcgccgttccgacgaagttactgagtattcgaaaaggtgatcgggaaagattgagaatccaagctgttttcagctttcctccaagaaacggtggagccgagaagcggaaacagctcaaacatgaacttgtcgaagccattgagcctcttgaacgtggtgccactgcctcgcctgatgatcagcttctgattgatcaggttcttgatttctcttcatgtgggaaccattgagaatagttttggtacactagggtatagagaatgtgattgagagactaatctgagtggtgtttgttttgaatcatgatagttagcacgtaaggtggaagcagtaaacccaaccaaggagcctctgaagtctgatttgatcaatgggaaatgggagctcatttacacaacatctgctgcgattttgcaagcaaaggttagaacttgtaatctttgaaacttgtgttgttgtttgtttttggcttgttgtgtaattttctctgtctccttgagaatgtaacagaaaccaaggttcttaagatcgttaactaactaccaatgtatcaatatggatacactaaaggtgcaaagaatggagacttggcctttctataactcggtaatatttcaaaccgcgactgaattctctttttgtaccattttcacaagtaggttttgcgattttgcgttgtgttagaccatatacaaagctcttttctctgtgatgttgaaacctattgatgtgatccattgctatataatattcaaaatgtacgaaagtttgagactttgtcacatatatgtatgatcatgttccattgtgactcactaggcaagaacaaaggaggactaataccaaagtttttatcatcaatattctttcagcagagtttgtaaaatgagacttagcaaactacaatgttttcataggtaactggagacttgacacccctcaactcgaagacggttgctgtgaaacttcaagtgtttaaaattctcggctttgtaagtattaccaaaactcttgctgttataagggaaactggtagtactgactcatacatacaccatatgcttcttttactgatcattagtgtttgctgtgtgcagattccggtaaaagcacctgatggtactgcacgcggtgaactagagattacctatgtggacgaggaactacggtcagtagtgaatgatagtttttcatttctctatggaactgacaaccaaaaacatttgaatcttgaaacaatgttcattttttacaggatatcaaggggcaaaggcaacttgttgtttatattgaagatgtttgatcccacttatcgaatccctctctgatctatcgaaaaaaatagtttcgagctatcatacatacttaaaatcgcttgttctgtctctctattcatcatgtatgtaaaaatctaataagagagaataaaaagagactagcttttgtcaatgattcaacttgttttgatcgacattgcaccacattagattaaaaaagctctaaactttgaattcggtacagaaaatcagaaaaggactcatgtcctcttcttttgaaatatgttacaataaaaatttggtttcatttcttcttctttcttggtgcgttttctctgataaacgacgccgtatgaagctggcgagacacagacctctcatttcgacgctttcttcttcgtgaaactcttcatttgttttatattggaaacagagtctctcttatgaatcaaagcgacaaactttgagaaggcaggcgaaaatctcggatgggttccatcgctctgcaatcttggagcagaggagcttcaacttctcttcatctcctttttcgtccaggtaggtaagtgcgattcctaacttgatatgatcatatatatgagaattcgacaaagatttttggttgaaatttgcttacttgatgatcagttggctcgaaccctaagctatatgatgctcgaagagtacaagtaagattctttaatgttgccgcttcttggtccgaacagatgatctcttatactatagtctgtttattttgtcttttgggttttaagtttgatgtaagagcctcttcaagtcgtaaatcacttaagaaactcaaaagagagtcacaacaaggtaaagacataggcttaagaaatgttacagatgaagaagtttcttctccaagatttgaggaagctcaagttgattcttcaacttcaaaggactccattgatgtttttgttgctgctcctcgagacaaagtgcttcaggcttgcactgtaacttccggtttgatggctgcactaggtctgatcatcagaaaggtgaatcccaaatctgaaagtttatgattttgtgattctagcatttgtatcttgctgatttggttaccgcttgcaggcgtctcatgttgcttcgactgaaggattactggttccagactgctctatagatgtaccatgtaacatctcggaaaacgattatgttgtgtactaagaatcctttgagagattcagtaaccaaaacatgttttgtattgcatgatctttcttgcagttgggtttgaaacttggcatctcggtttaattgctggaatcgttgtgtttatatcgtcaagtaggttcttgctacttaaatcttggccagattttgctgattctagtgaagcagcaaaccgacaggtcaaaacattacacattatatacatttatacgattctttaaactccgcttattgtctcctttggtattcactacttgcagattctcacttccctcgaacctctagattaccttgttgttgcaatgttaccgggaataagtgaggtaacaataaacaatcacaataaaacacagaaaggctctcctttagaaaatgtcgttcattggtttgatttggtgtattcacaggagctgctgtttagaggtgcattaatgcctttgttcggaactaattggaatggtattgtagcggttggcctcattttcggtttacttcatctcgggagcggaagaaagtattcttttgcagtttggtaagccgtttttactgaacattttggtacctcaatgctgatgagaattgcgtagaccgaatcttgatattagatgattgcctttaacatgttcttgcatctctctatcacatttccgaggttttcctattgaattctttgcggtttcttgaaattttcagggcttcgattgtcggtatagtctacggttatgcagctgttttgtcgtcgagtcttatcgttccaatggcctcgcacgcactcaacaatttggtgggaggtctgttgtggcgatatagttccaagatcaagtcattggagtgaaataaacaaaatttacaacagggttgaattaaaaaagtatacaattttaatgggtgggtttgtgaaatctctcaatagtatagggtggttatgtcaaaaatctataatagagggtggttattgtaattttaatgtaccaacttgtcacaaaggacaagtatgaaaaatctataattatagaagtgaaaagtgaaaaaccaatcagaattgttaccggaaaaaggaagtgtcttctggtcaaaaaagtcagagaagaagagagaaacgtgaacaatgaagagacagagacgtctcttctcttatgcgaaagtgtgaatcttttaaagctttttgtttcaacatcgataaatgaagtttcttttattgaatttatagaaatttgcacactttaccttgacattaaagcaacaagctttgaaaccaaataaaatctcaaaaacccagaaagcgagtggagaagagagagctgatatgctacaatagaaatggcgagtggatgtgctctacatggtggttgtcccagcgattacgtcgccgtcgcaatttcagtcatctgcttcttcgtgtatgtgttcgagcttaaaaatcccatttttgggttttagttttgaagatctagatttttcatttactgggtttgcttgttgactcttgacttgagtcaaaatctcgaattttgtgtctttaatcgtttaaaattttcatacgatgtctctctttgctattttaactctttgtattgtaagtgtttgatgttatgtatcaaaagatctgtcttttgtttcgtttcagtttcttttagctgggaattagatggtttcagtatcttgatagcaagattcatatattatgtcggaatcgattattgaacttagatttgaagttcaaaagcttgatttaatggactaattgagtggatttgtatcatgagttaacttccaagtagttcaatttctctattaagttgattctatctgatggatttcactttgtttatttaggctgttatcgcgctcagtgttaccgtgtttgattcataaggctcctcgtactaacagtagcagtttctggatccctgttattcaagttatctccagcttcaaccttctcttctcaattatggttagactacttgacttgatgattccgttgctcttaagaatcacttcatttgttgagtttctacactaatagactgttttatatttaattttcagatgtcagttaatttgcttcgattcaggacgaaacattggtggcgatattgctatctttgggcaggtttgtttggaaaccatgattcctcatcttcgtaaacaaattgacagttatatcaataagtcttgtataatttggtttcagtgtggattgaaggaccacttgggtttggtttgttgatgagctgccgtataactcaggcatttcaactatacttcatatttgtcaagtgaggttcaatgttgatcaaaatgtttttggattccaattctatctctattggtgtaattgagtttaatgctgtttggttgttacatattctttgcaatgtaggaaacgtctacctccggtaaaatcatacattttcctcccccttgttttgttgccatggatcttcggagctgcaagtaagaattgttctgaacgttatatgtactgagcagttcttggtttctcttgttttggataataataactcaaagcttttgattttgcatttagttatccacgcaacaaagcctctcaacgataaatgccacatgggtcttcaatggactttcccagttgcaggccttcatgctctctatgtccttgctttaattgcattcacaagagcagttcgacatgtagagtttcgttttgacgagcttagagatctctggaaaggaattctcgtctcagccacttcaatcgttatatgggtaacagcgtttgtgttgaatgagattcatgaagaaatctcttggcttcaggttgcttcaagatttgtgcttttagtcacggtatgaaagctaataccaggactgttctttatatttgcagttggaatacctttttaacagacttctgagttgattcttctttcagggtgggattctcgtcgttgtcttcttttccatctcgagtaaccaacctcttctttcacaaatcagcttgaagaaaagacaaaactttgagtttcaaagaatgggtcaagctctaggcattcccgatagcggattattatttcggaaggaggagtttcgacctgttgacccaaacgagccactcgataagcttcttctcaataaaagatttcgccattcgtttatggaatttgctgataggtactccattcaatacctgacctcatatatatcccggtttcaccatttatttaaactaattcgttatatgctggtagctgctacgctggagaaacattgcatttttttgaagaggtgtatgaacatggtaaaatcccggaagatgattcgataagaagaatctacatggctcgacatatcatggagaagttcatcgtcgcaggttaattacatatccatcttccctcttctttatagacctgtctcgtgtgttctctctataaatctaactagtaattccttaaaacacaggagcggaaatggaattgaacttatctcataaaacccgacaagagatcttaaccactcaagatctaactcacactgatctcttcaagaacgcattaaacgaagtcatgcaattgatcaagatggtaaaataacatctctctttcactctcttacgcacgccttcaagctattctcttgattctcatttttttgtgctcatgaatttgaagaacttggtaagagattactggtcatccatctacttcatcaagttcaaagaagaagaaagctgccacgaggcaatgcataaggaaggatacagtttttcatctccaagactgagttcagttcaaggctctgatgatcctttctatcaagaacatatgtcaaagagttccagatgcagtagtcccggttaaggagtctaaaactggtactagaccagaacccaaaccaatgttcatagcaatccaatccatgtaatcttccttcacatttcttgtacatgtcattttctctcttgttatacctaactgtaagagaaaatgtccggttcggattttggtttagttttaaatgtgtataccggacaaaaactatggaaccatactaattaatatctcgaagaatttatacgtatatgccatctgtttcaccaagaataaaaaagcacctgcagattgatcttcatgtccttgcagagtgatgatgttgcatcacatgtttcatgatgtgatgacatatccattggcctcgctaaggcttttcatcaacattttgacataatgtttttttccaccactatattttgacgtgtacaacatctataacgagaaggtgggatggtcatcaaatatttcaattttagaatataatttgttactgaaaagagaaagttgaagaattttttaggtttatcatatgattaaatgatattaaaagttttaaatatctataaaatataaaattaaatattgttgagcagcaataaaatgtctttaggtaagtttttaaaaaaaaaaatcatctgttaccatttaagctctaaattattcagtaaaattctgcaagaaatgtcaattaaaccctaaattcagtaacttagccagatttattctgctgttaacatataaaaattaaatgttcaaaaaataaaacttatatgtgtaggtaagaagtcttgtcagcgaatgaaaaaaaagtttaaattaatgtttcattattatggtgaatctttcccaaatattagtggttctcatctcaccataaataaatattatttcccaaagaagttttttttattttatttttggctgtctaccatatggttttggtatatatatgggtagcaattattgggtgttgtcgatgttctctccaagatagtttataaaactaaaaggaatctttatcagtttatctttcaccaaattagttaatttcaatatatttttttggttaaattgtttagcttatggggaattctctaaatagtaattacatctattttctgttccaagactattatgaataaattttcgaaaatgctacaaattagttgtgataatgttatttccttttcattcttatatctcaatcttaatatcttcattctatctttgtttaaaactcaaactaaaatgaaaactctataacatctagacatgaaaactctcactaaaatgaatttaacaaaatttacttctattttcggtgaaaataatactccttataaacatgaaaaagaatgaggatgtcatcatagtggataactatgtaaggactcatgagtaatataatcaaattattagcagatattaataaactactataaagatccgttggatagatagatagataacttgttctaccactcaaaccaagttttggatgcacacgtctatatacacacataacacatgcatacatgtattgatcatcatgatgttatattccattacaatcaaacatatatgtgacatataatcacaaattttcttataatttgttatgttatttactgagaaagagatctgatcgctttataagtccgcataaagagacaccacaactttctttcttcttcattcacttctatcaacgccaaatttgcagactttcccaggaccaaaattatattaaaaaaaagttccttttttctgatcaaattgtgaaattcgcttgcttgctttcttcacagtcaattaattctctaacaaaacattcttcgatcgttcgttttcatcttctatgcttctctgatcagacacaagaacacaaccaaagaaactcactatagcttgtctgtagattctgatgttcgaattcttgttgttgatgatgattgaattgatgatgatgatggtttgatgcagatgggttttcaaaaatctcatcttttttcttaacaagtaatcatttttatccatctcaagtctctgttgaattttctatgattttgtctctgattgtgaatctgggtaatgatcaaactgtagtattagttactaacatttccccaaatggattgatctctctgatgtgtttgtttggtcaatcaaaattgatttctgggttttctgttgtgatcatggtaaggtcaaaagttttgagtttccgtgtgcagaggagaaggagtagtcctttgcgtgtgacaaactgttttcttattatcttccgtatcagatccaatctttctttaagattcctttttcatctttatagaataattcattgttgattcctacacttctcttccaagttttcttctttcattcttggttgatttgatttgattgattcacagattctttctctgttcttcattagtcaaaaggtttcaccttttctagtttctgtttataacaattgattatgatttggaaccttacttagtttctgtttcttatgtagatcaaaaagcttagaacttgttgaacaatactagagactagagaatttgcaggtaagtttttggggatcttgttctgtttgttttctcatatttcaggctaatcagagtgtgactttcttgtcttaatttgtggttttgtagataatctgtttcaaaaatggatgctacgagtggaactccgagtttacagtatattaacttgccggaacaatctgtttcgactacttctcctcctgtgtcaccatttcagaggccaaaacgacattgctttggtgacacaactccaggagagtttcctttagcagctaacccttccattgtcctacatgttctcactgaatgtagattggatcctcgtgacctcgctaatctcgaggttttgtttcgaaaatgtcggaaatgttttactgaaattttcgaggattgattgttctgctgatttgattgttgttgttgttgttgttgttttaggcaacatgctcgttctttagccagccagcaaactttgccccggacattaacctatcactatcggagctcgctgctctcgacatgtgtaataaaagggtgattttcaagccgatgaatgaagaagaacgtcaagagatgaaacgtaggtgcggaggatcatggaaattagtccttcggtttttgctggctggtgaagcgtgttgtcgaagagagaaatctcaagctgttgctggtcctggtcatagtgtagcagtcacatcgaaaggagaagtttatactttcggatataataactctggacagctaggacatggtcataccgaggacgaagctcgaattcaacctgttaggtcattttccatcatcatcaagatctgaaaagagaagaaaatatatgctcttggcttgatggagtttgttatcgtgctgtgcagatcattgcagggagttcgaatcatccaagcagctgctggtgctgctcggacaatgctaataagcgatgacggaaaagtttatgcgtgtggaaaagaatccttcggggaagctgaatacggagggcaagggactaaaccagttacaactcctcagcttgtaacatctttaaaaaacatatttgtagtgcaagcagctattgggaattactttaccgctgttctctcccgagaaggaaaggtttatacattctcgtggggcaatgacggtagactaggacaccaaactgaggctgcggatgtcgagcctcgtcctttgttaggcccactcgagaatgtacccgttgtgcagattgctgctggttattgctaccttcttgccttagcctgtcaaccaaatggcatgtgagttccttttttacactttcttttctactttagaccagttcaacaatattataggttacaacaaatgtagtcatatttgtatggttaaactcttttgacaaaaataatttggatcctaaattttttgctatgtttctatgggtcatgtgcaatagaacactatgcaaatgtccaacagcagcactgactctgtagcatgcttattttaggtctgtttactcagttggttgcggtttgggaggcaaacttggtcatgggtcaagaacagatgagaagtatcctcgggtcatcgagcagtttcagatattgaatcttcaacctagggtagttgcagcgggtgcttggcatgccgcggtggtaggtcaggatggaagagtgtgcacttggggttggggaagatatggatgtttaggtcacggtaacgaggagtgtgaatcagtccctaaggttgttgaaggtctaagccatgtcaaagcagttcatgtcgcaacaggagactacactacttttgtggtctcagacgatggtgatgtttactcgtttggctgcggcgaatccgctagtctcggtcaccatccatcctttgatgaacaggttagtgattggccatggcctccattgtttcttttgcttacattatatgttctaaacttatgtttagtcgtatgtctggtttgattttttgttgcagggtaatcgacatgcaaacgtgctaagtccaacggtagtaacatcgctaaaacaagtgaacgagcggatggtccagataagtctaacgaactccatatactggaacgctcatacatttgcgctcacggaatcggggaagctattcgcgtttggtgcaggcgatcagggtcagcttggaacagagcttggtaagaaccaaaaagaaaggtgtgtaccggaaaaagtggatatcgatctcagctagctagctgacttatgtggtttggttggtaagaaactacgtttgacatcaaggaaacaaaaacgcaagaaaatttgcgtttgctttttatgttcataagacttggaagcttgtacaaaaaggggaataacataaacttgtctttaacatttcattgtatagggtttttagattattctaattgttcattggttaagttttaggttatgttgttaataattatcaaataatttcattaaatcaaattattgtcagattcaatttctaccaaatttttattttattttctgttttcatatttgttgggtttacatctatatatacatttttgcagccattttgtgatttacatttatatatacatcaataaatcatggagttggaacttatttacaatggttaccactggcttattcaatgcgaaaattaactatcaaataaaagcaaatcttattcaaaagaatatgctcttattccatggcctagttatttttgccaaaatggttaaaatatttaaaaattaaataattatttgaaagaaaactttaaattgatttaaattataaatcttttaataaaaatattaataaaaaaataaaataaaataatttcaccgaacatgattagatagtaggactagatggtatgacatgtttataatattataatatataaactttataacaattaaataaatatttgaaagaaaacttctaaattgatttgaattaaatattttttaaattaaagtattattaaaacaaaaataacaaaataatgtctaattttactgaacagggttagtggtaggacgggtttggtcgatagtattacgagacggtataccacaagtgaaatccattagatatgtttaatttcattgtgcatgattagatggtatgacgggttttgatcgataataatacgaaacgatatactacggatgaaatcctagatatgacaattaaaatctatatatatattatcttaaacactaaataaagcaaacaatattaataaaacaaatatctacatatacattttatataacaaattttattaaaaacctagccccgcggtataccgcgggtcaaaatctagttagagtactaatattctatcgaagaaaaatctaaaatcctatttctcaaattgtttttgctatatttgataagattagaatttagaaaaagcttaattaggagtagaagataatatgtaatttgcaattttttcctcaacctttaatatttttggcaaaacctcaaattgcgttgagtcatcttagcactttgatcaaacaactatataagcaaagaccctcattacacaattcaagataaataaataaaacaaaatacccataaaacatttttcaaaaaaaaaaagttttttggggattactaaataactaaattaaaaaataatggcgcgtcttcacctagctctcctcctcctcttcgtcgctatctccgccgtgatcgtatcagctgctgagaacgaaaaaccaccgtcaaccaccaccgcctcagctcccaccgctacaactccaaccgatggcattggaggtgatatagcagagggtccagctgatgacaatgctattggaacaactgacaacgacgatgcagctgttactcccgatgatgccaatggagatgatgaagtggcagtcgccggacctattggaagcgatgcttcgtacgctaactatcctccaccacaaaaagaagcttccggaagcgatgccaccgtagcttttggctttgtctctgttgttggtgcagttgctggatcgctcttctttttctagagttgtgatcggcgcgcgaacttattactattgtaataaaaatgtttgtaatattttcttgttttagatgtattttgacgatcccttcttcgatgtaacattgattatattgggatgatacatatttaatatactaatataaagaaagttttttatttgtggggttaatatatttctgcatctcataaatttacaaaaatagcccacaatatatgggccgtattttctcacagggcctagcccatcaacgtgtgagtaagcgcgtgtttttcacgtctaaaaacctccatatcttctccgctagctccggaatagaagaaattttgcagagagaagcgtcaatgaaggtccaacggtcaacttttttggcggtgaccggaaaatcaaatcttcatcactttcactcgtcttctcaggttctcttttctcttctctgcgtcatctaaatcaattaaaaatcgttccttttgtcacttctaagaatacccatttgcaattgcagaaaaaaatctgaactttttctgatttcattgcgttttggggataatgtcttaatcaatttcagagaattcccattacttccgagatcgattcacgagagtttgtgtctaaattactcgatagaaaatggggattacagtgtcctgcatctccaattcagcagattagtgtttcttctgtcaaaggaatcgataaattctccttcttgaacaacactcgtccacatctcggagatgaaatgtcgaagtcgaagcaaggatc

SEQ ID NO: 465 - DNA, 9642 bp, Arabidopsis thaliana
ttctttttacattcttagagatgatcttttacatcctcttgtgaatggtaacaaagctagaaagcttgatgctttgttaccacttgttgaagatcataaagtgactgatttggtgagaatgtgatcacttataatatctctcaactgggtttttttttggaaatggcttaaagtttagaagtttttttcttgtgtgtaggttacatgtggaggttgtcaaagtgcacatacagctgctgttggtaaaagtttgaatctttagagaagaaatggtattgacttttgattgcaatttgaatcagttatttgtatatcttgcagctgtttcttgtgctgagagaggtctaagatcacatttgctactgcgtggagaacagcctgatgttttgactggttataaccttgtttcaactatgtatggaaatgttcagtatgttccaagatcgaggtatgcgaatagagaggaaatgctaagaacttatgcggatcttgttgctggggaagatggtactgtcttatgggctaaagacattgttgagggacgtgacactatgaatgttgcaaaaatggatgatttttcgagtatgaaaacttctcgtagaaaggttttgatcgttaatgaaggcgcaggagatgctcttgcattacttggtaaagattgatttttgatatctagtttaggtagtggaccagatcaatgtggaagaattgaccaagattattgtttatgcattatagttaacaaggactttgttattccgcaggtatgtttcggttagtgcagcatttgtcacaggatcatttactcgggaagaagaggccggttaaatttgtagtggatgctggtactggaacaactgctgtgggtttaggagttgcagctatgtctttagggttaggctctgctcacaagatttaccaatactctttgtgtatgcattttatctcattgccgagtcttgaagcatcttggttaccagcttacttatacattcttctcaggcttccatgggaaatcaatgctgtgatgctagctgatacactcaaaaattacaagagacatgaagatcacttgatagcagaattttcgaggcagtttcctggctcagtcttctgcagcggcttggatatgaatcaaatgatcaaatggatagatcgtcaacacccgagaaagtacgtgcatatgcaagttcttcttttcgctattgaagatacactgaaaatgatctttttcactccaagtttgaagctttagagtggtttgatctatcaattatctagttccttttgttcttgcagatttgggaaggtcttggaaggagaagtggagatgtgtcggaaaattgcacaggagacaggagttttagtggatccaatgtatactttagccgcttgggagacagcaacagagcttgtgcaggacgagaaatcaagcattgtagtgatgcttcacactggaggcactctagggatgtttggtcttgctcaaagatacaaaacttgcttcactaacttgaaagattaggatacaataaccaagacttagagccagaaatctaaagatggttgtataatcatgttgtatcttcaatctttgttttgggttcggttttagcaaacctataattgaactctaatcaaaataattttggttcagtggtggtttgggtttgtatggtaaaatactaaagttggtatatctcatgtacagttcccgaaaagaatcatacttgtagaacaaataagagattgaattacgtggtaagcaagaagtggtatttaggtaaattattactttaccttgaaaaaaatagaaaacgaaaaccaagattatggtttttggtcgttggtttttggggagtcttcttctcgaaccgagattttcatgtgcacgtgcgtttggtcactacttcgtgtttaacaaacactttccttcactatactagtatccacattaaacaatgatattgctttttaaagataatttgattctaatatcattaaaacctttttgtatgaattttaaactaatgatttcgtgaatgtgtgtaataatgtaccctccttggacagttggactcgcgataatgtatccttaagagttaagtctttttttttcttctgtttttgggtgcaacctaagagttaagtctctagctaacttttaaccaaaaatagaaagtctccagctaactattgctagaacttaaatgttttggagattagacacataaagaaaagaaaacacacacacacacactagatattttgatattggagatgctaaaaaatatactcacctcctcaacatatgacaaaatgaacgaaaaggagggaaaaaaaacacaaagcaaaaaagctcaattgcgactaaatacaaagtgtatgagtactaagccgcagacaaaccctaagctacattttgtggtgaactatacgtctatacgtctatacgtctaaaccgaaagcccaaaggtttatgtggatttaattttgatctttatttcataaggttttgttttgttttccttctatgatgtgagattccttttcgagtcgaacttacctctttaaattacctcaatttaaaaggttttatgcggactatactaccaatctttacctatcacataaactttagatcccaaactaaagtttcgcttgcgtagctccaagaccagctttggttactatttttttgttatgatgtctgtctatagaattagtagctggtattcatatggtttgcttgataatttatagtcgttgtggttaaagttcaactgattattggtccaccaaataatattttctacgataagttgagaaatttatttagacaatgcagcatgtggtgaaaatatagttaagagttttagacggttaaaaattacaaactatttggaaaactacaaaaaaaaaaaaaatgtttcatattctccattaaaatttaattttatcgtttaaacgctaaaatgttgtcaatcgaaaatatttagaaccgtatcgtcgttaatcgaaaaaaactctattatgttaccgctatagtatactttacattgatacgatacgacgatgtataacaaacaatgaaaagtgagattcggagtacgaatgccatatataagatactgcaaattatgagtgagacaaaagaaaatccaacaaaacaatcaaaaagtaaaattctccgatagtccaaaaaagtcttcccataataatcctccgatatattaccataaggtccataaccattttttccttatcaatttatttctaatcacattcaattagtagcttttctttacactgttttaaaaaatactaatcgaaacttaaagatgaacattttccacgtactcagtattcgtgtcgcgtagggactttctatattacgcctcgtaaaaccaaagaacccaaagcctacaacaaaaagtgcgtaggggtattaacgtaacttaacaagaggatagtaataataaattcgatttaacataaaaacagtcattttcgagaaacttaaatgcttacaacacaaaaaaataaacatttgttctcttccactgtcttgtctgtaataagagcaaagacagagagagacgacgttacagtatctctctctcacacgatcaagagaaacttcatcattcgtcggaaaatatcaactctggtattaatggaagactccagactttttccgttcgtcggaaacttagaccctcgtgctcaagagtttataccattcaaccctatctcctccggttttcactttccgtacactcctcctcctccacagcttcctcctccgttacctccgtcgtcgtacggattatctccgacggagccaagagttttcacattcttcaatatcccaccacatccgatgatgttttctcctcctcctcctcaaccaccaccaccaccaccgcgtccatgtttcaacggcgtttcggcagctcaacggcttcctctgccgtcaaatactccgacgcgatctctctctttgatctccgtaccacgtgacgtaaccgagtctacggtgagacgtgacttggaggtttacggcgacgttcgtggcgtgcaaatggagagaatctctgaaggaatcgtgaccgtccatttctacgatatacgtgacgctaaaagagcggtacgtgaagtttgtggtagacacatgcagcaacaagctagaggtggaagcgtctggagctcaccttctacttcatcggcgcgtgggtttgtttccggtagacctgtgtgggctcagttcgtagttccggcgactagtgccgttcccggaggttgtaaccaaggaacgttagtaatatttaacttagaccctgaggtctcttccattactctcagacagattttccaagtttacggtactgttcttttttttttttttctaatttctatgtcttgatttagtttactttgtttcctcgatttgtggatatgtcaggaattaaaacattttacaaagactttaaaatgttaagctatggtataaattacattattatttacatgaatcatggattcattgtttgcatgctatgaaacatctttagcttttgaatatagattatattggaccgtttgtttatgtgagaatctatgtttcaggtccgatcaaagagttgagagagacaccgtacaaaaaacatcaaaggttcgttgagttttatgatgtgagagacgcggcgagagcgtttgatcgaatgaatggtaaagagattggtgggaagcaagttgtgatcgaatttagtcgacctggtggaattaagaacaggttcaggtcatctaggcaaccgcagctaccatttcaaccgcttcgagagccaccaatcctaattcctcctttgaggcggccagtatctttcatcaaagataaaaacaagaatgtgagccctaaaaatggagttattgctgttgatgcttctatgcgttccttatgtatcatcgatgctgacgataataagactcgaggaacccgaggaacggaatccgaatgcgcggagacaaaaagcaagaatgtggctaagtgggggaagaaaagacagatgaagaacatggaactaagtcagtttcttatcagtgaagaaaccatggaagatccgagttgcagagatccacgtaccactttgatgatcaagaacataccaaacaagtacaggttgggctttataatctaatttatttagtatattataatatttgaaagtttttcaattattctctaagaaactaaagactaaatctttctaatcttcaataaagtaattatatggatttaaagttcgaagcttttgcacactctaggatgaataaagatttagatctttcattaaaatattcacatggattcgtgtgctatattcaaagttttatattctagataaaattctccaatgttatgttcaatcaaacttttaattatattcttgttttgatcataccttaattgactaacattatcccttaggattcttgtaggttttttattttatgagattccatgtgtgaattttctaaggttttcagtgtttttgtttatatagtcaaaagctactgttggatatgttggacaagcattgcattcacataaacgaagcaatcaccgaggagcacaataaacatgagtctcatcatcagccgtattcttcttatgatttcgtgtatctccccatggatttcaagtaatcgagcatcgaaattcaatgacatatagtttttttttttttgtcaaaattcaatgacatatagtatttgttatatttatagctaaaatcataactcttttctttgttgtgatattagcaacaagtgcaatgttggttatgggtttgtgaacatgacatctccggaagcagcttggaggttttacaaggcatttcatggtcagcgttgggaggtttttaattcgcataagatttgccaaatcacatatgcgagagttcaggtataatatacacattaatgttttgaaatggcaaactaaataaacttgaaatggtcacaatgtgtttattttgttaaaccaacgtcttgaattttatgataagtatgatgatatggtcacaattgtgtttgcttgacaaaaaaaaaaggtcacaattgtgtttattttgttacttttgatcgccaataaagggtttggaggatctaaaggaacacttcaagagctcgaaatttccatgcgaggctgagctatacctgccggtggtcttctcgcctccacgagatgggaagcagttaacagaacctgtctccatcaacataaccatcaacggctgcaccagacttaatcataatcattttgagcaaacagtcggtcaagatcactttctgagtggatcatgttgtgacagtgaccatgataacagtcatgaagatggattttccggcagtagcgtagactgtggccggagtatcaccgtggaaggagaaacatctttctaggtgttatctgtaatgtgtatcatcatcataagatataacaaagtgtaagtagacatcattttggttagaatttgtatctttttttttttttttttttttgtatgtctgaatctaaagttctttttggtcatgacatgaattaaattacgcatgcaaagttctttttggttatcaacatgaattaaacgactcctgcaaagttctaaaaggtcacatctggataactctttttcttttcttttgatataatgaaagtgtagtaatatttagatttaagttcttactttttaaatacggatataaaattgataggagaccgaaattgggttgacctagggtaagagttctttttcaggcaataccatctttgttctagtgttagctgtcttattcagtgacctgtgaaagggacaatagaggactctgtgctagtgatgatcacattctgtatctccctctgattcatggggcactgacacgtggtctgatatccaccttacttggtgcatggcagtgttgatagtgatggttgactacaactttaatcttatgatgttagagatatcttaagttttttaaaaatggttcttcattgaaggattatgaaatattaaagtgcaatttaacaatgaaaaatcacttctagggtattaattgaaagatttaggatgtgactgcaaagcgttttagaacttttaaatggttttaacattgctgaatcatcctttaccggtcatatttattttaaaagttgtatataagatccactaaaagttttttcttattttacagcaattagtgtacaactacaagtacaacaaccttaaggcaaaaagactcccccttagtgttttttttctgtcaaccacaataaaaatcatcttgaaaatatagatttcgtataatttgacccccaaaaaacagattgatttcttatttaataaatttaaggttataagtgtgacttaaaatagactattttcgtaatacacacacattagttagaatttttaaaatacattttaaacattagtttttaatataatattaatttaacgttcaaatcatttattgtgagtggatctcaaataattaggtgatagacaaaatttacaattacacataatccatacaaattcgtttcaacactgaaatacatttttcacttgacactgaaaaaaagacaaaaatgaattttttgttttctgtaatgcattttcaataggaaaaatattggtgtgtattcctttaaccaaactggacaaaagtggcccaaaatcaaagagatccaaattttaaccaaatgttgattaacaacaatatgggcctaaaaagggtccattaacgacattccctaattttgacctctctctctataaaagcaagttccttccgaaccctaattcaataaaatccccagtcaaaactccttagccgtcagttatttcaattcttgtttttgttcttcgtttgacaatgttttctttagatcgctttcgaaaggcgttgcgctcttcgtcatagagtttttgtaactctgaagggcgtgtcaccgaaagcgtataatcaaaaatcttcaatacgattctttaggattttgcgaaattcggattcgttcgaattagtaaaaacctaagaaccgatggcttcttttcgtctccatcgattaatcgtattgagaaatttcgaatctaaagttagatctagtttttgtgcgaaattgatggatttagaattgggaaattgcttcataatggtgaactctcttagattataaaaagtgagagatgttcaagtttccggagcaaatattaaactggccagaatttaacagctctgtgtttaaattttactattttcacagtgttacctgtcttctggtatatttcattaaatttcatcacccaatttttttgttttacctgttctctcaccaacacaaatctttgtttgattcgtctttttgtttcgttattgattccaattataagttgaagaatctacgctttaatcaaaatcagactccaaattgaacaaataaatatatgggctttcgattgatttataggcccaatacttttgtaaaagggcctattgaaaaacggtgggataaggtcagaaaacataacaaatttggccaactataaaaattaaattcaaagttcacctattaaaatggtgggaaattgggaatagattaaaaacataccaatgctaaggataaatttggttataaactgaaccagaagattaaacgtggttaattggttgtgggatttgaactaaaaagatagttaagatttgacatgcagattttgcatttgtagcttcgtttcttccgagttctttacgacactgacctaatagcacatacatacaatttgcattttcaacttcaaacataacgtttcgtgtacgtcaaggtaacgtcgtgttcttgaagtagaccagtacccttaaactgtctgagtctctaagcgaaaaaagcaccgaacgcatgatgaatcctctctttgaatcttcgatttacatgtctttacgaaacattaaacattaaaccttgaactccaatttttcatgtttatagttactacaagagtcactgagaaataaattatacaaaatatgtctaatgaaaattctgtaatgtcattgatagatcgcatctctggtcatctctgtcttcaagatgtatcaattgcgttgttaggtttattccttttcggttgcttgcaagcgaagttaaccaacaaaggcgaaccagtacaatggcctgtgtttgggataactcccgagttcttccttcatgttcacgatatgtttggatgggtcacccgatgtttgacgaaaagccgaggaacgtttccttaccaaggaatctggtttagtggatcttacggagccatgactagtgttcctgcaaacatcgaatacatgctcaaaaccaatttcaagaactttcctaaaggagagttttacaaagagagattccgtgacttactcgaagatggtattttcaatgcggatgatgaatcttggaaagaacagagacggatcatcataacagaaatgcattccactcgcttcgtggatcattctttccagacgacgagagatttgatagagaggaagcttttaaaagtgatggagagtttctccaagtcacaagaagctttt

SEQ ID NO: 466 - DNA, 83859 bp, Arabidopsis thaliana
gatcttcaagagattcttttacggttaacatttgataatatctgcatcgcgggtcttggagatgatccggggactttggatgatgatcttcctcacgttccattcgccaaagcgtttgaagaagcaacagagtctactctgtttcggttcatgattccgccttttgtgtggaaaccaatgaagtttttcgatatagggtatgagaaagggcttagggaagcggttgagacggttcacaactttatcgacaagatggttgttgaacgaatcgcgatgcttaaggaccaaggaacattagcgaatagcaaatccgatgtcctctcgaggctaatacagatcgaaagtcacaaaagaggcgatgaaaatgatcgattcaccgccaagtttttcagacagttctgcacaagcttcatcttagccggacgagacacgagttccgtcgcgcttacttggttcttctggttgataacaaaacacccggaagtcgaaaccaagatccttcacgaaatcagagaaatcttgaaccaaagagagaagaacaagtacaagcttgatgaaaccggagaaaaggagagttctcgtcacttcacagtcaaagaacttaacgatatggtttatctacaagcagcattgtcagaatctcttagactctatccaccaattccaatggaaatgaaacaagcgaccgaggaagatgtgtttccggatggaactttcttgagaaaaggctcaagggtttacttctcagtctatgcaatgggaaggatggaatcgatttggggaaaagactgtgaaatgttcaaaccagaaagatggatacaaggagggcaatacgtgagtgatgatcagtttaaatacgtcgtgttcaatgcaggtccaagactttgtttagggaaaacatttgcttacttgcagatgaaaatggtggctgcttcgatcttgctgaattactcaatcaaggttgatcaagatcatgttgttgttccgcgagtaacaacgactttgtatatgaaacatggtcttaaggtcaggattacaccgagatctctagaagagaagaagcaagattcataaatatagaagaaacaaacagctaaactgtgaagttgttactgaaatacacataaataatctttgttagtaaaatgtacagtgtgtgtattatgtgtaattcagatcaaatgttatatacaaagaaaaaattgcaatcataaggtataaactttgagttaggtgcatacgcatttcaactatgtgaaagctaaatgtgtccaatctggtatagccgatccaaaaaccaaactcgaaaaggaaatgaaccgatttcttctcttgatgaccttgttaaactgataaagatttctgaagaaatgtcttggagtatagactaatttgaagaaaaggttttggtctagaccgtcttctcgtgctagtaacaagcttaaaccactggcttctcggatcgcaactcgagtttcctcgtaaacatttgcagctattcgtcacaatgttgttattctccgtatccacatccaaacaaacagagaatccattctttgttatagaagagagttgcatcttcgagtcagaaaaaagtttccatttcgaacagtaagattcagagaaaaacagacgtagcttaacagactttcctttctcataagcttttaaacagaggatttgttcttctgctagtgataaaactcgatgagaagaaagtctccagctttctgatctattgcaagaaccaagctttagttgaaacaatgattttcttacaatgcaaagtccagttgaaggatggaacattattttctttggttgagtttccattagccctggtcctgaatattgcaaatttgttattgatcaagatcatataaaacaaaagtaagtttgaaaaaacaaattgtgtacctataaaaggagtctgaattgcagatatcatctgcaaaatggttgagttccttatgctagaccaattaaaatccaaaactccataagattcatctgatccaatacttttctctcttatataatagcttcctgcaagagtccatagtgaccaatctagatcacgatcagctgctaaagccataaaacaacttagaaacttattgtcgtttgcattgtttcctctttgatcaatcccaaactcgctcacaaacaacggtatccctttctcgagcaaaaaccccgacattttcatcatcttctcggtttctttcccgcaaatcttgttcaagttatctccttcccaagtattccaaaatccataccaatgtatctcaaacaccactttcctcctgaagctaacttcaaagggtctctctcggagaaacgataagtcagtagcgtaatttaaacccgagacaataacaagaacattcggattcactgagtggaccgcttcagcgccttctctcatatacttgtaccaatctttaatgttctgtttagggcctctaagctcattccttaaactcataccaaccacatttgatgaaacattagcaaacattgatgccattttttttaaccctttgatccaaacttgagggtttaaatgtttatcgccgaaaaacccgtttccatcattgtcactacaacaccaaccaggttggcttatgtgattgtctaagataaccattactctatgcttttcaagacaatacactacttcctgttttaagagaaagaacaacaaatttctcatctttcttgatcctgaaaccctaattaatagattacaaactagacaagaattcaagaatcctaagaagaagatagaaaagtcaaaacctttccagggaaattctgaaaaaggtaaacattttatcgagttttgttacctggaaagctttgattagaggaagatcaagaatcgttggattgtgagtttgaaaaccagaaacagcttcaaagagacgaaacttgcggagtgattgtctcactgtcataaaagcagagaaagattcatcggtggctaagtagagaggccaagtcaatctaacgcaattgaaacccattgagactatcttctctgcgatcgcatccaacggctgcttgctaagcccttcagccaccgcggtttcgagatgcgacggccagttgacgcacgtgagtttcacgcgccgccctttgttgccgtcgtcgacgatccagcgtgagtcggtggagggagggaaagcgaaagtggtgatgacgtagggaagaagaaagacagagatgaagaagaatttttccatttggtttatctctctctgtttcatttggttggtgttaatccctaattagttttgtaagaagtggaatgttcgtatgattttagtatatttaatttaattatgtctaatcttgtacattatgttttcgtaatcatggttcttaatattttaatatttttttagaccaactactttatttattgtttgagattttttataatactcctactatttatgtttgcattagtgaaattggtttaaatatcataagttttttttttttggtgtttgttgttttgaaaagaaagatttgaagtgttttggttcttaaaaaatttagttacaacatttgtatgaacataaagagaagacatataaagcaaagtgtatatagcaaagaacacataaacgtgtaagaaagaacacaaatatacaagtcgaagaatccagaaacaacacaacaacaacaacacattgtaatctctctatctatacaaagttaatagaaggcacaaactatgcaaagaagccaatcttctctatcttgctgcttgtttcaactcttcttgccaatcgttctctacaccggctcattttgcattgcctacaccttcactctagttttcgtctgtcttgattcaaaccataaacggagtggcaaatcaacccagaaaatttaaaaaattggtgtgaatatcaacaacagtcatacgaaactacaggaaaaaacggatcacggtttaggtttatggtttgaaagttatagccaatttaccaagacagagccggaaggtaacaaacctgcaagcagccaactttggaagcaatttcccatcaaacagcaaggaactagaagatgatctttatgtccttggaaagatctcgctttcaagtttccaaaacatctttcaagtctaaaacacaatatctatagccaacattagaggaaacgaatcaatcatatctaccaaatcactattaaattcaagtgttcagtttcagtttcagtttcagtttcaacacaaagaactctagagactagcattcaatttactgagacactttccatctcataacttcagtttagacacacaattaaatgcagattaccaacaatatgcacttcaatagttaaaacatacccgagattcaatagtcaacaacagattaatagtctatttttcagatgatttgaacttgaagcaaaaccaaccaccaataattcataattgataaacttaaagcagactcacattgacaccagctgctgtagcatcctagaaaaagctacagaacagagacatgatagctacaagtgaaacagtttgacacagatgatgcaggatatcttagaataaccagaaaaagctatgcgctactaggagagcttttatgagaaaatatgtatactcaccaaccttcatgaatactgcatcatagtgggtacttgatcgagcttctgcagaattcatccaaaagttgatagaagaaagtggctttgcctctaaaaatgtgggctgcatcaattcagataaatgatgttaagaaagttcaagtaagcagctttgcagaaataagagttgaaagaattacgcttaccgttccttttatcactcatatgctgcttgcagaatctaataaaatccaagaacggcaatgacacctataggacacagataattttttttttaaaagcagaaccataaacaataagaactcaaatcagctaatttcctgctaggttgctagccaatctgttcaataaatgagaaatgttttaccctctcatggcttctgatatcaccattaaaacatggagccgtcctcgaaagcattgcctctacttcaactgaacctacacgttccttcacaagaggattccatcgaaattagaggaagccatggctgatgatctaagaaggattttcgagaaaagggaagagatttaaaaggaatcgaaacagaaaaaaattgatcggcgaaatgaccgagagagaaattttttgagagaaacaaaagaaatttgattttgttttttcttttttcgaaaaaaaacaaatgagcgaccaatcagtgcctgccacgtaagatgaaactgagtatcagaagtatcaatgggctgatacggctcagcccaattttctgtatttggtctattaaaaaattataaatgggctactgatactctaaaaatatgagctatgtacatggtctaatgctcaagtaacgctcaaaagagtgatatgatacggtttagttcagattatgtctagttattatgtttgcgtaatcttgattcttaattttttttgaaaggcgaactgcttgtttggatattggaaactttttatcatctgaaagtatatatttgggactaaaatctatgttctaaccttattatgattttttttattaatatagttatcttataaatgtccaattaaaaatatttgttacaataattccagtcttaaaataatatatcaaaaataaaacaggagaataaccataaactaatagcataataacgttatattccatttaatagtaacatacacaaaataaagtttacaacttaatgagttacctttcttgttttttataagaacttaactagatcataacccgtgctatacagcacggacattaatattttgtataaattaaattgtatactttattatgtttgctatatttgtcaaaatttagtaaaatatattcaattataattaaatttattaaaacttaataaatttaaaagttttttttgtttggagacgcactatctacatataaaatacccgtttctatttttttgagtatttttagggcctgaaactttttatccaaactgacccaaacccaactggacccgacccgaaccagatatttagaattattctattaggtagtaaatcatatacccattaattccaaacccgaacgggttctacccgaactcaaatggattactcatatgtccagccctattctctgatttaattatctaaaaaattccaataaaacatatgttttgctgactactttttattcaaaaaattttacatcctcttctgccaaaatcatttcataagacatcccaaaacccttggaataatgattacatgaatgaaaaatcctaatttgaatataccaagaggttttgaaaggttttaagtttttgataagtgtgtatgtgagaaggtacatccatcgtgatggtaatctgcttatttataattttaacttgcattatacagcaggtaggcttatattttagttaaactaaaaacttttattgtaaagttgattacaaatatatgatattattttatttgattttaaatgtatagtaaactgcgagttgtatatgttttgttgatattatttatattgtttagtgtttaaaattatatacttgtattttgattgttaattttagagtttcacctgtagtataccatcttgtattaatattgatttaaacccgtcaattctaggattttcctgcttgtattaaaaattgaatcacatcatacacattaaaaaatctaatatgttattaattattgtagtatataagattataaattttaaaataatatgtatgaaattgaatataaatattcaaattatgacacagtactcagtaaaaaaatttcttaaatctacttttgacccgttatagtattttttcatgtattgaacagtttatattcgtttttaaaaattcaaattgtggcatatgcgaaaaaactctaattatttttttataacgatgatattattttttcgcaaaaatagaatcatataaagatgagaggtgaagtataataattaataaaaaattaatatgataatttagatatcaaatctaatttgttgattttaattggttacttttttggaaattaataatgtatttcgtttttgagttaaatttaattaattaaattaatatttgattttttaatttttaaagaaataaattaatttactctttaaaattttatttctaatggcatacctatgtaattacttacaaaaaataaggttatatttaaaatgtactttccaaataatatagtagaatgagtttcttaaccgttatttaaatatgagatgaataatctatattaatttaaacctcattatttactaactttaacaatcttgaaccactggcttatcggatcacacgagctgtcttcgcccttcacacacttgcagttactagccatgaggttatttgtttcatccacgtcaaggcaaagtgagttattggttgatttagcagctaagagcatattagaggctgagatggtctcccattctgacaaattagggctcgagcaactcgtttcactgagcttaaccggcgcattcggcccggtgctctctaagcatagggacttgtctttgagtgtcagggtgttctgaggagtgtagctccatggttgagattcattacatagaccgagagtgaccttggttggatctaagatactttgtagcatgcaaagtccggttaacgggtggaaaacaagattgtagactttggattgagagcctggtcctgataaaacatgtttgcaatactaaattaattagaatagtgagatgttaattaatcatatgtctaatgaacaagcataagcaaattctttttattttaaaatatcatttcagctaacatctaaatgaataaagttattaaatctaaaacatatttgttcttattagtatgtgacaaaaaaaatctaatggttggtaaaatagccaccatcaaatcttgattttatacttggtggcgaatgacgattgtgaactctaaaaaattagtctggtttcaactcaaaaagtaaagctgtgtatcaaaaacatatcgaatataccttgaagcggggatagaatcagagacaatctttgcaagaaactttggcttcgaacacgaacccaatccgaatccaagataccgtaaaactcactcattccgaccacaccttctctgagatagtaacttccttgaagagtccaaatcgaccaatctacgtcattttccgcggcccaacctaatatacatccaatgtagcgattatcgttaacatttttgcctctcaagtcgattccaaactcgctaagaaacaccgggaagtcacggagattgaaaccgcccccgttctcgatgcttttcagaatctcaccgcatgcctcgttagggtttttggaactccatgtgtttgtgttggtgaaagagtaccgatggagctcaaacacgagttttctagtgaaagttaggtttacgtgtcgtgatcggacaaatgagaggtcggtgtcgtagctgaggccagaaaggattacaagtacattagggtttgcttcgtgaactgcttcggccccttgttgcatgtacctacatgagacaaataaaatataaatcttccttaagtttaatcaaatctagcacacatatatatattgacaaaaaaatatatgttttaaaaattacaaaacaacatatttaaaacaaaccacattagtaacatattaatatgtgcccagtgaatcattgctaatttttgaatacgaaggaattaaatatatacagtataatctaaatataacacacaatttttttttttttttttttttttttggttagacgacgtaagtaatcattgggggctggtatagactgttgctataatattaagaattttgatcgtttactgtggttctagtcttctataggcttctagcataaaaaaattatgtgccacttaataatattggctctaggaaaaacaaaaaaaaaacaaggaaaaatatgaaatttcttatttgattgatacattttattttccgtgaaaccgtacgtaagtaaagtctttaatccttatatgtcactcaactattatcttttttttttttgataaaaatactttaaaaatgtccatttattttcttcttagtgttctaaacttttttcgttaaaaaggaacttttaatgtaacgtatgccactgaaggtaaaaaacaaaatactgattttaacattacagaatagcgatctcttacacgtacacggtacacatgcagcgaatggggcaaacatgaaaaaaggcacttaaagttcaaagcaatacgtgcaagagatggccactagtttatatttttctttctttctatgtaaccgttaaatgtttaatgcaattcaatttcattaaaccaattatatagaagataaactcagagagaaaaaggatccgaataggttatacaaatatacgtacttgaaccaatcatcgacgttttgttttggtcctctaagttcgtttctgaggctcatgccaacgacattagtggcacctttgaaagtcatggctatcttggtcagaccggcgatccacgtagtagggtcaaagaaagtgtcaccaaagaaaccgttgccgtcgttgtagccacaacaccaccctggcttggtcacgtggttgtctaatatcaccatcacattattgtttcccaacttagctaccaccttctgcaaaaacgaaagaaaaacaaaaaaagtaagttttgttttcaaaggagatgagtgacttagggtaaaaaactacatgatatatgaaatttcggttttgaactattgttttaaagtatttggatccacatctatgtaatttctttttgacaaatccatctttataaattatttttgtatattatgaactaaataaagctattctaaaattttcggacggatatccgaagtccgaaccaatagatttacctttactgatagaacaatactatgagattgttggtaaatcaattagctagtataccaccaatgtaaaatcttgacaaattaactttaaaaaaataaaataaaataaaattgacaacaacagtaaaaaaatagtgattgttatataacaacattatttaacaaactaatatgttttaatatctaaaatttacatgaatacgaggtttgaaagaatatataatttataacttaaaaccataataataagcataaatttatattagatttattaaattttcaaccgaaataaaaagtttttgtaattcttttattttatgccaatgaaagagatccaataaattgaatactatcataccttgtaagcttcaatgaggggaagatcaatcatggatgggttctttgtttcgaaaccagaaatgtcatcattaagaccaagactttgaaaagattgtctcacagtaacattattagccaacgtctcatttgtagctagatcaagtggccaagtaaacctaacacagttgaaacccattgccattatcttcttggccaagtcatctacactctgcttgctcagcccttccgccaccacaggctgcaaatgtgatggccaattcacacacgccagcttcactctttgccctttttcgtcgatgatccaacgagagtttgtagagagaggatatgccatgttctttgtgatgaaggagaagaatgagaagaagatgataaagcaaaacatgcgtcttagctcttttgttgtcttcatgttaaatgtatttagaattttttggggttttgttttctttttggttatttttgtttggtgttggtgaatcatttcgaagagacttatatatatagagaaatgatttagaagtgaagttgaaatcatttctggtacttaggggtgtattcaatcaaatattttaagtgatttgtgttaaaataacaaatcctatgttactcaatcatagctttttaaaagtttcatgaaatcttatgttattgaactagtgattctaaaatctacttaaaaattcccagttattgaaaacattttaatgactgaatttttagtgacttaagtgaattttagggtggtgtattcaatcaaacacgtcaagtgatttgtgttaaaataacaaatcctatgttattcaataatggatttttaaaagtctcatgaaatctaatgttattgaagtagtgattctaaaatctacttaaaaatccccttttattgaaaatattttaaagattggatttttagtgactttaagagacttaagtgaattttagtggattcctttagttaaaaatacagaattgtaaatttcatggtttttggtagaatttgagaggattttacaataaatcataacaactttcttaaatttacccaaattcttcaaaatcatataaaaacttaaaataaatcaaatcacttaaaatataatatttaatacacccttttagtggatttctttagttaaaaatacagaattttaaatctcatggttttaggtggaatttgagatgatttaacaataaatcataacaactttcttaaattcacctaaattctttaaaatcatataaaaactcaaaataactcaaatcattcaaaatgtaagattgaatacaccccgctagactaataagctgtttcgtgatttgggaggaaaacatgattggaatcatgagataaagttattaactttacggattcgctttatgttaatgacctaacaatgacgtcaacgctataataactcttgtaataaaagttagctcagtagttatattggatccaagtcattgactcacatgtggagattaatagactattcacaaccaaactgaaaaccagattgatattctatcgactatcgtgcaaaagcaagaggatgattactagtaactttttttttcttttccatttctataagacagggatagtatgagttaaaatctcttttattggtacgtctggaagatgtggatatcaacggaaatttgactttggaaacttcacctgtctattgaattttgagaaattgggtgaaaaaatcttagaatagtgcattaattagtcaactaacacatattgggacaaaatgatacattgtgatgtgttaggacaaaaacaccacttgtgagactttgagacatgtctccttacgtggctttctctcccttttgcattcctttttttcttcaaaattttacgtgactttgagataatcatttttagttttttcatcctagaatgattgaatatctcatcatatgtagaaaaaaaaaacatatttttgtatatgtcatgattgaaaattttaaagatgcacataagttattcgattcaagtaattgaatatagtttttattcaagaattttttttaaaaaaatatagaataccatatttgattggttcacgtcatctggacatgataaattaatacatgttctacatgataaatcatttttctgcctcaaaaatttattggctagaaatatataattatgttctaacaatctaatattaagaaatttcagcagcgtaattaattagttgtgtaagttaataagaaaaaaattacattttaatttgggaatggaggattaaattggtagtttttaaaaacaacatgtttattttgcaatttcttttagatcaaggttgatcttgcaatttctctctagctaatttgttgttttggacttttggtgacgccgcgtcgatctcttttcctctcgtcccatcggaactcttctctctccgccgtaagccgcttgaatgtttcgacggcggcggtgaaataaacaggttttatttttagcttagtcttcaagaccaatgttttcataagatgtctccaccgttaggttacatatctctctttttgttgtttcatcttaattcttacacaatctcctaatcattgcatatcacagaattgtctaaaccgtttttgaaaagatgatgaaaccattgttgcttctcttacccatgcacaaacttgaatttatagaggcatatcaaagagccatcatgagactctctatatacagctttatcaactatttcctttgccatggaaacttttctattcatagcaaagcaggatcatgttctttctaacatcatcttacatacatatatactcgcattatacgtttccatatgtacagagaaagtttattcaaaacttgtaaaaagtctggaactggagtttggtgcaatcactgaactcgaactgggacaagtttgagaggtactttcttgactactgtaagtataccagcttcttctgtatcgatgtctttatgtgtcatcccatcaggtgctctccaatcgaagaagtatagtaagttcaagagtcccaattccactatagtgatccccaaccccatcccgggacatatccttcgaccagacccgaacggtaagagctcgaaatgttgtcctctataatctacagggttgttgataaacctctcggggttaaactcttccggatttatccagagtgtaggatctcttcctatcgcccaagtgttgactaagatccgtctctttggaggaatatcatagccttgaaccttgatgtgagtcattgtttcccttgggagcagaagaggagctactgggtgtaatctgaatgtttccttgatcaccatgtttaagaaaggaactttatttagatcttctttggtgattctctccttattgttgccaaagctgtctctaatctcgccttgaacgttcttcattagttcggggtttcttgcgagctctgtcattgcccatatcatggtaagagctcctgtgtctatccctgcgattattatattctacaaaacacccggaaactatgttaaatcaattcagattccattttaatacaaacgtgtgaaacaagttttgataccgtgagaaaccccttaatatgatctattgtgagcctcaaagaatcatctttgccttgtttatgcatcacatccaacattacatcgacgatatctttgtgatctttccatcttccaggatctgaatgatcatcaatcacacgttgaaacagagcatcgagcttgaagaagacattgttgagccacctgtgtttcccggaaatccagtcagcgagccatccaaggccggcgatagggaagaaatcagagcaagtgaaactagcctgagctgtctcggtttcaaatataagttcatcgatcttgtcttcatcgataaacttgttgtcgtggaaactctgtccaaaagcaattctaaacaggatactcgcagctagccagaaaagggatttactcaaatcaaccggaggccgacctacggctgattccgtcagtttcttgaccagcaagttacattcttcttctacgatatacccaaaatactgaacctttttgaaacagaaaagctcgcgcaccaagaacttacgccgctctctccactcttcaccgtatggagtaaaactgatatctttaaaaccccgagagattagcctcgacccgacaagtttaggcctggtgcaacactttaggtcatgagttctaagaacttcttcagctgcttccctcgatgagattacagttacagggacaaacccaaagtgaagaagcataacatgcccggttctttcggctagacgttgaaatgacctgtgaggcaattctccaacttggtgtaagtttccgataaccggaaacgtaggagggcttggaggaagatcccatttagagtgtttgatcttcttgacgacaaagattaacgaaactaaggtgatgagaaaaagacagagtaaagagattgccatttcttcttctttaggtttaaattcataatgctctgttttggtatattagtagttcaaagcggcaaatccattggtcagtgaaggaaaaaagataagcacatcactcacaccgcttacattttaatcatagtttaaataaaacattcggtagattttagactttaccgatgattgctcaatttgtatgaaacagttgaaatattcaagagagattaggaacatctacacttaatgataaggcataaaataagtgttagaacaaagtttttattagaacaaaagtcgtgtaggtttactggtgcaccttgttaaaagtatttgtggttttaagatggaagatttagcttgtgaagtgacgagaccaagacaaaatatgacttcgtgtcatctatatttgctagtttttgttgcaaatagaagacacatacttctaaaactctcttttcatgatccataagagattaatacaagtacaagctcttcaactttttctatatcgacaaaatcacattggataactgaaaccatggcagggataagtttgatcaaataacccggatgagaatcgggttgatgagagcccgacccatagagtggtgtcgacatttgcgatcaagtgcatttttcattttcagtttagaaacagtaagagagtgtatttgttgcatgttgaattttacaactattttccaaggacatgaaaatattatgttttctataaccgcgaaatttgcgtctgagtcctagttgttgtggatcagaagtgaacttctataatctattttctttgggaatgtctcttcttccaaacgagaaaatataattgttttgcttagacttataactcgtgtttctacaacaatattactacatcattctacaggttaaaccacataatttgtatgcaaatcacatcaagttataacatcgactactattcaacctaataatacgtttcaaatcaatcataattatttattcaaaatatacgtcatacctaagcttacttgatttgatttgcataatatttttattcaaacatcttcaaagcttggagtttggtctgatcatggaactcgaactggaacaagctttagatgtactttcttaacgactgtaagagtaccagcttcttcagtatcgatatctttatgtgacatcccatcaggcaacttccaatcgaagaagtaaagtaagttcaagagtcccaattccagagtagccatccccatcgccatcccgggacatatccttcgtccagacccgaacggtaagagctcaaaatgttgtcctctatagtccacagggctatcgataaacctctcgggcttaaactcttccgggtcagtccatagtttaggatctcttcctatcgcccaagcgttgaccaagatccgtctcttgggaggaatatcatagccttgaaccttgacgtgagccattgtttcccgtgggagcaaaagaggagctactgggtgtaatctgaatgtttccttgatcaccaagttcaagaaaggaactttatcaagatcttctttggtaattctctccctattgttgccaaggcgatctcggatctcgccttgaactttcttcattatttcggggtttctagcgagctctgtcattgtccatatcatggtcagagctcctgtgtctatccctgcgattattatattctaccaagcacccgaaaaacaagttaagtaaattcatattccatttcaatacaattatacaaatgtgttgaaacattaattaccgtgagaagccccttaatatgatctattgtgagcctcaaagaatcatctttgccttgtttatgcatcacatccaacatcacatcgacaatatctttgtgatctttcgatcttccagggtttgaatgatcatcaatcacatgctgtaacagagcatcgagcttgaggaaaacatcgttgagcctcttgtgttgtccggaaatccagtcaacaagccatccaagtccggcgatagggaagaaatcagagcaagtgaaactaccttgagctgtctcggtttcaaatacaagttcatcgatcttgtctgtatcggtaaactcactctcgtggaaactctgtccaaaagcaactctaaacaggatactcgcagctagccagaaaagggttttgctcaaatcgactggagattgatccactgctgattccgacagtttcttgaccagaaagttacattctacttctttgatatatataaaagactgaagctttttagaacagaaaagctcaccaaccaagaacctacgtcgctccttccactcttcaccatatggagtaaaattgagatctttaaaaccccgagagattagcctagaccccacaaggttaggcctgctgcaacagtctaggtcatgagttctaagaacttcttcagctgcttctctcgatgagataacagttacagggacaaaccctaagtgaagaagcataacatgtccggttctttcggctagacgtcgaaatgacctgtgaggcaattctccaacttggtgtaagtttccgatgaccggtaacttaggagggcttgggggaagattccatatagagcgtttgatcttgcagccaacaatggttaacgaaacgaaggtgatgagaaaaagacagagcaaagagattgccattttttttttctgttggtgtaaattgaagaaaattaataatgctctgttttgatgtattaatagttcaaagcgggaaaatacaaagtcatccctcacaccgcttacatcttaataatggtgaaaccttcgtcatctggttaagaaatttgacatgttttcaacatctggaaattaaatttgacatgtgaaaatatgaatatgaatataaggattaaggaacatctacgatacaaagttgatatctcttctgttcctaactaatccatgttttattaatattgtttcaaatagatagattttaaagtttttatgtatattttcattagctaatgtattttaaattaaaaaaatacgaatactattattaaagaagaaagatgtctagaaaaatttatttataattattttccaaagatatgaaacacaggaaacacagtacatgttttagtaaagatatgaaattttaacttagtattttactggaaaacgtacttcacatacattagagaagctagggttacatactttgcatagtatttttattcaaaacatcttcaaagtttggagtttggtttgatcactgaaatcgaactggaagaagttttagtggtactttcttgacgattgtaagagtgccaacttcttcagtatcgatatctttatgtgtcatcccatcaggcaacttccagtcgaagaagtaaagtaagttcaagagtcccaattctacagtagccatacccatcgatatcccgggacatatccttcgtccagacccaaacggtaagagctcgaaatgttgtcccctataatccacaggactattgataaatctctcggggttaaactcttccgggttagtccagagttttggatctcttcctatcgcccaagcgttgaccaagatccgtctcttgggaggaatatcatagccttgaaccttgatgtgagccattgtttcccttgggagaagaagaggaactggatggtgtaatctgaatgtttccttgatcactaggttcaagtaaggaactttattgatatcttcttcggtgattctctctttatttctgccaaggcggtctcggatctcgccttgaactttcttcatcacttccgggtttctagcgagctccgtcattgcccatatcatagtaagagctccggtgtctatccctccgagaaatatattctagcaaacacacggaaactaagttaaatatcaagattcagtttcaatgtgaatgtgttgaaacaagttaagcttttttctttaccgttagaattcctttgatgttattgattgtgagcttcaaggaatcatctttacgttgtttctgcatgacatccaacattgaaacagagcatccagcttgaagaaaacatctttgagcctcttgtgttgcccggaaatacagtcaacgagccaaccaagtccagcaatagggaagaaatcagagcaagtgaaactagcttgagcggtctcggcttcaaacacaagctcatcgaccttgtctttatcgatgaactcgctctcgtggaaactctgtccaaaagcaactctaaacatgacactcgcggttagccaaaaaagggttttgctcaaatcaaccggagattgatccacggctgattccaacagtttcttgacaagaaagttacattcttcctctctgatataaccgaaagactgaacctttttcaaagagaaaaactcacgcaccaagaacttacgccgctccttccactcttcaccgtatggagtaaaaccaacatctttaaaaccccgagaaagtagcctcgtcccaacaagattaggcctgctgcaacagtttaggtcatgagttctaagcacttcttcagctgcttctttcgatgagataacagttacagggacaaaccctaagtgaataagcataacatctccggttttttcggctagacgttgaagtgacctgtgaggcaattctccaagttgatgtaagtttccgatgaccggaaacttaggagggctgggaggaaaattccatttagatcgtttgatcttttttccgaggaagattaacgaagcaaaggcgatgagaaaaagacaagagtaaagagattgccattctttttttcttttttttttttttctaatggataaatgctctgtttcggtatatgttagataggtccaatggataatgcactcacaccgcttacattttaatcatgaaaagtctactaattgaataaaattttgatagtcatacatactaattctgtaaatttaagattttacggattattgctcatatttttgttccacagtatattcttctaaaactcctctctatgatgatccatatgagattcacaaaagagtggggaaaggaaaagaaaaaaaaatcacacaagcacaagctcttcaactttttctagatcaacaattttatttcctctcatttaaactcctatctatgatgattcatatgagattcacacaagcacaagctcttcagttttttctagatcaacaattttatttcctctcaatttaaagaataagtgaggtgttcaatataataattttctttctttttctattcaactaaaaggtattatatgtttgcttggggagaaaaagataatccaaaaacttttataccctaaccgtttaggtccacaaaaactttatctcttgaaagactagatgtatagcttgaatgatatatataaaagtaaggttttattttctccttattaagttatttgatatactttttacatatattattaaagattctataatatattaatctctaattaactcactttaaaactcacacataaactcatttgtaacttttccaataaaatatatttctaaattatattaactttggtccaaaaataaataaatatattgactataatttagggtgaatttgtaaaatagtaacttttccaaacataatttgaaaaatagtcataatactatttataatttgcaaaataatcatttttcgctaattaacttcgtacattaagattcctacaacacattcaatgtatagatgtacagaaatataactagattacattacttattgtgccttatcgataaaactacaactagtagtaaatagggacttgttttattatttttcaaatcttgtggaacagctctaatcagaaaacatttcttttttattcaatatttggacttatttattgaactttaaaagatttttcatcataaaattttagaatatgattgcctatttttgaatattttggcttatttgacaaaataaatgtaaagaaaatgaaaatttgggcatatagtaaaaaaataaaagaacttttgataagtattttagaaaaaatacaaaaaaattatggattggatagccatattaatttgggccgtgcttgttatgttaaaaccacttccaaacgattcaaaaaatcgtagaaaaatatatcttgctgaagttactttgatcaatcagatccgaacatgtcaggttcctgaacgttacattcctcaaacagaattccaaaaccaacaattcgcatatgaaatttcaacttagtattttactgaaaaatatacttcatacatcatcagagaagcttacatgatttgcatgatatatttattcaaaaggtttggagtttggtctgatcactgaactcgaactggaacgagcttgagaggtactttcttgactattgtaagagtaccagcttcttcagtatcgatatctttatgtgtcatcccatcaggcaacttccaatcgaagaagtaaagtaagttcaagagtcccaattcgacggcagcaatccccattggcatcccgggacatatccttcgaccggacccaaatggtaagagctcgtaatgttgtcccctataatcaacaaagctatccataaacctctcagggtcaaactctttcgggtttgtccagagtttgggatctcttcctattgccgaaacattgaccaagatcctcctcttgggaggaatatcatacccttgaactttgatgtgagccattgtttcccttggaagtataagaggagctgctgggtgtaacctgaatgtttctttgattaccatcttcaagtaaggaactttctcgatatcttcctcggtgattctctccttattgctgccaagttgttctcggatatcgccttgaactttctttatcagtttcgggtttttaacgagctccgtcactgcccatatcatggtgatggcccctgtgtctatccctgcaagaaatatattctaccaacaaaaaagaaaagtaagttagaattttgaatcaaatttcaacgttaatgtgtttagataacttttgatttaccgcgagaaaccccttgatatgatctattgtgagctctaaggaactgtcctctccttgtttatgaatcacatccaacattgaatcgatgatgtcttcgtgctcttttgatcttccaggatttaaatgatcatctatgacatgttgaaacagagcatcgagcttgtaaaaaacatcgttgagtctcttgtgttgtccggaaaaccaatcaacgagccatccaagtccggcaacagggaagaaatcagaacaagtgaaacttgctagggcagtctcagcttcgaacacgagctcttcgatcttttctttatcgataaaatcgctctcgtgaaaattctgtcctaaggcaactctaaaaaggatactagcggttagccagaaaagggatttgctcaaatcgaccggagagcgatcaaccgcagattccgacagttgcttgaccagaaagttacattcttcctctcggatatgcctaaaggactgaacctttttcaaacagaaaagctcacgcagggcaaacttacgccgcgccttccactcgttaccgtatggcgtaaaaccgatatctttaaaatcccgcgagagtaaccttgtcccgacaagcttaggcctgctgcaacagtctaggtcatgagttctaagcacttcttcagcggcttctctcgatgagaccacagttatagggacaaacccaaagtgaagaagcatcacaggtccgtatctttcggcgagatgttgaagtgacctgtgaggcaattctccaatctgatgtaagttcccgatgaccggaaacttgggagggcttggaggaagattccattttgatcgtttgattttcttggcaaaaaagattaacgaaacgaaggtgatgagaaaaacacagaggaaagagatcgccattttttatttggttatcgataaactgaaaatgatattgctctgtttattttccattaatagttcaacacggcaactcgagatctagaagtatcccatacaagtctcggttaaaaaaccaacacttcaattattagaaaaagccaatggtctagtggttaagagcaaaacatctcatcagtatagtatttatattttaatattattttcattaacttttattaatatatttattaactttttcattaacatcttaaatataattatcattttattatgttatttagttttaaacatatcaaataacaattaaaacaatatttatttaatattttgcatttactttaattaatatatactaaaataatgttaatatataatttaaacttatacataatggagttaaatataaagataattttattttatgatttataaaaaaatacaaaagaggaatatataaactatcaaattggtgtattggaataaaggtaataaaatttagaatttgtaaaaattaaatagaaaccacattaaaaatacatgagtcgtggatctatcaaataagaaactttacattgggttatcaccattttaaattatataatattattatcatttttcttacatattatattgtatattcaatatcattaaaatgcgtaatattttagtgttaataaagatatacttagaattgagagttttttattagtatataaagccacttttttttagcaaagtcgatttgggaataaccaagattcgggaagagaaagttggccaacactattgagtatgacaactaggtggggttgaaaatggagatatagaaacgtttttgggaaaatagggaaataccgtgatagaattcagttcgtcaaagatatagcagcggaggtcaaaaaagcttttaatgttacaagaagcagcacaaacaggggatgtcgggttgagaggttgatcggttggaaaaggccgggtgaaggctaggttaaggtgtccacggacggggcttcacatggaaacccaggaccaaccacagctggagacgtaatgcaggatatactaaagatgaaaagctaaaaacaatcaaactttataactaaactttataaaacattttaaacatttatgatattcaatttttatgaagtttcaaatattagaaatatttaaaatttatacgaagtttaagtattacaaatatttataaaataaaattaatacgagacggtatattacgagtgagatcctagatataacaataaaaatagaattacgaagtttcggtcgataattgtattttgcttgttaaatctatgatttcacctattgtatatcatctcgtattaataacgacttaaacttatctcaccatataaccatattccctgaaattaaacattagtgtcattttttgtattaagttcaaatattatacttaaacacttcaaataaacaatagtgacaaaataaatataactcaattttttgtataaaatattatcatgtggtatatcgcaggttgatttctaatagtttcatataagtttagtagtttcatctaaatgatgcattttgaggtacaaatatgaagattaaaacaagacctcttttatttttgttaatgactaaacttctatttgcatgatattttatattcgcttgctaatagtgtgaatagtatctttgaaatcagtgatttaatcgataaaaccatttatcgaaatatataaaaactgatttaacgaacacatatattcaaattgttgacaaaaaaaaaaaatatttcaaactctgggaaaaaatgtctgactttcttttggtagtattaaacggtataaattattaataccattgccttggaatgctatatttggatttaagataaaactcgaattgacttttcatattaatattcatagaaaaagtgacgtcaaaactatattattctagaaaaggtgatgtcatcaagttgatataaaaagtgatgtcatcaaataaatatcttctgatttcatatgtaagattatataatcgataacatattatgatgtatcacactattattcttttttatgtttgtcgctaaacgtttaagtggttggataatggctagccgtataacatgtaggccatttggcatgcgattttgtttcagttatattaaataaataatttaaataaaaaataaaagagtatgttagtaaaatagttatttttcaaaatataatttaaaaagtagttattttattatttataattttaaaagtagccatttttcactatttgatttgtataaaaaaattcgtacaatacaattaatatacaaatctaaatttacagtatgtatatttatgtatatttagacattataaatattatacaaatctaagtgtatgaaacaaataatgaaaatgattattttatcaattatgaatagtataagttaccacttttccttctgaaaaaagaaactattttcaacttttccaataaaaaaacaaacaaacgtttaggccattctgtctctgcgaagatatttgcagattggctggcgtatggatacgaatacgattgaccacattcaagatttactcaacaatatcatgtgcatattttgtcgcatatttggataactcgacgaagtttggagaatggtggagccacaatgatctcgcccctcacgtttttgctatcttctttataaatgaaatgaaaggctcacaatgattttcgattttctgtttactcttgtaatacaattcttttaacaaaaacatgaggcaataataacccttatatttgcttcctacttactattatatatattcattattttaatcaaataaattcattttttttaatacgatgttaaattatactcaaaagaaaataatcactggatgttataaataaatgtaaaaacttttcataaaatttacaagagaataaatggttctacccttgatttcttcttgtttcaaaccaaagtactatgctacttcgtattttgatatgcacccactcttgagcgtgttaagccggcttcgaatgtttttgtcgatcatcttgacaagctttaatgaattttgatgaatcagaaccggaacatgtaaggttcgtaaacgttaattacattcctcaaacgcaaatgaacgttcaatttagtattttactgaaaaatatacttcatacatcatcagagaagcttacatgatttgcatgatatatttattcaaaaggtttggtccaaaccgtttggagtttggtctgatcactgaactcgaactggaacgagctggagaggtactttcttgacgattgtaagagtaccagcttcttcagtatcaatatctttatgtgtcatcccatcaggcaacttccaatcgaagaagtaaagtaagttcaagagtcccaattcgacggcagcaatccccattggcatcccgggacatatccttcgaccggacccaaatggtaagagctcgtaatgttgtcccctataatcaacagagctatccataaacctctcagggtcaaactcttccgggtttgtccagagtttgggatctcttccgatagccgaaacattgaccaagatccgcctcttgggaggaatatcatacccttgaactttgatgtgagccattgtttctcttggaagtataagaggagctgccgggtgtaacctgaatgtttctttgattaccatcttcaagtaaggaactttatcgatatcttcctcggtgattctcgccttattgctgccaagttgttctcggatctcgccttgaactttctttataagtttcgggtttttaacgagctccgtcattgcccatatcatggtgagggcccctgtgtctatccctgcaagaaatatattctaacaacccacaagaaaagtaagttaaagatttcgatccaattacaattttaatgtgtttaaataactcttgattaccgcgagaaaccccttaatatgatctattatgagctctaaggaactatcttttccttctttatgaatcgcatccaacattgaatcgatgatgtcttcgtgctcttttgatcttcctggatttaaatgatcatctatgacatgttgaaacagagcatcgagcttgtaaaaaacatcgttgagtctcttgtgttgtccggaaaaccaatcaacaagccatccaagtccggcaacagggaagaaatcagaacaagtgaaacttgctagggcagtctcagcttcgaacacgagctcttcgatcttttctttatcgataaaattgctctcatgaaaattctgtcctaaggcaactctgaaaaagatactagcggttagccagaaaagtgatttgctcaaatcgaccggagagcgattaaccgcggattccgacagttgcttgaccagaaagttacattcttcctctcggatatgcctaaaggactgaacctttttcaaacagaaaagctcacgcagggcaaacttacgccgcgccttccactcgttaccgtatggcgtaaaacagacatctttaaaattccgcgagagtaaccttgtcccgacaagtttaggcctgctgcaacagtctaggtcatgagttctgagcacttcttcagctgcttctcttgatgagaccacagttacagggacaaacccaaagtgaagaagcatcacaggtccgtatctttcggcgagatgttgaagtgacctgtgaggcaattctccaatctggtgtaaatttccgatgaccggaaactttggagggcttggaggaagattccatttcaagtgtttaatcttcttggcgaaaaagattaacgaagcgagggtaatgaggcaaaaacagaggaaagagatggccatgttttttttcgtttggttatcgatagaagtgaaaaataatattgctctgtttttctttccattaatagttcaacacggcaaccgagatctagtagactagtagtatccatacaattttgaattttcggatatagtacttcaatcattgaattttcggatatagtacttcaatcatcaaaatatctcatcaatatgatataaatagtttaatattatttttatgcaaaaactttcattaattttttaaaatatatattcaattacattttaaatataaatatattcatcaatgtattgtgttagttacttttagcttttaaagatatcaaataacaattaaaacaatattagtttaatattttgcacttactttaattaatatcaattaaaataatgttaatatataatttgaattatacataatggagtctaatataaagataattttatttcatgattataagaaaataaaaagaagaatatttaatttaaattggtatataggtaataaaattttagaattgaaaaattaaatagaaaccagtttaaaaatacacgtgccatggggttttcaccatttttaaattaaataatattgttttcaattttttctttatgtgagaatctcttaactagagagttggagatgctctgatacctgacccatttttaactctttttttttttttttttgagattttacatttcttgaaattgttgagatatttgagccaaagttcaaaaatatgaatatatagatgataatttgaatttttctataagttagacagtgaccctgacttttctttgaggcaagcctgaatggcacatgttgaggtacaaatatgaagatgaaaactaaacctctattttttttttttttttttttttttttttgctaatgacttaacctttaccatgatcttgaattcttttgttttttgtttttgtttttgtgtgtgtgtgtgaaatcaatgatttattgaacattcagaacttctgacgtagtaggcttggaatgctatatttggatttaacaaaaaaattcggattgacgtttccctactcagcataagacaaagagggaaagaagcatgccatgttgaatgttaacatttttttacttactaatggtgcttcaaatttcatattttctttcattttaaagataaaaatgaattgtttcaaaaaaataaaatgaattgtttcttttcaatatgcttcattttcattttcaaaaataaaataaaattaaatagtgttttatttttaattgaaggaatattaatcacatcttcatattttaaaagttaaattttttatttataaaatgatccttaaaattataaacttattttgtaccaaacatattctttattttaatattatccaattagttttgaaattctatagtcttacaatatgattcttattaaaaagataagtgtgatctcgttacaccgattaaagttgggaaagtgataagctaaattgtcacgttattgacttggtgtggagcaaaagaacaatttctaaggataaagcattaagctttaatgattacaagacattgggaaaatttatatatggagacgatctgtccgtctgtagactgttatctaaaagatatctaaacttagaagtttatgaaatcatctagcagaaaagttatacacgctataatttggacctgtcatccttagcctatattctaagttggtccacatgtttcactgatcgattaagagtgtcgtcaaatccgtatattgttagagagaatattgacttaaaaatatgcataaaccaagcttagagtaaatataaaacaaaaacctttaaaaagaaaacaactatatattatccttaaaaagtaatttaaacataaaaattaatttatttttaatagatggttttgagattatactttaaaactttttattgaatattaacatgtgatcgaaaagatccaaacttgaataagacgtacgtgttagaagaaaaaattacccaaaattaagaactcactttttagaagttccaactacaaaataaatgtccaaaatgaaacgccgttcaatcaggtcagtcattgccaaattccagcccaacaaagttagttttctttcagcccaaaaacaccattaaagttcgaactcacttttctttgctttgcttctcaacatggaagtgtcaacttgcctcccacccggacagcgacaatgatggaagtccaaagaaccaactctgtttatgatctgtgcactgcagattttgtatatccatcgcacatttttccttctagagagtacataaatttcatgtgtgaatgtgttttctatagcctccatcaaatgtaaggatccccagaggattaagacacacccttcgaacatcggttgactatgcacgtatgggcttaattatttcgccaccggctgcctgttttgtagttttattcacagatgtataacgtacacttttttcttcaagttttaacggttgcacttcataaattctatagtgcaacaacaacttgaatggcaaacgcgcttatgcgccatgaatagcctagagaatgtagcaaatcaaatagatatcatgtcttcaaggaacattgactgattctactgttattaaaaacagcttatggattcgatttttcttaattttgaaggatttgagaggatttgagaagattttttacttaaaataaagaaatctaaatttgatggttttaaataaaatttaaaaattttacaacaaattatattaactttcctaaaataatcaaaatcatataaaaatttactaaaaattcaaatcatttggattttacgagatgaagtaaatttgattgcatgggacagatttggatatcaacgagatgaagtatatagcacgcaagaactaaggcacatttttttatcaaaaaaaaaagaaaaagatatgagataacccaaagcacactttatgtgacggttttaaagttcaatggcatgttggtgttttataatcttttattaatcatgtgtttgtttgaatatttttttatactaaaactgattaaaaatattggttaggtcaataatcttcgtcgatctgtaatttaactcagtaatattatttgatgtatatctgactaataacatataaaaatattattttatttgttctcacgccaaaacaaaagagtcatgtcacgtaacgtaagaactaagaaatccagttcgaaaagttggttaggattaaaccatgtataaaggatttatacttatttaatttaattaataaaataataaagatatatctaaaactaaaaggttatctaaaacaagacttacaaattttaataaacaaacaagtgacataataatgggaacatatacaaaagaagtaagagataaaagaatcgtgagactacaaaagagccaaataatcaaataaatatgacgaccgtagtgtgttcgcaaggcatcagcgatcagtaatgaagaactggcacgagctcaagtgggactttcttggcaatgacgaaagctccagcttcttccatgttaatgtctgcaatggccattccatagggtaaactccaatcgaagaagtaaagaacgttaaggaggccgagctcaacgatggtcattcccgtggccatcccgggacagatcctacggcctccaccgaatggcaacaattcaaaatgctgacccttgtagtcgatagggctatcaacaaacctctcagggataaactcgttaggatttgtccagcagttgggatcacgtcctattgcgtaagtgttgatctcgatcattgtgtttttgggaatgttgtagccttgaatcttcacatcagacattgtctctcttgggagcaagagaggagcgggtgggtgtagtcggaatgtttcttggatcacaagcttcaggtagtgaactttttcgagatcctgctccgtgattttttctttgttgtctccgagtaattctcgaatctcttgttgaagtttcttcatcactctaggatgtctagttaactctgtcaatgcccatatcattgtgatcgctcctgcgttcactcccgccaaaaacacatcctgatcatattacaaacaaaatttagttacattgaccaataaattcaaagagaaatcttatgaaccatcatatattcatataatgtatttaaaaaacatttacactcaccgacatgactcctttgagatgatcataagtgactttaaaagagccgactttgctctctttattgatcatatccaacatgacaccaacaatgtctgaatgatcttccgattgccagggcttcaaatgatcatcgatcacatgttgaaagaaattacttagtctagcaaaggctttgtgcaacctcgaatgttgaccggagatccgatcaatagcccacccaagaccggcagggaagaagtcaatgaatgcgaatgagccaagattggtctcagactcaagcacaagctcttcaactttatccatatcgacaaaatcgcactcatggaagttctgtccgaaagcgagtctacatacgatactagcggtataagagaaaagagcctttctcaaatccaccaaagtttgtgtttgagcagattctgtgactttcttgacgagcaattcactctcttcttctctaatataccggaaagcctttaacttttttgagctaaagagctcgagcatcgcaagctttctcatctctctccagtcttccccgtattgtgcaaagccaatgtctttgaagttatatgtaaataacccggtggcagatagctttggtcgggtgcaagtctcgagatcgtgagtctttaaaacttcttcggctgcttcttttgtggagaacactaccacagggactacaccgaaacgaagaaacatcacgggtccatactcttgggagagtttataaaaagatctatgaagagattttccaagttggtgcaagtttccgatgatcggaagacttataggtcccggaggaagcttccctttcgacggtaaaagccttttgtaaaaaacaagaaagagaggtaagagcaagaggaaacagagaaagatcgacattttgatgtttcttcttcttcttcttcttgttgttcttcgtgttgttgtgtgttattgtaaagttgtttttgcgttttgagtgaagaatattgagttgtaataagagctatatataggtacgtgttatgggcttcacattgactaagtcaaagattttcattgtatttaaaagtttaataagaaaggaaattgacaacgtgcgtggtccattaatacgcatgtcgtctacgacaataaatctccgacgtcaggcggctaaatcatctagccatgagccgccgcaaatctacttaaactgccttcaaaaccggtttgtcgctcaactcaatttatgtactacaattttactttaagccggctttaaaggcatacaagactttcaagtttcaacttattattgagggttagtctcttcctttttacacattcttataataagaatgggaaagttagagaggcattctctgtgttaaataatccaggaaactaaagtttgatgatataatataatagaaaaagaacaagtgaaattaactaataatatatttcacttagaaagttaaagttgcttgaaagccatcaaggtatatgggcggatttacgcgcatatttcttttataatacttttgtactccacagaagactaaattcactcaatctttttattttatgtactaacatgtagaagccgtacgtagatcaccttaagaaaatattgacttataacacgtgattaatttcaacattagcactccatcattcaaataatactgttagtaaaacaaaactgcccgtcaaaattcgtaagatcggtttattaaacattggttcatcatatccatgttttctttgtttaaaaaaaacaatctgtttaaggcaagtctatttatttacacacatttttttatctacaagcaaaaagtgtttatagaatggaaacaatccagaaagcaatagaagatcacataattacatttattttatataataaaatcttctctaaaaaaacaaaaacatgataacccaaatgccgaaaatagatataccttggatagaacgttaaagaaaaaccgattaaatatatcgttataagtaaaaatattccattaaaaaggagaacaactctagaagcggaatgtatagggttagtttggaatatgcaaacaaggaagatttgggagcgcaatactagttttcatttgacgaggaattatcatgtagattaagaccatggaacaatttccctcaaactcaaaattagctaaatcacttccttggccagttatacttaggtccgttagaaaaatcggttcttaaacaagaaacccatgaactcttcactaaatactttcctacacataatcattctttgtttggttcaattttattttataacacaagatttagttctataattcaattatatataactgaaaaataacaagcttaaactaaataataaattatcgaatgactagctatcctatgaattcgacaatggctatagctaggtatattaacgataacattaatgttgttgtttcttctgaaacttgaatcaacactgacattacaatccattttgattttgtggataatgatttgatggtttgtgtttatggaccactttacgtcttgatttctgctttattagatgatccatccctattggaccttttcccttttcaagagtctacaagtttcgtctttttgaaggtctttttctctccgttacgttgataagatctatatatagaattctcatggattgattaccaaataaaataaataacgccaaaggtgtttgagttttttttctaagaaactttgttaggcttgcccacttcgaaatctacaaactatatattacacacaaaaaatggtaagacgaagatcgaaaactccaacacttttccactattaactttttgagaaataatatttacatatatataacaaaacttctcgagagattacattttttatttccaacctcgagagattacattgacggccggtcaaatatttgaactatatatatacactatcttattcaacatccgtatataggatctagatacacatgcacccgtatttatatagttaaacagtaccagtatcaatgaaaatcttagtacacgagtagacccggcattaagcttttttcaaccaaatttgggaacgtaaaagtatgaacataacgaattttcaatagtactgataattagggaatctggcacacaaatgaatgcattaaaaaaaatataaggtatatacaatatacttctctcgcatatgatcaagatcaattatccttagaaccgccgcgacaaaatttgtgaccttttttttgtcaaagaaaatttgtgactttttcataaagaaaataattgtacggcgtttaaagtcaagatatatgcaactgttgaattgaattgaattgaattgaaatactttaacaaaaaaaaactgttgaattgaaataaaaatacagtaaaattcaaatctcgtaaaagtttaaatacgtgaatagataacatgtcgttgaaaaaaagaaaattagataacacagtcctacgtaatcatttacgataaaaaaaaaaaaaaaactcagtagtacgtgacgcataacttgcttttcttgaaacctttgccagaaaaagaaattttgcatttgacgtttgtttgaccaacgactcgaatacaaaatattataaaacctcgtattgtaatgccggagatggagaagctaggtcacgtgatcgaccgagctgataaatctcatttaatatttttaatattttttacagcgattttactagaacaatattatatttacggtcaattttttcagatcaaagtatatttatattataaatatttgaccaacaaaaaattaacaattacttttgctttaaaaactaatactagtaataattagcttaccaacgtaaatacaatgtctaaaacagtttacatcataattaaccttcatatgattatagtcttaatccggcttttagttttagagatggtcttactagctccaaaacccaaacaataatatggagattgttcaaaataacactagctaggggtacggttaaactgtgaaataactatatcacacattcacacgtttaattggagtctacacgattttaagttaagcatttttatgtttataaaataatggtttgtatttatattatcttaagaaatttttgttagggtttgagtttagcaagttatttttatatgaaggtttgagaaatgttaaaagtacacaaacggatttttcctaaaatagtctacaaaggaaaacgatcgacaaagaagaaagaagaatattattatctgttcttttatttttcttcgttcaaatttctagagccaaggaatttttggttattttgagtgtaattttgtttccgttgtctacaactcaaaatgacataatacttaattagactataaacctcagtcttggatctcatatattttttgttttacctaatattaaaaacatggtaattcctcgattaatactatctacatattatatatatgtagattttgcttgaattgtttgaagataatatatacttcactattgagaaactttgattatttagactcgtatgctttcaatgcttttaggttctatataatcttttatgaaattaaatatcaaacacttaactatatatgtagatttttatatatcataaacaaaaatcttttgtccaaaaaaaagaacaaaaaaatccaaacatttaatgttcaagttaatattattccaaattttagtctatatataatcattccatgcatctagattaagatgtgttcaagaaatcggtaaatcatttccgcgtccattcaagccaaatcattcaacggagatatgacggtggctttctacaataatatttgattgattgagccatcggaaggattttgaagttttttctttcagtaaaaaaaaaaacgtattgcagattattcattattgccaaagcgagaaagaacaaaaaaaggacacatttgtgtttgtgccttcaaccacgtgcctcagagtaaagttgccataattcaacttttccaatccaacaaatacaaaactatcatttagtcaaaactttaccactacatttatgtctataaataacgtaccatccacaactcattgctcttcactccaaaacataaaacaataaccttagaaagaaaaaaaagagaaaaaaacagatcaaatcaagaatgtcgatctctctctatttccttttgctcttgcctctctttttaatcttcttcaaaaagctctcaccttctaaaggaaagcttcctcctggacctctaggtcttccgattatcgggaacttgcaccaacttggaaaatctctccatagatcttttcataaactttctcaaaactatggacccgtgatgtttctacatttcggtgtggtccctgtggttgtggtctccacaagagaagcagctgaagaagttctcaagactcatgatctcgagacttgtacccgaccaaagctaacagcgaccaaattgttttcttacaactacaaagacattggcttcgctcaatacggtgatgactggagagagatgaggaagcttgcgatgctcgagctttttagctcgaaaaagctcaaggctttcaggtatattagagaagaagagagtgaagtcctagtcaataaactctcgaaatctgctgagacacgaactatggtagacttgagaaaagctcttttctcttataccgctagtatcgtatgtagactcgcttttggacagaacttccatgagtgcgattttgtcgatatggataaagttgaagatcttgtgctcgaatctgagaccaatcttggctcattcgcgttcactgacttcttccccgcaggtcttgggtgggttatagaccggatctctggccaacattcggagttgcacaaagcctttgctagacttagtaatttctttcaacatgtgatcgatgatcacttgaagcccgggcaatctcaagatcattcagacatcattggtgtcatgttagatatgatcaataaagagagtaaagtcggttccttccaagtcacctacgaccatcttaaaggagtcatgtcggtgagtattacaatcttttaaggtttttgtgtaaagaaattaagttgacaatcaaatatgtattataattttatttttatgtaatacatatgaaattaatatttgttcttttaatatggtcaggatgtgtttttagcgggagtgaacgcaggagcgatcacaatgatatgggcgatgacagagctagccagacatccgagagtgatgaagaaacttcaacaagagattcgagaaatactcggagacaacaaagaaaaaatcacggaacaagatctcgaaaaggttcactacttgaaacttgtgatcgaagaaacattcagattacatcctccagctcctctcttgctacctagagagacaatgtctgacttaaagattcaaggctacaatattcccaagaacacgatgatagagatcaatacttattcaataggacgcgatcctaattgctgggaaaaccctaacgatttcaacccggagagatttatcgatagccctgtcgaatataagggtcaacattacgagttgttgccttttggtgctggtcgcaggatttgtccaggaatggctacggggataactatcgtcgagctcggtttacttaatgttctttacttctttgattggagtttgcctgatggaatgaaaattgaagacatagacatggaagaagctggagctttcgtcgtcgccaagaaagtccctcttgagctgattccaactccacatcagtggtgaagttatgaagaggtgtaaataatctaataagatcaagattttctcttgcgatcggtttcatttttattatattgttatttgttacgttcatgagttgttgttatcagtagacatttgtatgttcattatgttttttgtttattttaatgttcattatgtttaattcatgtttgaaataaagaaacgtccgattgtgacattagttatcatattgtcttctcttctagtatcattcaaacttcatagtttatttaacggactacttgaatttaaaaccagtttgaaattatataagacaactgatttggtttaattataaagaaaataatgtacacattaaaaaaacccatctttgagtattttagcatataactaacttgacaaaaccctaaatttgtttttttgggggtgaaatttaaaattgtgtacgtggttggaaagtaagtatccaacgttttataaaagaagcaattaatttaaaaccaacccatcttagaagcaattaattttgggccaatgaaattagatacaccacatttagtaagcaggccagggcctcatgataattagttgagacaagacaacaaataacgtaagcagtttacaaaaacaccttactacgcataattgcgtttatccgtagaagtttttatagcgtcattttctttcggtaatgaaaatcctttatatcttcttctttttacagagattaaaacgaagattttcaccaactcatgcaagcttttatgagttttaaatttaaactagagcacaaaagcagcattatatcggtcttgttggaaagatttgatgattcaaaaaattggactattctttatagtccacttggttaaataattggtggacatgcatgcatgttggtacttggtacgattatgcatgcattaaaatcgaccatagccatacaacaaatagccataaatgcgaggaccacattttcctagtttatctgaaaactttaagccgccgttcactgttgaatacaagaaattattatttttaaggaataaaataaagcgttttgtatgaaatttcttctagaaatacggtctagcgaaaaatttgaaattgactgttcgtaaccaaaatatagaaaccatatacgaaacaaggtttgcgatcattttttctgttttttttttgtaaaccgcatgagttccaaaattttgactcattttcggtgtccggaactagtctataatccattccaatttaaagatgttcctctatcacaaagagccataaaatccggagtacaagagaaccaaaacccttgtactactaccacttggccaccactgccacgaccacctctttggtaggttttgcggtctttcatgatttatttctcaattttttcataagatgtcagttatattttcttaagtattattactactaaaaccagtcatgatcaactctcccttacaatgatacaatgttttctagtctacaacgttatttttcgtactgcattcatgagttcaactttgaacacacggtctaaaacgtagttatcatttagaagcaacgttaaaatgacacgaatctttatttcttctcacaatagtcttatggatagcatcttcttacttgtctcatgtcacctctttttttctttgctaaaaggttatcttgtcgtctctctcttgatttctttgttgtggccggcgtttgcaagtccactaatggttatccgccacaaaaaaaacacatccgtacatgataaaaactttgaattgaaaatgttaaaagtcaataatttcaaatatcaattcatacttatacagaaaaaaaaaatatatatatacatatatatatatatatattatatgtacataatcttctaagaagctactgtgataagatagaatgcgggatatgctacctaggagttggaacaaaatctccaaactaaaaggccattgatcgctgaaaagaaagcccaataactaagatagtattggagaagcaaatattagccaactttaattatagcccattttggcagttgtacgcccttcataaacttcttttgtttacaaacatttaaaccaatcataagtacattctcttccaatacttttaaccaatcaaagtcttaattacatcaaaaatgtattaatatcataactaaacttcccggttacctatcatgtcccacaacaatcttcaaaattacatgcatttattaatatatgatatgctcaaatgtagaaatagaatatacaacaaccggtccacaaaccaaattaacactacttcattatacaatgaagcatgagaaaaagaaagaaagtattcttccttattttaagatgattatatttttgattcattgacgacgagtaggcacaagttcaagcgaaactttcttgccaataataatcgcaccttcttcttccaaatcgatatctttcactgtccttccttcaggcaatccccaatcaaagaagtaaagtaaattcaacaatcctaattcgactgtcgcgatccccatcgtcataccgggacaaatccttctaccagaaccaaacggtagaagctcgaagttaagtcctctataatcaacagaactatcaacgaatctttccggtttaaactcttctggattctcccagaggtcaggatcacgtcctatcgcgtaaacattgaccatgatctgagttttctctggaatgtcatagccttggatcttgattttagccattgcctctcttggtaataaaagtggagctgctgggtgtaatctaaatgtctctttgatcactagcttgaagtagttaagttggttaagatcttgttctgtgattctgtctcttttttcaccaagtactgtcctaacctcatcttgcactttcttcatcactcttgggtttcttattaactctgtcattgcccaaagaatggtcgttgcacttgtgtttactccggctagaaatatatcctaaattcaatcgcaaaaaagataaaattttaatacacatgccatataaggaaaaaagaattaattaatgttatataaataattaaggaatgttttaaagaatattaattctcttagtgaaaaatatgagaaaaattatgaaaatataagattctaatttctaagtttttaactcaccatcaatttgttgttactgacctaatcgattacctttaaaatgtcataaattcttaaatttgatttgtccgtatctcctcaatttgttcgatattataataacctatttttttctacatttatttatgcatactaatcaattcattccacctaggtcaacgacggattaaagattatttagaaatgcttacagagatgattcctttgatatgatcagtagtgagcttaaaagaaccatcttggctttgtttattcatcatatcaatcatcacatccacaacatctggagtctctaatacttttcttcctggctttagatgatcatcgagcacttggttaaagaatccgtcgagatcagcaaaaatttcgttaaggctcttgctttgaccggtgattttatcaagaatccaacctccggggaagaagttagagaaagcgaatttcgcctgaatcttctccgacctagaagctaaatcctccatgctatcttcatctataaactcggattcgtgaagattttgaccgaaagcgagtctacacacgatactagcgcttagagtgaaaagggctttcttcaaattcacgggagattgtttctctgaagcttcagagagtttcttgaccaacaagtcattctcttcttctcttatatacctaaaagagttgaattttttcaagctgaatagctcgatcacagcgagcttcctcaacgctctccattcttcgccgtaaggagcgaatcctatgtctttgaagttgtaagatattgtttttgacgctatggtttctggtcggctgcaacaatctaggtcatgagttttgagaacttcttctgctgcttggtttgaggagattacgactagagggacgtatcctaactggagctgcatcactggtccgtggattttccagaggtttaggagacatttgtgaggtaatccgttaaggtagtgtaagtttccgataatcggaagttttggtggacccggaggaagtttcagttttgaggattgagattttcttgtgaagattattgttactaaaagaagtagcaaaagcaagaggaaacagaggaaaattgacattttttttttcttgctctgttttttttttttttttttccttctctatttactaagtgaagaagaatataaatttaaagagaaatgaaattagactttttaatatttttatttttttggatcaactagacttttcagtctcgaagactttggagtctttagtagacttcagaggatgatttttgcacggcaactctctatttcatgggtcagtttcaatagtgcaaagtcaatgatgaattttcgataaattattcgaggtttatatatataaaatttatctgggggatatgtgggccctgttctttgattgatcgctacgtcagctacctgcgatctaaaaaaagctttcatctctctttcactttcatttcttctctctttcatctctgccgcagcgactgtaattcggccattctatagacgctgaaattttcaacgtctcaaattccctttctcctatctcttcagatctatcgctgcgactctttcattcatctcaccttcatctctcattcttttttcttttatattttgtgccgccggtgcttgtcgcagcgatcaacaaaagaacagggtaatagtcaagccattcatcccaaaaaatctaaaatagtagagatgttcatcttaatgaaagtgtagatgttgtttgaacagtactgaagctgttggaacaacagatgagatcgagaataagtctttcttgacgtaacgtagaagctaaaaagccacgtgggttgtgggccattgttcaagttaagcccaattgtctcgtagagacttcaaacgtgacttgagtcgtcaaggatttttggcccttgatataaataccaaaagacgacaataacaatttaggttatagtcttatagactaacgttcacaagcattccaggcattacaattgtcctgctggtcttgtaataaaaatatatgttacataacatttttctgtttcgacaagcaaatatataacttcatttttatttatagagttggaacatcattcaatgatgaataattgggacaagttcaagaggaactttcttaacaattgtggcatcaccagcctcttccatgtcaatatctttatcctcctcagccaatctccaatcaaagtagtaaagcaagttcaatagtcccagttcaacggtcgctattccaaaagctatccctggacatatcttccgaccagaaccaaatggtaacatctcaaaactatttcctttgtaatccataggacaatcgataaatctctccgggttaaattcctcagggttttcccagagttcagggtttcgtcctatcgaccatgcattaaccaaaagaatggttttccgaggaatgtcgtagccttgaatcttgatatcagccattgtctctcttggaagtaaaagaggtgctggtgggtgtagtcttaaggtttctttgatcacaagcttcaagtactgaagcttatcgacatcttcttcttcgattctctccttctgtttgattccaatgcatgttcggatctcttcttgagctttcttcattacccgtgggttcttaacaagctctgccattgcccaaatcatggtgatggcacttgtgtctactccagcaagatatatattctaggtcaacaatgacacaagatggttaagaacatatttaacttaagagataagatactttagagataaaagtccctgagttttgacagaactgtgaactagattttatgcttacttggataattcctttgagatgatcaatggtgagtttgaaagattcatcttgttcttgtttataaatagtctctaagatcgagtcgatgatatcagggcgatcttgatttgttttgtcttcaggattcttcaagtgaccatcaattacatgatttagcaaagtatcaacctcgacgaaaactttgtgaagtgtcttatgtcgtcctgacacaaagtccataaaccatcccacaccagcagggaaaatatcagagctgcttagagacccaactttctggacctcaaacatgagttcttcgatcttttccttattgacatgcttgttctggtctaaacgctgcccaaaggtagccctgaatatgatactcccaactagatagaaaagtgtttggctcaaatccactgtattcttcttcttagctgattcctttagtttcttgaccatcaaatcattttcttcctctctgatgtacctaaaagatcgaaccttttgcgtgctgaaaaagttgattaaggaaagcttccgcaactctctcgaaacctccccgtatggcgcaaaggcgatgtctttaccatcacgcgagaattttgatgaggcgttggtcttaggtctagtacaacactcaaggtcatgtactttgagaacttcttccgctgcttcttttgatgagatcacaaccatatcgataaaacctagacggagaagtaacaccggaccgtgtttcttggagagatcatgaagacatctatgaaacaatcctcgaagctggtgtaagtttccgataattggtagcttcggtgggctcggaggaagatttcgtttcgagtctttgaatttcttcatgaatattaacgataaaataacggggagaaagaagaaatacagaagaatcgacatagtttttgttttcctctgttttgtgttctgtttttggtgataagagtaacattcagactataaaaaaacagagttaaagacgtctttaccacggcaaaataagtcagggtcaatagatataaattcacatgtcatttattgtccgtgtgaggataagcttcgagaggtcaaacattgctcacaataacaacttagataagagaaagattaaacagaagtatacaaaaatatatagaggaaaaacagatagaagatatacactatgatacaaaccattattttctcttgactgtagaaaatgtaatttttcttcataagttttttattcttatataggacttcgtctaatgttgagcatttctcttttctttttagtgatgaagaactgggacaagtttaagaggaactttcttaataatagtgacatcaccagcctcttccatgtcaagatctttatcctcctcaggtaatctccaatcaaagtggtaaagcaagttcaatagtcccaattcaacggtagcaatcgcaaaagctatccctggacatatcctccgaccagaaccaaatggtaacatctcaaagctatttcctttgtagtcaataggacagtcaataaacctctccgggttaaactcctcagggtttttccagtgtttaggatctcgtcctattgaccacacgttaaccaaaagaatggtttttgagggaatgttgtagccttgaatcttgatttgagacattgtttctcttggaagtaaaagaggagctgctggatgtagtcttaaggtttctttcaccacaagcttcaagtactgaagcttatcgacatcatcttcctcgattttttcattttgtttgattccaatgcatgttcggatctcatcttgaactttcttcatcacccgcgggtttttaacaagctctgccattgcccaaatcatggtgatggcacttgtatctactccagcaagatatatatcctaggtcaagaacgtcacaaaatagtcaatgacatattttgactcaagatttgttaagaattccataacaacgagtatagaagatctcacgtttatctatagatcctatgaattttaacatactaatgtactatcaaagtttgcgttcaagaaaatgttagggaacatatcgataaaagttttgaactatgcttacttggataattcctttgagattatcaatggtgagcttgaaagaatccccttgttcttgttttcgtatcatatctaggagcgagtcgatgatatcaggacgatcatgagttatttcttctatagagtttttcaagtgatcatcaataatatgattcagcagagtatcaacctcgacgaagactttgtgaagtttcttattatgtcccgacacaaagtcaacaaaccatcccaaaccaccagggaaaagatcagaattactgagtgctccgagtttctggacctcaaacatgaggtcttcgatcttttcagcattcacatgattgccctcgtcgaaacgctgtccaaaggcggatctgaatatgatactcccaactagaccgaaaagtgtttggctcaaatctacggaagatttcttcagagccgcttccttcagtttcttgaccatcaaatcattctcttcctctctgatgtacctaaaagatcgaacctttgtcgtgctgaaaaacttgagaaaggaaagcttccgcaactctctcaaagactcaccatatggggctaagccgatatcttgaccgtcacgccagagttttgatgtgacgttagttataggtctggtacaacactcaaggtcatgtactttaagagcttcttcagctgcttcggtcgatgagatcacaaccatatcgagaaaacctagacggagaagcaacacgggtccgtgtttcttggagagatcgtgaagacatttgtgaaacaatcctcgaagctggtataggtttccgataaccggtagcttcagtgggctcggaggaagatttcggttcgagtctttgattttctttatgattattaacgataaaagagcgatgaagtacagaagaatcgacattgttttcgttttcttatgtttatgtgttctgttttttggtgatagagaaacatagtattcagactataaaacaaatagagttaacaacgtctttaccatggcaacataagtcagagtcaatagaaaaagtcatatgtcatctagtatttctgaggataagcttcgaaaattgacttcaaaatatgtgaacaccaatctacctttcaaaaactactaggacactaatcctaaatctacgttcgaaactattcaaaccggtagcaaacaaaaaagaacgaaaacaatttatctgaatgatgtcatctcttttttttcttctcccgcattgttagtatggtcaagagagacacctttattaataacttgactattactagcaaatgctatagatggattgctagtaatagtcaaggatgaattgttagtatactccaaactaagccaaggctcatgtaatgaaactcaagctatggtttacagggaagtgagagatttgaagatgaatctctgacaattaccttgcaagctcagctctagtgttgttgtggaaactgttaatcaacatcgatgtagtggttccactaggatacgtaagtttgtagtccacaatcatcacctgagatatactactgaataagaattcgtcaaatgaaacaattactaattagtaatgacatgtgtccttcaattaaaccaagccaaatttaaaaaacggatttttttttgatggactcggtttaatgagaaccaatagaatgagtttagaaattggtttagtaaaattggtttggtttaattgaagaaacactcttcaaacggtcaaacggtctatttgcataagtcttatgtatatacatttacgtattcaatgcatcattttgttgttgttaccagttatgtatcaggtcataagagatacaaaaattgccgctcactgttctattcacatattaaagatgtatcttctcaattcttttcgaaataatgtcatatatgtctctttgttgccacttatagatgagactgtttaatgtcatatttttgtttggtatttgttccgttttcacatctgatctatatcttgttctcaattctgccatgtggtttgtttattactgttgcaacttgaggaacatatctgcagtattgctttttcaagcgattggtttaaactaaactgatggatgattggttgatagaatagaacattctgttttccaaagtggttcagttattgttggagttacacataaacgtggaccaggctgaagttacagctgaaggtttcggcgatgcttgatgatgtggggtgacgttatatcaaagttatactattgaaagcagttctgtcacagccagcgataaggaaagcaacttggcaatatgtggtgagtttattttggttttctgatatctagatgttctcgttactgatatgatgtatgttttcaggagaatttgcaaaattgtcgtttactgatactaggtagaagaagcatgaacctgtgcatacacgtattgtaagttacttatatcctatatttgttacttgactgtttagagctatgttacatctgtttagagtgttgttgataccatcactattagcataagatggttccacttttctatcaactgcaatgtagtgcttccgctttccttctcctggtttgaagtttgatttctcaccaggtgagaagtacctggtagcttaccattgatgttgattgtcttaaccaagatctgataaatatcaataaggaaaacacagaggattagttgaagggggaggacctcgagatgcttagagtggagctccacaatcttaaaatgatgaaggaatataaatctaacttggtatgatttctaaatctagctctggttcttcactttttcgtcgttcaggttctgtgaaatggttcaagagtatttttaaactctagctgataatatgtgttaatggttgactctgtagactcaagtacatcatgaagtatgcttctaacatcttgcgactagtataatttcaaaatatttgaagtttttggcggactacaactcaaagcttattgaatcaagtaaatatataacaacacggtaagctattaaggtatggtaacttatacgagattattaaacattaaaacgatattattggctgatcaatctggtgtaccatttaaaacagttattaggtgatgatatattgctagatgaatataaaaaggacgaatgaagaagaagtgatgcagacatcacacctactgatggactgagtgagctacctgctgaagaactcaccgacggactcgctaaaggactcgctgacggacttccagaaggacttgttgacggactcgctgaaggacttgctgacagaccattcttacaacctagtaactccaaccatcaactgattgcgggcttgaaatacaaacgtcaatatggatattttatgaagaaccatcgagccacctatagtcattacaaagatggatcaagcgatggttgagaaaccatcaatttaccttacccgacaaccaaaccggagccaaacaaggaaagtctcttaccacgtctttattggtctattttgaagcctctagctcgtgtagaagcttctaagagtctaaagacacgctccttatcctttaaagaagaaatattctccattgaagacacttaccataaccggacccgagggaatcacaccatgattccggccacaagcattgaagctgcgaatattctcaagacatctaagcctccttttcaactagaagactcaagccacgagattatatctccttctccaagacacatcccacttctttccatatccggcaccaacgcatcaccaccacttattcccaacggctagaagatcacatcctctccaagttatcatttatttcgaatattgtttccttattttcatttcttgaccgttggaggtctctttgtttcgagcctatataagctcttcttcttttgtctcttaaaacacacaattttcaagtaataaaaagttcagtttgtttgctttcaaagttaaagtctttgagcatttgtttgagtcattctctttgtgtggtttccccttagagcttgtctcgtgagtcccttaaccttgtgtggtttccccttggttaattgattcgttctggttactctttgcttccatcaccatcactacaacacttccgcaagccattctgcatgaactcttgaactatcccttgatttacgaaaggtgtgattccgatcgtgtatcaagaagccagataaagaaagaggagaagctctccaggtaagttagtaacctttatgatattgtcggatatctcctcctaacatgtctttcgtcagtagtaagaaaccattttgggctaagtctgtttcttgcagaagtcgagttctttggcttaaccatagggcttacacatggttatattattttgttgtattgttcttcatttacctctagttggttcctaacttcctatgaacaagactcgtttacttcatgcagtaaaggaaaaagtgagtgtcaagtacgaatccatgttgagcaatcaagaaccacatatgcacacagtcaatgtttttatgtctgattaagcgcttttttgcactttgttcagtaagctgaacaagacaacaactacaattaaagtacatcatactatttcacttgagaactgttttgatagtaataataaacaagaaaactgattgcattctcgtttttataggaagctaaaagatcccttgaagcgtaaacaaccctcatttacctacttaatatgcaaacgggaggagagctgctttacgagaagataacaagagctttttggaggtaagaaaattaaaattcaatttttatactcttttcttctgttatttggactcttgaatctaattgtgcggatgaatggtgattacatgttaaccgcaaataggtctggtcccatatggattgtatgaagcaagagaagttaaaaaacagtttcatgaacttaactgtgcatattcttaaatgtgtaatagatggcaaggaagaacaaggagatatacatgaaatggaaggatataaagtatgtaaatctcagttagattgatcttgactccagcagagtgcaccattcttaagtactatctgaatctagcctcttcgtttatcctttcaaaatcaatcctcccgggagctcaatcttaccctcagtccctcaccgtaacttctcagaggaatttgctttacttgatcgctatttcggtaagctcaatgcaggaaccacagatggcatgtctactctgcttcttctactgacgaagttgcagtttgcgataaacccgtgtacacaatggagacttgcatgactggtctagacaagaaaaatgattttcaacttcagcttctgagatgactactagctttgggatcaggaacgaaaagaactaagtatcagagctaactcgccagcttccaatcccgggaagaaacccagttcacgcgtcgtgggaatacaatacacagaacagaagaaagatgcacctgagagtaaaaataaaaatattctctgaggacaacgattaccacaggaggagcaaataggtcgagacatccacagatagttaggcagaatcaatagcgctccacatgagagagaccaggatgaacgaggcttcaagtataagtccttcccaagcaaacatgtaatgtgtaggtggacacaacaatactcatcacacctataaaacccttcttctggatttatttttccctcacaagcttcacaccaatacgtcatgtcacttgtcttcttcccataagaaagagggagtatgtgtttatcatgcttatacctcacttgttgtggtaaagtagcacatttgaaacacaaagcatagtcacactcctcctcaatgcaattgaaggtttccttggtgtactcgcctggcgctttggcgcaaaccgaacagtttctttcctcatttggtttggatgttaggaataaatgatgcatatgacttggatgaagtaaaggctctgaaattgtggcgcactgcacatgtagcctaaaatcgcaatctattttactgcacttatagaagaaaccagatatacacaacgaaggacaagctgaacagtaatcacgatcagaattattccaagacccaacatctctgagagggttatctgatattaaagtgagtagatgtggatgtattggatgatgtaatctgcgagagagatttgcacattcttcatgtagaatgaaatcacattgcaaacaagagtaggagttaccaaaataaattggcatgatgcatgcttgacacagcttattctcgtcgtaatctttgccgttgttctcatcaagtgtcaaatgatgatgttcatgactgaaatgctgtatgattccatcgcttatcgtcaggaatggctcaagttcttccacttcttcttctgactctccttcacgttctataccatcccaaacatttggttgagtggcacattttgaatgcaccgcataaagacaacctttcttgatgcaatgatatcccccgtaatcattgttaatcttccggcgacaaacaccacaaatccaatctccttttcggaaagaatgggtaaaagagatacaatggaggtggcgagaaatccgtatgacatgaggtaagctgaaacagctttgatggataataaagtcgcaagggggacatatatagaacaccaaatttgaatgtttcaaggcgcataggctgcaagtttggggatcttgacttggaaacagggcaagtgtatgctcatgccacttgggttggtcaatagacaagactggtgatttcttggcacatgtaaacttgagcccaaaatcgcaaggagagcaaaaataaaacatacttgcggtatcgtcacggagaagttcgtgacagcaatagcattgcctggttttgtcatcattgaacaaggcaagctggagagaatgtttaggatgaagagggtgtttgatctcgaccggagccttgctattatcttcatggttctctccatagcaacctcggcagacaaaatgggtatcatctttttcttcagttaacatgaacttatcccagttaaaaggaagacagtcccacttattctttctccaggagactactcgtgcttcagttgagtcgtcgtcgctcactggatcgtcccacttttgattcctggtccataagccttgttcaatcacatgaaattttccctttttcaatatgacttgtacttgagggcaaagggaaataagattcttccactttgaattcatagacaggacgtgggagaatatacgatggatgagtgatatgagcttcggctccgggtcgagactcaatgtttccgtaaccagtagaaaaagcttcttattgagagacttccatacaactcttttcgtaagtgagcccgtttcaaactcaaccgtcttgtctttaaaaaggttcaagatatccaccatgttcggcttcgaatatcttaagttggtgggagaggatctgaaagaagcgagtgatatgagtgatatgaggttccgtaggggctcgggctgagaatcaacatccatagagttgaagacagagatagattgattagtgagtgacatgagctccgactcgggcttcggctgcaaattccaatccactgaggtggccagagagattatatatctactgagtgacaagaacctccgagagtaattccaattcagtctctcagacaaattatcgtccagaaagattagttgagtaatgaatgatttgagcttcagctccggagagttgtcgacgagggatattattttctgaatgagtgatatgagctccggctgcggcttcatactccatgtttccttgattagtgacatgagcgtagactccggaaccggctcctcccaatctgaagagttgacgaaatgcgttcgagaaatgagtgatatgagcttccttagcgaattcggctgggactccaaatccatctccttgaaaaaatcgattgtttcagagatgagtgacatcagctccgtctccgtctccgtcaccattgacttaaccagagagattatttgactaatcactgacatgacctcttctggatccgagtttatatagcttttcaaagcattgaatctcaagatgagtagtatgagcttcgcctccggatccatcgagacttgccgagagaaaattgtgagagtaagatgagagaattttcactatgaatgaaacttaatggttgctctctgtgtttgtgaatgctaattgtgtaatattttgcaaatatttataaacagacaatctcaatcttatccgagacgagccgaccacgtcgtgttgttcaacagagtaagtaaattcattcacgtactacagtcccggttaaaagaaaaacaaaaattagatcaattttaaaaatgtgtaaatttaaaatttaaatattataaaaatacatttatcttctgcacgtctatttagacaagctattatatgattaaagcgtaattttcttattcaaataatgtttcttaagcttgtgtgaatacagcgaaagaaaataatgtttcttaagcttgtgtgaatacagcgaaagaatatattattactcttacagttctctagattcacgtcgctagtctttgtttactcatatcgattgtcccggccatgttagtttggttacttcgacttccttattttatttttttatcttcactcttctaacttctaagaggcaagcgttcttctcttacaatttaaataaccaaaaataaataccctaaaaaaggaagaagatttgatttcattgtatcaaaactatcaattgaagaaagaaggcaaagtcatggcaattaatatgacagctaacatagacagctaaaaaatataaagcgcttaatttgtgtttattctcacttgtttctatcataatagtattaataatgattactgtatttaggtgatatgacaaaaacaaataaaataaaatagataaatgacaataaaattgtttgtacatgttaaaaaaaagcacatcactaattgttacgatcagaaaattgatggttctaaccaaaataatgttaggttctgtttatttttttattttgcatttgaatgatatttgttttagcatttgttattgagaatattacgtgttgaggcacttttctgaaagtttagccgtaattagacacttcacaatcattagatacttttttgatgtgaattgacatcactaccctctaactatctcttcctttgcttagtaatatctcttcgttatctttttttttaggaatacaaaaacaattttggcctctcttgttcttcatctctctttccaaaataaaaatccaatcttttaggacactcttaatattcaaaattgaatcttttaaggtttatcatcatcttccttatctctcaacaatctattgcttctcttcttctttctctctcgagatctttttcaaatatattctcaaatccacctttgtctgctggatctgattccaaaacatgtgaaagtctctggtcacagaatttccgtcagaagtttcctcgaaaattacaacaacgctatcgacattctctctttcgatttcgattccatgatcgtgaagcctctcccgaatttcaacaaccgcatcaaaattgtaaccacttgggcaagttacgtttctctctttctctcgaagttctagaccctatctttttggcgctccaacaatcatatctccgtcaagaggacgttatcctctcaaacgtggatctagctctgattctcttcacttatatttcgcagattagtttttttttacaaaggattcgagatgattttggaaaccatgaccaattaatttggttaatcttattaaatgaacaaaattaaccatacaattacatccacaaggttaatacattcacatactatactatataaactctaccataaaacgtcggatatgtggacacacatcataatgacagtcagtgttgtggacagcctttgctaattttggttcatgaactttagcttcatggatacaacgtgagccttcgagaccttgtagagatcttctgtaatttcagtaaaattaaaagttggatttaacaattataaccatccacaaatgtgtgtatgtcttgttataagaatttatctttagatccaatacaaaaatgttgacaactaatgttttctcttttctctctcttactaatcgttttatgtcttcgtgtcaaaacaagaaactaaccaaagactagagagaaagagagtgaaggttctttttgtgcttgtgttaaaatgagtgagttaagcaaagcattaatgagaaatgagagatgtaagagaagtgaacctctaaaagttaaatagaggaagaactccaaaagctcaacaattttttatcgacgattactgttcatgtctaaatttgtgcattgatatgaaacgacatgtgagttactaggtgaccatttggacttgattttttggacactcgtcaatgtcctctatccaccgcttttcagccactgttctgtagcctttgcagcaagtgttctgtaaccaccaattaatatggacatcattgtaacaaaatcaccacatatagcttgtttttgggattgttcacctattaatcaaacatgaaaagattcacaaatctcaccataacaatccataattcacaatccataataagccatccataatgcacataccaataacaaaagcagagcgagctacaaacacacttttatccacgaacatagatttaccaaacacatccatcaacgttcgatatatcaacttgggcttctctatcagttttcaaataaattaaacccataacttcaatattttcagaaaaaacatgactagcaaactataagagcctaatccactaattgttcgatttaatcgcaagtaaattcacgatgaacaaagacctctaatctctgtaacatcgtaatatctagaatttcacggtgatataaacagaaaaaatcagtagagacaataacaaagaaacttattgttagaggattctgagaatcgcaaggatgatgatcatcttcttcctgggtttgttgtcgtggatctcaaacttagagattatgaagagattatgaggagacgacaaatcgaaagtttatgaggagattatatatggtataatgaagattggtgatttcttatggaaaggagagaaaattaatgggaacgaccatgattttgtaagaattatagagaacaacaatgattttgaaagagagaactgaaaatgatgaaaaacaaaagaatatggaagagagagagatgataaaaagaagataatttctcacccacacgatctcaacaataatgagtttaaaattattgcgtaatcactactttaggggtaaattggtccaattttctctcaaaaagatggcaaagtgctcactctctcataagtgtctcaaaaagaataatattatcaaaaagtgcctaaacgtgtcacaatccctttgttattttatatagatgatgtatttaattggattttttttttttagttattttctaattcatcctaattttaatatgtagaaaaaataactaaaatatttatgtatttatgtatttatctgtgtagttgatgtgaagggatacttgagacaagagagaggactagaggagcttgaacgtggaggttcgattctttacgagaaatttgtcaaatctgttgtctgttgaatgatgtttatttttcttttcctaaggatcttttgtgtattattttcgattgagagagaacatgttatagttttctgatgaaagcagctgtttttgttttgaagtttgtaattgttaagttctctagttgctgcaccagaaaggttatatgttctatactttgttgctaaatcaaccgtgatcccaagactaatttcagaatgttccttgttttaaatccggttacgacgatcattttctgataagagagctcacatgtgggagatcatgagtcatgtatgaggaacaaaagagaagcagagtattgaatagatagaagagtatagaagaagttatgcttgtattgatgtgtgtgtaagaaaagtatggtttcttagaggagagttaggagatttcttgaacaaaagttcattgttagggcttgatgctttggaagagtttcatatattagtttcccagtgggatggtaatagtagtttaaatttcaagaaattaacaatgatacttgggatgttaccaaaaacctgcaagaaaaccttgattgctgattttgaattccaaggaatcagtgtcacagtcccaaaggaacaagtttgtttccttgagactgatgagtgtctaacttttctgataaaatgtgaattatattacccaaaggaacaagtttatttacaaaagcttgggggcaggagcttctagggccaaaaaaatattaaacatccgtagataaactattacatagaaacatagaaacttgaaagcatgggagaatcattgggagagcagcctaatcggaaacgccttgctagaagaatgtctttgatgtttctctcgatctgattgaagaccaccgcaaaagtaactgagacataatcatgatacctgatgtttctttctttccatatcaagtagattgttgcttgaacagcaattcgcttcaaggttgaagagagagtaggagtcgttaacaacaagcagaagataagggtctaactttgtgattctataattgtttcagaaagacaacttgacagaaagagaactaattagcagagctacctcgccagcttgaaatccccgaaagaaacccagttcacctcttgtgggtatacaatacacggaacagaagaaagatgaaagtgagactaaaattattctctgtggacaacgattatgacaggatgagcaaataggtcgagatatacccataaagttaggcagaatcaatagcgatcccctagagatagaccatgatgaacgaggcttcaagtataagtccttcccaagcatacatgtaatgtgtaggtggacacaacaatactcatcacacttataaaacccttcttcaggatttattttcccctcacaagcttcacaccaataggtcatgctacttgtcttcttcccataaaaaagagggagtatgtgtttatcatgcttatacctcactttttgaggtaaagtagcacatttgaaacacaaagcaaagtcacactcttcctcaatgcaattgaaggtttccttggtgtaataacctcgcgcttcggcgcaaaccgaacagtttctttcctcatctggtttggatgttaggaataaaggatgcatatgacttggatgaagtaaaggctccgaaattctggcgcactgcacatgtagcctaaaatcgcaatttctttcactgcactcatagaagaaaccagctatacacaacgaaggacaagctgaacaaatatcacgatcagaattaatcgaatacccgacaggtctgagagggttatctgttactaaagtgagttgatgtggatgtatcgggtgatctaatctgcgagaaagttttgcacattcttcatgtagaatgaaatcacattgcaagcaagagtaggagttaccaaaataaataggcatgatgcatgcttgacacagcttattctcgtcgtaatctttgctggtgttctcatcaagtgtcaaatgatgatgttcatgactgaaatgttgtatgattccatcgcttatcgtcacgaatggctcaagttcttccacttcttcttctgactctccttcacgtcctataccatcccaaacatttgtttgagtggcgcattttgaatgaaccgcataaaaacaaccgttcttgatgcaatgataccccccgtaatcattgttaatcttccggcggcaaacaccacaaataccatctccttttgggaaagaatgggtaaaagagatacaatggaggtggcgagaaatccgtatgacatgaggtaagctaaaacagctttgatgaacgataaagtcgcaagggggacatatatagaaaaccaaatttgaatgtttgaaggcgcataggctgcaagtttggggatcctgacttggaaacacagcaagtgtatgctcatgccacttgggttggtcgatagacaagactggtgatttcttggcacatgtaaatttgagcccaaaatcgcaaggagaacaaaaataaaacatacttgtggtatcgtcatggagaacttcgtgacagcaatagcattgcctaaaaaaatgattatgaattcgaaaagaatatagaaactaactatggctgaatagtacctgtcggaaatatactttaaatgactatagactccttacaataggtttttggttcaggggacaaatagcttcataggcatatcatttcaaattttgaaatttgaaatcacccggagcccaaagttggtttgaagacgcaaccgatatagactataatttcaagaaaatgaataattttcatttatatcagaaaatatgctctaaacagaaaaccctagcgcctattccgtttctctctctgttgaagaacatacctgcagaaaaaaaaaaccacatgcgacatcaaaatcccgtttaaaatctgtcgattcgtgtgtttgtgctacatacggggtcgaatccatcaatcccgaaggtaaatattgttagatctggattttaaagcacacaattagtatatttcacaagggatttagtttagtaactgttgataagcaaataaagttctcgtcgtcgcaggtgaaatctgtatacgctaatactgtttctagatggcgaaccaccctcttcctcgtcggttgtttcgggctggatctgaaccaaacggtgaaagagtccagtcttacaatgagttatctttaatcgatgacatcgccaacgctctagatgaagacgacatgaagattctacggaaatcgcagtttggaaaattatttgatatcccggagggagccgcgtattctgggaagcttattcactttcttctaacgaggcagctagttgttagcaaggaaaatgaaatctgggtaatattctctggttccccaattcggttttcgatatctgagtttgaaagagtaactgggctcaactacaacaaactccctcatgtcaaagagagaaaggggaaacgaaaattacttcctggcaagtattggtacaacttatttgactggagtgatgtatctgttgagtgggttgttggtaggctgaagaaacgaatggttgaagatcaaggaattcgtctacggtacgctactctagccctcattgatggcgtcttgtgcccgacgtcggatagaagcaaaatatctccggtacatgcggacatggcagaaaatctggataagtttcttaatcatccgtggggaactacatcttttttattgacgttgaagagtgttacagcaaggggtgctgataagcttatgcagaaatatgtcacggttcagggattcccacacgcaatccaactattgttccttgaaagtgtgcctcgaattagggaattgcaattccctgaggttgacgaagatgatgactcagatatggaggaaacacagaaggaaatagagcgtctatggagcttgaagttggatattgtctggaaagtcgataggcagtcccaagtaatcgttgcatttcgtccttttataaaatacatactattatactttatatcatgttatataaaactttagttaatgtacttctacataacatgattttaaattgtctagcatgtattaacttaaaatagcgtacttattgggattgcagtatgtgaagggtaattttagagatttaatacaattagtctacgttatttgagggtgtattatgatttattgataaatcacatcctttaaatatatgtaacatgttttaatttaatcaaccgtgttatgtttggtctggagttgggttttaatctagttgttctatgggataccgtaataatgtattgactactttacataagttttgtattgcattacgttaagggtaatgttagagatttattaaaattagtctacattatgtcgcttttaatatgatttattgataaatcgcatgttgtatatatatttcacatgatttaatttaatcacccgtgtaatgtttcgtctgtagttgggcgtaaatcttgttggtttaggggataacgtaataatgtattagatattttactatagcttctttttgttttaaatttatatcatctgatatttatgaatattctctggcttttaaacgtaaaactaaacattctttattaataacaatagcatgatcttaaattaagaaatcttgatttttttgcagaccaaagtcacatctgttatgagtggtacagctaatggtgaccctttctcgagagggtggattgatgacgtagctgatcctcgtgttgacagcttattgcaacttattagagaggatcacctatttaagggatccatgttcttaggtggtgtagtccctgattctttgcctgatgaaaggaatgacaacagcgatgtttgtagcactcatgattgtggtgatgatgacaacaaccaaactaatgaaaccatggatgcctcctccaaaactcgtaaagctaaaggccagtttagcataccagactcgatcaaaaactatattgacaagaaagacaagcgaatggagactcgtatgttgaaggctatagctgattcggaggctagattaagcaccttactgagagcaacccatggcaaacatcatgtgtacgaagaggttcaacgtcctggagtgggtgtgaagggaggatctgttgttgatatggatacatctgtgggagtgcataccatgaagaatagtgcaacagatattcttgatcaagttttaggggaagtgatggaagatatcaatgatgattcacctacccagccgacaaatactaaacatcgcttatttccgaaggcaaagccactgaaccgtagtttgctggtaataatttataagtttatcttcttttaccttttatttgttaacatttattacttctataactgtttgtcatctgcagaagaggaggagagtacacaatagttcaacgtctaccacccttccacttgtggaggtagacactaggtcaggagatattgctgcttctgtagagaaacctcaacagcaagttaaaggttccgggattgttggcgactccgatgaagtacctcaggatggaaatcatgacagtccgtcaagcagtgattcaccaaatcctgatgaagctccccaactacaggttccagttaatcctgacacagaatacaatgcttatattgaatcggagccaaacattacggaaccatctatggtattgcattcaccttttggaactaagaatccatcctctttgcaagttgttgaattaccatgttttaccaattcattggttctatttcggttcattgatgtttgttttttggttttccagtttcaggcagatgagaatagcaatgataaatccaccccacacccaccagatgatgagattgtgtcggggaaagacgaagaaacaatcgctgccccacctactctaagtgatgcggttagacctgatactctgtattgttagtttgtatgatgtcatcttaccacatatttatgttgtgggtttgatgtttgtttttttgttttccagtttcaggcagatgagaatagcaatgataaatctaccccacacccacaagatgatgagattgtgtcagggaaagacgaagaaacaatcgttgccccacctactctaagtgatgcggttagatctgagtctctgtattgttagtttgtatgatgtcatcttaccacatatttatgttgtgggtttgatgtaggctaatttatccaaaccagagggtggaagcattgtttctgacagagatgcacatagaatagcagatactcctgctttaaatgatgaggtaagagctgaattacataaaaaacattagatgcgctataatgtatcacattttaatgtttcccccacgttgtaggccaatttatccagctcggtgatacaaaattcttcggtcgcaggctccccgccaactgaattagtggcccgcgatgacaaggttgctatgaatgagttagagtcttagtagatatgaatttcataggttcttaggggcatcattgttagaactcagtttatctggttatggttttgtttttaaaataacggattttatttccacaacgttctatatttctaaagttcacgtggttttgttataaaactaagggacatgctttataactatataacatacattagtttatattagttctcgtcgtagttggtcatgagttttatttaaaacacggttgatttaagttggttaaggttttatattcttgaacagcatgtgttaattataaagtgcatgttaaacatttgcttatgaggacaaatatcatgcattatataaaacatgaaagtgctttttaataaaaactcgtgaatttagtgtatatgtcagattatttctaactaatcttccatttttctcagctcaaacctgtaacacttatttcatcctccaagagtagtaggacggttatatttggtcatgatgttagccgcattgctaagattaatcgtttatatgcactgacttggtattctttcctcatctttgttatgctatgataatttcatttcattttaattaacttaattataacctatctacccggtgttttaggcccattgattttggtgctgatcggaccttgtcttcatcggaactccgggatattgtagaattgaaggcagtcgtgcctagtttggtattatatatatatatccacagattcaaatatacagctatttattttcatccatgaagagtcctttaacagcgtaaatccatttactattcctcaggttatggacatattcataaactgcataaggattgattggacagcaaaaaatatcatagagaagcagcaagatgtaacattcattgattcggcatttgccaatgaattatgcaagcattaccccaaattctcgaagacagctgacaagggaatgtatgggtttgaccatgatctactagaatgcactccctccgggtttggaagggtctactttccctttctcgtcgactcaaagcattgggtggggctatgtcttgatgtgaattcaaaagtcattactgttctagactgctatacaggattatggcgtgaaaccaagttgaagaatatcctttcgcccttggctgaaatgctaccttacctttttcgttttgcttcaaagaagggtggggaaaagaaacttcgattgaaagctgttgttgttaacagggaaaatgaagttccactggctgatgctgtacaatattcgggtgtttttgctgctcatttaatagaagtgcatgccgagggtgggattcagtcatgcaaggaagtgacccacgtttctgtggtgactgctgcaaaaaaatattttattgctgggtaagagttggctaatgggacgctcggaaactgcacctagttttttgtattactatcaccttattctgtaattttgcagagacctttcctaggatattaatgttgtttcgatgtatcgttattctgtctgtttatataattactacctgatattgttttatgtaccatagtatttactttgatgacatgtgtttttaaaatatagatgcattaaaactgatgcatctacgagaattacgactttgtactctctagatatctaaacccaacaattgttaatatatatgcttgtaaacaatcatgtttaatcgaaattgcttgtctgtaaagtttatgacatgttatgttagcgtacaacttgttattcatagatacatttttaaattgtttgatcttaaacaaggattcttaactaatattaatatacatgtaggatggcttttattgttttgacatgttctgttagcatacaattagatgttcactgttgcaaatggaactatttagtattatttaactaatataaatcaaacaacgagacattagacataataatcataacacaacatacatacaacatgtaatgtcaacaaacattacgttatttttaagagttacccgactggtgacaagtttccacagatactaaaacattagacatacaacaagtaaaacccagtcatatcatgttatcggccgattaggatgagaagctcctaacagctaacatcgccgacagaattctttggaacaaaagaatatatagcactcttcgcacctattatatatgttgtggattgatacacatgggggatgggccccattctatgtaagcctgtaaactgtaccttgacgcaccgccattcgctcaagagctgcaaatagagagtctcccatagcgaatacctcggcccaaggttgtgcaaacaactgttcagtgaaaaactcacctagctctttctctccaccacaaattgtcaacattgccatcacaaacagtgccacatctactttgtttatcgctttgaaaatgtgtttttagccatgtttaaatctttttcccaacaagcgtacatgagcccttccaagtaatgtgcttcggggttgtttgtctccaatgcgtcttcaaattgttttttgaataacccacccacccgcataagtacaggattttgtctgtactttctcatttcaactcgagctatcatgtgtgtatagggaggattatgttattcattggtcggtgagattcatgtatatatagggcaatactggtggagtgtgtatacacacatttatgtggggttggtggtgggtagataatgtgtggtgggagtaaacttattgagttctattaaaatatttcaagtgggactggaatcctatgtaaacagtgttcatcgcatgtgttgcagtataataacatgtattacgatttatctgcatggttggcaagaaaatagcatctgtacatggaaaataattatttaattgagcagtttttgcatcatggattaattgctacaatttgatatgtgtcttttaaaccttttggtctaagtgaagtaatagatgtgatgttctgtgtgtcattttacactacaacatgtacttttaattaaacactcgcgtctttacttaatatcatgggtctgtctacaaaagggggaattcaaagtttcttacacaaaatccaaaaaacaaaatatttccctttgcctggtagaacatcatcttcattaaggcaccaataggatttgggatttccttgattgcattttgtacgtaacgtttaggcgtcaccctaatcgcaacatctaattgctaatatgtacattaaaccaagttacccttccttttacatatacctccatccttgatggacttccccttgcatatattacacaacttataacccatgagcaagacgcgatatacaataccccctgcatataatgtaataacttaattagtcgtgttattgttttgtacaccatgttttttttgtaaaatatgttgcaaaccttcatatggacattttgcacgtggcgcggttatgtcatgcgcctgtgcaacgggaacaacgtgttagttggcgttgtggtccttgcggaaaacacatgctagttaagaaatcaacaatcaaatagggtcaatttctgtccaaaaacaatacatttaccgtaaattcccctcttgatatgattctcttttttttgggcctacccggtggcttccgtgttgctggaaggaacaggtggagggaggctattggttcaggcaaagcgaaaacgtcaccaacattaggaacaggttttattgtttcttggtaagacattctccagctttcaactgaatattcgggcgccatcagtccttgaattggaactccctctgccactgctgcagctattgcatgggggcaaggcaggtgaagcaaatcaaatgctctacaggaacaggtgcggtccagtagcttaacgtggaagacactagaaccttcttccctgacctaataatcgtacctatcgatccggtgcacaacaaatctgactgacttttcaaagttttgatgcaccacttctctcatctttggtgggagtgtagatgtttcggatctagccgcctcacgcctcatagcaaaccatgaaatcaacgttgtccttatgaattctaacagcgaaattattggtaattcccgggcttccttcaagactgcgttcagagactccgctacattgcttgtcatgacattgtatctttccccaaggaaatatgctcttgtccaatgacaaaatccaactgactctaggtaccgtgcacaagctggatcaagttttatcacttcgttaaagtaggtatgaaactcacaaatacggtaagccctagcagctctcgatacgtggaacaacaaatgttttttcttataggaggttgcaatgtttctttggagatgaactatgcaagcgccgtgcctagcctttggatacacctgcgataatgtagctgttattagttcctataacatgtgttatactggtatagcatgtgatgttaagaatattaatttctagtggttaaaaactgcaatacgttagatctatcctaataagaaacgaggaataccaattattattaactatcgcatgcattatattggtacctcacgtaatttatgaactatcatgtgtgtttaatgttaaatgctagggttaaaatataatacatgtaaaaataaaaaaacagcagagattagagattacccttctcagccccgtgtaaatggatgaatgtcggtcagagacgaatgtcaggttctttccatcggggaaagctgtgctcaaaacgcggaaaaaccactcccacgcgtcgtcgttctcgctatcgaccaccccaaaagctaagggataaacttgaaagttcgcgtcttgtgcgctggccgttaggaggcagcctccatatttgcctttcaggtgcgcgccgtcgatcacaataacccgtttcatgcatgcgaatccttgaattgaggcggcaaatgctaagaaaaggtacttaaacctgtaatttcctttagcatcaatctcagttttaagatcaacaattgaaccggggttggccttttgcaagacatgaatgtaggccggtaacagactgagccttgcgcactctccaaagcaatttctcttgatttccatgccttccaataagaaattctaaccgaataatcctttagaaggattcgctgtaggtctatagctcttggcccccgtgtgttgccatcatattttgacttaattatgctcccgattaccctcgttgttgctccctgtggtagttacaccgttcttcgactgtgcaagtgtgctccagtgttgcacttcgaatttgataattgtccgtgtcctccaatttgaaaatgtacacacgccaagggcacgattcagaaatgcatgtcaaagtcattaatttcttgcaggagcgatcacagcgaaaatgaaaacgcctattaagtgcgtgtactgctaacttgacattgcaatcttgtttgtttttgaatacccggccgacaaacagttcatcaccttcatacacaacatcccgaattgctagttccatcccgacacgacctgtaaaaaataacgaaacttagctatcaaatcagacaacaatgtgtttcaacgtaatgcatgatattacaatacataggaataaatggaaaaataaatagaaattacacgatataagtaagcatgccatgttatagttacgtatatcaatgtaaatataaattattgtacaaatacattcgacgtaacgtagttataaaccaaagaaacaatagtttccaatgtttcacgtgctatttagcaacatgctggactatttggaacataaataagtaggccctcgacggatacagaatgtgcaagatatcttataggtacccgatatcaaattatatataaatagatgtgttttatacgaaaatagcatgctatgcaagtggtaccttcgtctccttgttcatctagggttggcgccgcatccctgttgaaagatgcgaagttaatgcacatatcttcaagagcctgttgtagtgggacctgtaggtccaagtgtacatctagaggttcggtcatgattgtcgccgacggcccgaaaaacttgcactccttaagagtttctgccccgtcatattcattctcgtcgttgtacccttcacttccactgtcagaaacgtaattatcagttgccagattaattgacggtagccctagatttgccagcaaatctgcctccacaagatttgaatctcctttctgcgtaaatagatttgatataagcttggtacattcttggtaattataaaaaatattgaactactaaatgaatacctcatctgccttttcactcgccgtgtccatactttgagttgtttccaaagtcaaagctggctcaacagtagttcccataggtggtgcatgtgcgttggaggaagagccaccgatgtttgcaccatctgtacctgtcgaacgcatccatcggaggaccgcttcatcatctattagctttctccaaatggcggactcgtagttaggagatctttcctcattgcaatacaatggtgatttccccttagctgccaacccgtaactcgatgtctgactcattccatcatcaaccggaacaccatctaccgttagcttagagacaaacaaactcaagtcttccaactcaaaacgcatagctaggaaaacccccattgtctcatctatggcgatggttactggcttcgttcgtcctccaaaggtagcctccatgtccatccaatcaggccattggtatgtcatgtgtagctgacatcccatgtatttctggccgtacgcttctctaaccagctcccgaactgatgacagcttttcaccttcacgaatactcaaccgtctgacagcattattgtggtttgctatgaatatccatgtgccatcagctccgattgcccaggttccattcaccgtccggacataacggtcttcggttatttcggttataataaccattggtacctacacatcaatagggttgcattaaataccatataaaatcaccatgcgatttattaatataacatcaaagtagacaaaaagaacaatcattaattgcataccaaaacagcaacgatcgacctctgagatgttgttggatacttcgtttgtgttttttagatagaagaagaggtgtgagagatgatatcttgccatctattatcttatatagaatagttgaactttttagggctacagtagtctagatattttgggcaacagttgctgacccatttacaacgacgtgaattttaaaaggttatgatttccctcccaacacccgagggcggcgagaagatctcttcacgaatgtcgcatcaaacatgtacttgttctttatttgtattgcatgttatcggaagtagaaccaagtgatttaccatatactcatgtttttacacatcaacttgtcccgaggtaagatacactatatcttcgtgctcaacttgctctgtcgtaacgctgacgtcatttgagacgtgtcacctacttgagtcgataagatgtagcgtacgtgagaagcacatatatagcgtgtgttaagattggtacacataagaaaaagttttcattttttaacagtttaataccttgaaagctgaaactctctgacgccgcatttaatgctatggatacgtatctactctcctctttgcacgcgcttttcactgtcacatctgttactttttatacttcttccactatgttatctttgcaagtgggagaacaatgattgttgcgttttttgtaacaaaacatgttgttttcgttgtacttatgctgtttcggaaatataatttctggagcttcttctcaaaagcccattatactttaggtaatccagtccagtacatttccatttaggccttccaaataaaacttctacttcatttgctttacattaatacatgctgctaaggaaaatttgtacatcgttttttttatacataacgcgggttacgttatgaagtttgctatttgtgggatatttatagtattttggtattcatgtaaacgccacatctcctttcccataatcatttcttgcaggtttgaggaaagtcatccatctcttttattttcttacatgcatcatccgaaggtaattatatacgacatgtgtcgtattcaaaatccggtgattcagcctgtagtaaccaatagctcgaactaggttcaattgcatattgaggtaacatgttacatttaaaaatatcgctttctataatgcatgcattttcattacgtatcggtgtaatcatatctctactaccctagttgttcctataccgagaaccctactgtcggaaatagagatttggcgcccaatgaccgaggttatattcgttatttcgcatggcccaaaaacgttagttacccaacttttctgcatgaaagtcattttcttaatattgctgtcgaattacgttattcgctaatattaccctaaaaaatatcaagcggttaatttttgtttatccccatttgtttttttatcataatagtatttttatagtatttaggtgatatgacaaaaaaataaaaaaagtaaatgataaaaaagttgtttttaaactatagtaacggttgattaatagtggttttacgcacaaatagagaactgagagattattcgaagttttaatatgtttgaataaaattgtttgtacatgttgaaaaaacacaacacgaattgttaggataagaattgatagttcgaaccaaaattaatgttataaaaccatatatgaaacacggttttccattattcatttatcaattctttgaaatagttaactaatatttttcaaacttcataagaagtcagttctgattttttaagttttattttaaaacatatatttactatcaaaacaggtcattaatataaactgttctttcaatcgaaagaaaaagtcatgacaactaatatgacagttaacatagaccgctaaaaaatatcaacggcttaatttttgtttatccccacttgtttcttatcataaagtattaaaaatgattattgtatttaggtgatatgacaaaaaaaaatagctaaatgacaataatgttgtttttaaactatagtaacggttgattaactgtggttttacgcaccaatagagaattgatagattatttggaagttttaaaacgtttgaataaaattgtttgtgcatgttgaaaaaaacacaacacgaattgttaggattagaaattgatgatttgaaccaaaattaatattagaaaccatatatgaaacatggtttgccatcattcatttatcaaatttttgaaagagttaactaatagtgattatttttcaaacttcttaagaagtcagttctgatttttgaagttttattttaaaacatatatttactattaaaacaagtcattaacgtgaagttttattttaaaacatatatttactattaaaacaagtcattaacgtgatcatttgttctttaatgataccaccttgacgttattttcattctgctttcttgaattcaactttgaacgtacatagttatcaattagaattaacgttaaaatgagatgaatctatatttcttctcacaatagtcttatggatagcagcttcttacatgtctcttgtaaaagattattttgtcgtctctgtcttgatttgtttgttgtggtcggggtttgccgatccactattagtttatccgctaccaaaaacatccgtacaagataaaaactttgaattggaaatattcaaattcgataatttcaaatatcaaaactcaaaagttcatacttataccaaaaaaaaaaaaaaaaactatatagattatatatataatattctaagatgctaatgtgataaggcaaatctatgacaaatctaggatatgttaggagttaaaacaaatctccaaactcaaaaggccattgacatattgatactttaagagaaagcccaataactaaaatagtggataagcaaatattagccaacttcaataagagctcatttaacaaaataaaataaaatagaacatattatacatctataataacataccacaaaactcaccaatatatatttgaaagattattttgaaacaaaattcaaaaatacgttattgacaaactatgatttgttaaagaaatcgaaattgataaataaacaattagataataatataaccaaaattgatgattaaaccattgggagcactgcattcaaatgtgaatctaacaaattaaattctcttttaaatatcaaggttgacatgcgtcatatttatatatattttgtttttaaaggtatgagacatgtcatcatgacatcaaagacagtacacattaagatcaactgaacctagatagtgcaagaaaggaaaagcttgagtttattattgagattcaaagagttggaaaagaagttaacaatgctataaagacgagaaaatccaaagcacaatagatatttattttaagttttttcttcttaagtttaagccatcattcaatgataaagaaccgggagcagctcaagaggaactttcttaacaattgtgacatcaccagattcttccatgttcatatctttcatctcctcaggcaacttccagtcaaagaagtaaagcaaattcaagagcgtcaattcaatggtcgcaatcgccgaagccattcctggacaaaacctcctaccagaaccaaatggtaaaaactcaaagctatgtcctttgtaatccacaggacaatcgataaacctctccgggttaaactcctcaggatttttccagtatttcggatctcgtcccaacgaccatgcgctaactaaaaggagggtttttcgaggaatgtcgtagccttgaatcttgatatcagccattgtttcccttggaagtaaaagaggagctgctgggtgtagtcttaaggtttctttgatcacaagcttcaagtactgtagcttaccgacatcttcttcctcgattctctccttttttattccaatgcaagaccgaatctcgtcttgaactttcttcatgactctcgggttgttaacaagttctgccatcgcccaaatcatggtaatggcacttgtgtctatcccagccagaaatatatcctaggtcaacaaaaagatatgatagtattaattcagtatatataggttagatgtaagaatcatgaagtaaaaagattatttttctcacttgggtgattcccttgagatgatcaatggtgagcttgaaagatttatcttgttcttgattatgtatcatatctaagagggagccgacgatatcagaacgatcttgaggttggttctgcttttgatgatcgtcaatcatatgattaagaaaattatcaacctcgatgaacactttgtgaaggcccttatgttggcctgacacaaagcctataaaccatccaagaccaggaataggaaaaagatcagaaaatttgaaagttaaacttttctgagcttcaaacaccagttcttcgatcttttcctcgctgaaatgcttgttatctgagaaactctgtccaaagacaggtctgaatacggtacttgcagctaggcaaaagagggttttgctcaaatccaccggagattgcttcaaagccaagtctctcagtttcttgaccatcaagtgattctcttcctccctaacatacctgaaagattgtaccttttttacgctgaaatactcacgaaccgcaaccttacgcagctctctccattcatcactgtatgccccaaggccgatgtttttgttgttacgggagaaaacccttgcggcgttagtgttaggtcgcgtacaacactcaatgtcatgtgttttaagagcctcttcagctgcttcactcgatgagatcaagaccagtgggacaaaccctagctggagatgcatcactggtccgtgtttcttggagagctcatgaagacatctgtgaaccatcccttgtagctggtgtaggtttccgacgatcggaagctttgctggaccaggaggaagattccgtttcgattccttcatcttcttggtgtagattaacgtgaagagaaagggaagggatagaagcaataggaaagattgaagaatcgccattgttttcgttcttctgattttttggaagatgaaataaaaatcaacaacgtttataatacaaagttacatgtatatattagggattattaaatacatgaggaatgctcttgatggagattaagagcatgagactaaaaatagttgtaaatatctgaggttattaaatacatgacaacaacaacaacaaataaagtatatagaaagaatatcatattttgacctttatagtatatgatattctttgagtttcttaaatatcatatttgagtttgttaaatatcatagtttcttaaaaattaaaagagtaccttttgatatttaagaaactcaaatatgatagagtttctttgagtttgttaaatatcatatttgagtttctttcatttttaaaaattcaattattttattgttaattccaaaatttcttgttttatattaaaactggttttcaaaattattaaccctatcagaaaataaagtataaatataaaaaagaaattatttctttaatcaaattgttttctagtaatattttaaaatattaaaatttattttcacatcgtctaaaaagtgtttaataaaatggttgaaccattcgtttgttaacttatatatcctaacgaaggtcagatctaattgttcattgttcgaattatcaccttaactcatttggtaataagtgctccatgcaatatttaagttgtggagtttgattcccgggatgaaccaagtattattcgtgtttaaaagagaatgaatgagcaaaataaaaagttggaatataaaacccaagtattttttatctttaaaagagaatgtatgagcaaaactaaaagttaatggtatttgttcagtgtgagagaagagttcaactaccaaacatcaatcaaacacaatcaatggtgcactaaacactgatgtagacagcataatcaaagcttaatttccatttgtaattgcaattctgaattctgaattctaatattaatcaaacacaacacattcaagcaatcacaatagataaaaaaaaagagttctgattgtaacaacgattattttttttttgaatataatttaacattagattcaaaaaaacaaaataaacagaaaaagcgttctggtttatacaataagcataccatatgtttttctccaagctcatctacaaactgatgcgaataactggcagaagctcaagaggaactttcttatcaacagtgagatcaccagcttcttccatgtccatatctttcttcttctcaggcatattccaatcaaagaagtagagcaaattcaagagccccaattcaatggttgcgatcgccatagctattcctggacaaattctccgaccagaaccaaatggtaacaactcaaagctatgtcccttgtaatccacaggacaatcaataaacctctccgggttaaactcttcaggatttttccaggattccggatctcgtcctatagaccatgcattaacaagaagagctcttttctgaggaatgtcgtagccttgaatcttgatatcagccattgtttctcgaggaagtaaaagaggagctgctgggtgtagtcttaaggtttctttcaccacaagcttcaagtattgaagcttatcaagatcttcttccatgattcttccttcctgtttgattccaatgcaagttcggatctcgtcttgagctttcttcattacccgcgggtttctaacgagctctgccatcgcccaaatcaaggtgatggcgcttgtgtcaattccagcgtgatatatattctagctcaagaaaaaaacattacatcattaattaaggatatatatataggttaagatataaaaaccataaagtaaattaaagaaatttgtttgcttactgagaggactcctttgagatgatcaacggtgagcttgaaagatgcatattgttgttcattatctatcatatctaagatagcgtcgaccatatcaggacgatcttgagttgctttcttcgagtgatgatcatcaactatatgattaaaaaaagtatcaaccctgttgaagacgttgtaaagcctcttatgttggcctgacacaaagcctataaaccatttaagaccagcagtagggaaaaaatcagagaatctaaaagtcatattgctcagagattcaaacatcagttctttgatgctttcctgatcgacatgcttgttatcaaagaaactttgtccaaaggcggttctgaatatgatactcgcagtgagaccaaagaggattttgctcaaatccaccggagattgcttcgaagccaattctttcagtttcttgatcatcaagtcattctcttcctctctaatatacttgaaggattgaacttttttcacgctaaagaattcgcgaaccgaaagcttacgcagctctctccattcatcaccgtaaaccccaaatccgatgtctttaccgttacgcgaaaaaacccttgaggccatagtgataggtcttgaacaacactcaaggtcatgtgttttaagagcttcttcagctgcttcacttgatgaaattacgaccattggggcaaaccctagacggagatgcatcacaggtccgtgtttcttggagagatcgtgaagacatttatgaagcaacccttggagctggtgtaggtttccgatgatcggaagctttgctgggccaggaggaagattttgttttgactccttgatcttcttggtgaagattaacaagaagaaaatggggacgagtagaagcaagaaaaaagatagaagactcaccattattgtcgttcctctggtttgtgctctgctttttttgatatagagaaacattaagacaaaagaacttattgccgtttattgccgtcagtgaggataagctcgagataaagactcagatagtgatgcttaaaatcaaagatatatgcaatttatgaacagatggcgatgtgtaaatttgtaatatacatgtataggaaaatatttacctagatttttcttacaagaaaatacgtggcaaatttgaaaagtcatagataggaaaactattgttgaaaaatataggagaaataccaaacacttgtgaatatgtacaaaactaaagaaatgtgtttaacaaaatagaaagaaaaaacaaataaagaaagtattttttcttagtactaagtaatatgatttgaatcatgtattagatagaacgtgatcacacagtagaaaaggacaaaaagattcagcaaccttcgataaatcatcttctcaatttgcggaatattctgaaaaaaatctaccgaaaatttttgtgtggaagataattctttggccgaagacataaatcaaataatgtagtcctagtttatcattgctttctagtttctacggtggcaatggtaacctaacaaatgatgcacgtaactaattccgtatgctgctaatggaggaggcttcatgtaagttacattattaaacaaaacaaaagtatgaaaggcaaaaacaaaacagaaaaaaaatattacattgaaaattatcattatcatttcgttcttattcatagtacaatcgatgaagaactaattcacgtgaatcaatggtctaaatacttcactggaacaagtacaagctcactttttttgctcacagtaagtccaggagcttcttccatatcgatatcttcgactaccatgccttctggtaacttccaatcaaaatgatacaacatattagctaggccaaactccaccattgttgttcccatgtacagtccaggacaaattctcctaccactcccaaacgacaacaactcaaagttctgtccttttgcatcaatgttactatcattaaacctttcggggagaaacatttctggatctttccatgtatcaggatcacgcccgatagcccaaacattcacatgaagccgtgttttggcaggaatcgtgtagccattgatctcaaattcagtgattacatctcttgggaggagaagaggtgttggaggatgtaacctccatgtttctttgatcaccattttcaagtactcgagcttatcagtgtcatcaaagctgattctttctttgttcttgatttggtttctgatttctgcttgaactttcttcatcactctagggtttttagcaagttctgccattgcccatgtcattgttattgcagaagtatcgattcctcctaaaagaatgttctgtttacaagaacatataaaaagatgtaacaatctcatatatttatgaaataataaattaaaaaaatgggtttaccctaactttatagtttttaccatcaaaattgctttgatatgatttcttgtgagcttgccatttccaacaacaatttcttctttctccaacctcaagagcacatccactaaatcttcacttcctacttccttctcttccttatgcagatcaaaaatttgttcatagaacgcatcaagatctcgaaagcttttctttctccacccttgtaaaccattgaacttatcgatgatccatccgacatacggaataaaatctgaggcagagaagcttcccaacatctcgaaagtatctcggactaacttattgaatctatcactgttgagcacacttccctcaaaactcacaccaaatgctgccttgcatactacacttgtagttaaagcaagaaacgtcttgctcaagttaaccggattctttagagaagatgattccgcgattgaatcgataactttcttgacctcctcgtccttaataggttgaatcgattgaattttattagcactaaagagttcttgactgcagagcttccttagttccttccaatattcattataaggagatgaagacatatctagattgttgtaagagagctctcttcctcctgaggagtgagatagaaatgaagtaagaattgataacattagtatatatatgatgtgagatttttagtacctgctaaggaaggacggctacaacaatggagatcatagtctcttagagcttgttttgctgtttctgatgaagaaagtatgagtgtggggacttttccaagcttcaaaagcatcacagggccatacttctttgagagcttccatagagactgatgttgtaattctccgagctgatgtaagtttccgatgattggaaaaccaggaggagatggtattcgtcgatgtttcccatgatttttgcgtttgaaggcggccagaagaagaaagatgatgaagaagagaagtgatagaatccaaatgctatccatttgtatgttattttgttttactgagatattatgagtcatgaggaaagctcatggcttaatatatacaactttgagcaatgctcacttcactaatttaattcatgaagtccacttaaatatttgacaaaacatttatgtgaataattgatcactgcataagagagcaaagctaacctacgatactaacgttgacatttttctttcttttcttcttgccattatgttatataaaccacaataatgagctagaaccgtgaaatttaatacaaattatggagacatttcaactaccttgtcatcatcgtaaatagtatcttcttaataaaacaaataatgaattaaaggaagtggccgaagtggggttcacgaaagatagatataacaatatatggtccagacaacttacttagaagagttttatgagaatacgaagtttttcacaagactatatagcatatctctttttttatctatatatactgtatagtctgtctttttcaatgagacaaaaaaaatatctttactcatggttcacattagtcgtaaaatatgcgctggttttttaaaaacacaaggcgacatcacatactttcgtcttgcagtggatttataattacaaggcgacattagatattttgcaactaaacttctggtaccaaatattgctacgtgttaatagagtcgtgttaaaattttggatggaattgccatcttactgtttcgtcgcaccctggtaaaatttaatgaccaaatattcatcgttaaaaacgatgttatttttttgttatttattaggaataatatgagcaagatggattttgcaaacaaattacactatgggttgttaaagccaattttcaataaatactaggtgattaccgtgctatactatcgattttttattttatttaatgtgatgttttgataaatgtaatttttgtaaaatttaaggcttatttttgtaaatatttctaaaaatgagaaaaacaatgaaattagagacttggggttcgaactctgcatgtatgcgttttaccattagcctatttaaacagttatgttaaaatagaggcagattacatatataacgaaataagggccgcatgcataaactttctttatttggcctcatggacggttatatttaaaagataaagatatgttgagaatgatgtagaagataatgagcttgggacatgcctaactgcatatattttctttctgaaatatatgtatgtaacaagtgcagtgcgagatttgatcccaaaaaaaaaaaaaaaaagtgcagtgcgagtatatttctatctttaggttgaatttggctgtcgaggacacaaactttagatgtcatcatatgattaattaagctttcttcttcaatttatttagtacaatagagccaaaattacttacaatgcaaaagaatcttcacggccaaatataagttgcacaaatggagagaaacaaaagaacacaagatttagttcatgatgaacttaacttaagagaccaatgatctaacttcctgttcaagttagccggagttttctaaaaggaaattgaatcggtcagttgccaatggaagacagctacaacaatggaggtcaacagaggaagaaactacgaccgttggaactgtatcaggcttcaatcgcatcacatcctcacaagaccatacttttagagatagattgataaggcaattctccaagttgttgcaaattaccgatgattgaaaactttgtagcgctcagaggaaatttagagttttgattgtttgatc

SEQ ID NO: 467 - DNA, 43481 bp, Arabidopsis thaliana
acaattttgcagaggctttggcggtattggtggattgttgcggtaccagcttgatatgaggacattcgatgaattatccgatggtgaagtttatgaagactcagattaagtaagagaaaatgtggtttaagatctgaagaaggatttgaagtttggggaaaaaaagaaagactatgaacttttgtttgatatactttgtctctctctattatcttctgttgccgcttttaagtttttctgaaacagttatgttaaaatgtatgagaaatttgagcttcattatactctattttgaagacatttcttattgcctatttgagaattagctaaacattaatattgccttaacagtaatgttaacggtaatataaagtctaattagtctaagtgagaatcaacataaatagtcttaccttaagtaaatgttctcaaatttcagaaactggaaactagccgtttgattattggaaaagaaaggaaacgaaaaggaatacaaatagctaaatctttgtgtaagatttcacaatctcttcttttgtgttatttgtttatatttgtgtctgagaaaatctgagatgaatccaaaaagatgtgcagcttgcaagtatctgagaagaagatgtccaaaagattgcgtattctcaccatatttccctccaaacgatcctcaaaaatttgcatgtgtccacagaatctatggtgctggaaacgtttccaaaatgcttcaggtatatatatctatacacatctttgtgtatcttcttctaatatcctatttaagatcacactttatgcatatatataagtaagtgtattcatggttggattttggtgatctttttgacagcaacttcctgatcagacaagagctgaagcagtggaatctttgtgctttgaagcaaaatgcagagtagatgatcctgtttatggttgtgttggcattattcatttacttaaaactcagattcagaaaactcagaatgaattagccaaaactcaagctgagattgctgttgctcaaaccaaacttagccaaacccatatttctgattttatgtaatatctctcagtttcaacaataaattctcctctgcattttcgtttccgattgcttctacttataagatagtgatcttctttaactttaactatatcagactcataatcaagaggccattagctatactaaaaaagtgtttcataaaacacaaatgtaaacaagttcgaatcgagtttattattatcacaaatccataactaaagggtgacaattatacagtcttgagtctcttggccgatattttgagaatcataatgtaaaaagataaatgaatctgtttacaaaatacatgacactattacaaatcgaatttactattttccctgcttaagctcccattccttttacaagtacatgacattacactacttttgaaggagcttttcttgtatagttacaaagatgatcaatgaatctgtttaatagacgaaaatatatatgtcaagagacactgaaccttcaaaatcggcctgtatcccacttggtgaacataatttgatgttggctcggagtttcgttcgtttcattcattccatccgtgtattcattaccaaatgaagaattgaagtctggatcagaatccatggattcaaccaagtttgaagctttctccacctcaagggcttgctccaacaattggatcatacaagcattatgttctcgaataggtgagataccgtaaacttggatcatccgagtaaagtacctcaaaccatcctttacatttccagtattcgcacaagcggataagacaccaacgaaagtgatagcgtctggttctacgcttgcttcttcttccatctcttcaaacagagacaaagcctcttcaccacatccatgtacccctaagctagtgatcatcgagttccaagtcgctaaactcttaccctgcatcacgtcaaatactttccttgcgtcctgcaagcttccacatttgctatacatatcgatcaaagcggttccaaggaaacaatcaagcacaaaaccgtttttatgagcatagtcatgaacccatcttcccatagacaagcttcctaactgagtagaagcttgcaacaaattaacaatcgtaaactcattaggcttgacatcatcaacctgcattctcctaaagagctgaaacgcctcgtcgggtctacggttcttaacgtaagccgtaatcattgcagtccatgaaacaacgtttctcattggcatttgattgaatacaatctctgcagaatctaactgagaattggagacaagaccataaagcatagtagtccatgaaacaatacttctcccaggcattttatcaaacaccttacgtccactatctggtttcccacacttaaagtaaagatccatgagagtgttttggaagaagacatcattaaaaaacccagctttaatagctaaaccatgaacttgggtacctaaacgaatcgacgaagaagcgagacaagctttgataacaaaagggaaagtgaatttatcaaactgggattgatgagagatcatcataaggataaagagaagaagagcttcacgaggtttgtgattaacagagagagatcttatcataaggttccaggtaaaagtagaaggagattgaagttgattaaagacgagagaagcgtattgggtttctccgaaggaagaagaaacacttatgagctgacgaactagtaactgatcgttggtgagattgtgtttgatgattttggtgtgaatttgtttcaattgagagaaatttgaacaagttcggagaaagtaagaagcttcgggagatcggaatggtggaggagagaggaggtttggtggtgaagacggcgacggagccgccatggattaacgataaatcaccaaattctcacattcactctttcctcgattgatcgtgtgtggatgatgatgaagctgcatataaaccgaactaaaccgaagtttggctgatttggttcggattcggtttattgtgtagcaagaggaagcataaccagattgattcgactaggaaccactaaaccaaacgaaatacagaaatttcgaaccaaaccggatcgattctacgtgtattaaacgtcgtcgtttttgttagctaaaaagaagaaatagtaaatatccattagaagaagaagacgaagcagaggaatctagggtttatgctacattgaagcaaagatggttacgagcagcgatcaaatccaaaatggttctgaagagcaatcaaaaagatcagagatttacacatacgaagcaccatggcagatctacgcaatgaactggagcattcgtcgagacaagaagtatcggctcgcaatcacaagcctcatcgagcaatatccgaatcgcgtcgaaattgttcagcttgatgaatcaaatggtgagattcgttcagatccaaatctctgcttcgaacatccttacccaccaacgaaaaccagtttcatacccgataaagaatgtcaaagacccgatcttttagctacttctagtgatttccttcgtttatggcgaatctctgatgatgaatctcgtgttgagcttaagtcttgtcttagtagtgataagaatagtgagtttagtggtccaatcacttcatttgattggaatgaagctgagcctagacgaattggtacttctagtattgataccacttgtactatttgggatatagagcgtgaagttgttgatacccagcttattgctcatgataaagaggtttatgacattgcttggggtggtgttggtgtctttgcctctgtctcagaggatggttccgttagagtgtttgatctccgtgataaggagcattcgacgattatctacgagagtggtgagcctagtactcctttggtgcgacttagttggaacaagcaggatccgaggtatatggctactgttatcatgggcagtgctaaaattgttgtgttggatattcggtttccggctcttcctgtcgtggagcttcagcgacatcaggctagtgtcaatgctatagcttgggctcctcatagctcttcccatatctgctccgctggagatgattctcaggcgttgatttgggatatatcttccatgggacagcatgttgaaggtggtctggatccgattctagcttacacagccggcgctgaggttgagcagcttcagtggtcatcttctcagcctgattgggttgccattgccttctctaacaagctgcagattctccgggtctgattatgttttacagatttctgttggatacttggatgtaaaaactcgttgctattgttgattaatgatcttttgatctctgactctaagcctcattgagtttcctttcatagtatggtctgtgtaggaactatgtaccttcaaaattgtgaataactagctttagcattggatttgattagacgtatggaagttagttttgaacagagagcatgtgacataacggggaacttgaagtagattatgactaacaccagcatttatgtttctctgccctcgagctgatggagttgcaggattttgtctgcctcaccatcgtatggaatgtgtagctttctatggtagttgttataagttttgtctccattgtccatatcactttatgggtatgtagatttgtgaaattaggcatttgtaacatcgtacagatgatgtattcttcattacttcaatacaggcatatagactctctgtccaacttaaaaggcatacaaggtctgtggtttaccaaaatcagctttactaaatcctttggccaatattctctcagccagtcctaagaacctctgctctaaaaagtcttagctttgaaagtcagacaaatggagagcagccttatcctccttttataaccgtgaccacacacacaaatgaagaagcccaaatgaaaggcccaaaaatctaaaaaataggtgaaggagggactttgtgaatatgtgatcatagaaacatgaagagacaagagagtggtaaaaccacaaccatagaaacaagtaagaaagctatccagaatctaatcttatttgcctccaagtcatcaattctttatcctatattactagtctctgcttcaccaatcctttttgctctcctgtctgctacaaaccttaacttggattctttctggtcaccatggcttcggttactttctctgtccccaaggtaccttcctccttcttcttcttctcttcttcaggtctctcttacacaagttaactaaatgttgtgttttgttttcagggtttcactgaattctcaggattgcgaagctcctctgcttctcttcccttcggcaagaaactttcttccgatgagttcgtttccatcgtctccttccagacttctgcagtgagttctctgttctcctccaacattatttgtagcttacgtgttcttccttatgatgatcatcaactatatgaaatgtttgtacctatatgcatgtctatcgataaatcggatgaattatgtttgcttctgtttctcgccggttttgtaaactatttggatggttgttctgtttgtgtatcagatgggaagcagtggtggatacaggaaaggtgtgactgaggccaagcttaaggtggccattaatggattcggtaggatcgggaggaacttcctgagatgttggcatggtcgcaaggactctcctcttgatatcattgccattaatgacactggtggcgtcaagcaggcttcgcatttacttaaatacgactctactctcggaatctttgatgctgatgtcaaaccttctggagagactgcaatctctgttgatggaaagatcatccaagttgtctctaaccgaaacccgtctcttctcccttggaagtaagtcgaaaaaccacttatgtgatcagtctttttatctcaagtctagaataagcatttgaattggatatggttggtatcttagggagctaggaattgacattgtcatcgaaggaaccggagtgtttgtggatagagaaggtgcagggaaacacattgaagctggtgccaagaaggttatcattactgctccaggcaaaggagatattccaacttatgtcgttggtgtcaatgcagatgcttacagtcatgatgaacctatcatcagcaatgcatcttgcactaccaactgtcttgctccctttgtcaaagttcttgaccagaaattcggtatgcaatccgttttccgctttcgcttttcgtgttctctcacgggatcaatgaaacgggttttaatgtgtttgtaacattgcaggtatcataaagggtacaatgacgactactcactcttacaccggtgaccagaggttgctagacgcgagtcaccgtgatctaaggagagcaagagcagctgctttgaacattgttcctacttctacaggagcagctaaagctgtggctcttgtgctccctaacctcaaaggaaaactcaacgggatcgctctccgtgtaccaacaccaaacgtatcagtggttgatctcgttgtgcaggtctcaaagaagacatttgctgaggaagtcaacgctgctttcagagattctgcagagaaagagcttaaaggtatactcgatgtctgcgatgagccactagtgtccgttgatttcagatgctcagatttttcaacgaccattgattcatcactcactatggttatgggagatgatatggttaaggtgattgcttggtatgataatgaatggggttactcacagagagttgttgacttggctgacattgttgccaacaactggaagtgatttcatcaaactttgtttcatgtttttccatttttttctctttctcttttttacattatggttctcaaaatatcggtgaagactgtataattgtagtatggatttgtaataaataatcataaactattcaaacttgtttacattttgtgttttgtgatacacttttcagtatagctaatggcctcttgattatgattatgagtttgatatatcaaagttagttgaatcttataagttacagggaaacaaaaatgcagaggagattttattgatgaaactgagagatattacataaaatcagaattttgggtttggctaagtttggtttgagcaacagcaatctcagcttgagttttggctaattcattctgagttttctgaatctgagttttaagtaaatgaataatgccaacacaaccataaacagggtcatctactctgcattttgcttcaaagcacaaagattccactgcttcagctcttgtctgatcaggaagttgctgtcaaaaagatcaccaaaatccaaccatgaatacacttacttatatatatgcataaagtgtgatcttaaataggatattagaagaagatacacaaagatgtgtatacctgaagcattttggaaacgtttccagcaccatagattctgtggacacatgcaaatttttgaggatcgtttggagggaaatatggtgagaatacgcaatcttttggacatcttcttctcagatacttgcaagctgcacatctttttggattcatcttagattttctcagaaacaaatataaacaaacaacacaaaagaagagattgtgaaatcttacacaaagatttagctatttgtattccttttcgtttcctttcttttccaataatcaaacggctagtttccagtttctgaaatttgacaacatttacttaaggtaagactatttatgttgattctcacttagactaattagactttatattaccgttaacattactgttaaggcaacaacattcatgttctctttagagaaaataaattgcactactagttattagacgctagttatagtgatctaaggagagcaagagtagcagctgtttgcatatgattctccaaatactgtatataattatatacctgagttatggatttgtaataataatataaactcgattcaaacttgtttacattttgtgctttatgaaacacttttcacaggtctcaaacaaaaaaatgaatatacagagatgttgttatgtaatacaatttggttcttgcaagaatacacaatcgtgggatggtttcctaaaaacagattttgctactacaacatatgtgataagagaagaatgtgcatgagattcggtctcatgctttctgttttcactacctacttaagcctttgaagagatggtcttttcaagcattcttgttccttcttcttccatggctagtttgctccatcctgaccctctcatggacaaaatctttgcccgttcgagtccgtttcctctaaaccctgtaatcttcgaagataccattggcatcactagaatcgcagatgcatttatagagtcttcaccaaatcctagtgctgctaaacaagcagtctgcaacacaatgaagtaaagagttttaattagtactgttgaataagctcacaaatgaagatggttctgcttgtgggtacctttgtcttggcaattaaatcagctgctttcatatacattccttgtacaactactcttgtgtctttgctgtgtccatcttcagatgattgtggtatcaacctgttattgaagatcaaaatagttatagtagctaaatcatagaaaacttctgaatttctaatgagaacacagttttttacctgtcctcctcagttggcacactcgaggacacgatggagtcaagagatgatgaattatcttttgtctcattgcctcttgtatcatcaggtgctagtaaagaaatgcctatgaatacacacatcattcctaatatgaacattgttgttcttagcgcatcgaaaacctgtttaaggaagaagaaaattatctaagcgactatccctaaacccacaccattctgtgacaaaatgatcaaactaatcatctagatccgtattagcccgaagataaagaaaagagaggaaaagcatcacaatgtagtcaatagatgaacctgaaactcttgaaagtaaatgcatcctgtacagatggagaagaaagtccaagcaatctgaaacattggaactatgagaattgcatcatatagagacaatccttcattcaatcttgtcatctgcaacagaagcacatgaaagacgtttttacttcagtaactatatagtctcaacggcacaacaaagcaccaaaatatttcagtagcttgaggtttttttttacccagaatccggctgtactaagaaataaaagaagcatagagtatgtgaaccagctgtgcagttgatagctactagacatggccaatctcagcaagttcgagctacaaaacgaaactcaaatttatcacctgaaactatctgattttcaagtaaagcctgtagatttgcaaactcacagtgacttggcaaataaaactgaacatgatcctatagcacccgagaccactgcatatgagaaaggaagcagcattttccaataagagctaatttcttgtccaggtgtagatatcaaaacttctcccttcctgaatatttcgattaaactaatcacaaaagaggtcccgatagttgaaaatagtcaaggaagaatttcaaatgcaagactcacctatagaggaaatggtgcacggctactattaaaatcaaaataccacagtagaccaagaatgttacattgctatatttctctgccaactgttcgggtgtgaaaactgagcacagaagatttttattaggccacgctttgtgaaaaaacgacagaacaatctgttcaagaatagttacctggtgactggtgattaccaaaagctacaaggaaaacgtttccaagaactataaaggctgtagcaacgagtactctgtgaccaaggcatactaaagatattagaagagcagagacttagtaaatcggtaatgcatgttaaagattgcagcgaggtagtttgcatacttgacagtaaccattttgttcaatacaacataagcaaatgctatgttggatacaaattgaatggatccaagagctgctagaagggactgcaaagagagttcataacggtaagaaaaccaaagagaaaccataatgaaacctgacaaatcacgcaagtaggcaatgtcgagcagatcattctacctgagcagcataaccaaacgaaatgaaattgaggcaattcccaagaagaaagacaaggatccctgtaagattccaacaacattggagactcagaaaaagcttcatataaacttcaacggggaaaaggtttaagaccaggacataccaactctccaagtctgattatgtataattggcttcaatggcatctttcctccgccatcttgtagggctaacctttctctctgataatacacaaagtaagacaatacgtttcacgtgacgagatcaaatgtaaccaaacagtagtggctgaggcaaatgcagacctcattatgtcccaatttgagaaggtttgtgccaaaattaatagcaacacttccaaaaatgttgatgaaagctccgatgacccactctcccattggtaattaaagaatgaagatagctcagttaaaggatcatctaaagctgcaaacttgaaccaatcaactagctcaggcctccctcatatgaatcttagccttcaagagaagaagcataaaacctaagaagggctattagatggtgattgcaaacacaagcttgtacctttgattgaaacagagatcaaatggacaaaattgaaacaagggttttcgatgattagcatagagaaagagaaaatgagacaaaacctgcgaagggacgatagaggagcttcagatccagatcgatttctaacagaagatgcagattgcacaagttctctcccaacaaagagaatcctttttgagatttaagctttaccaaacaaaatggcgtcgaataaaaggaagaaggataaaaattggatctttccccaaaaattgaaaattctaaaaaagctttgatttttcgtaaggaagacccaatcgccgataaagcttgaagacgacggtgacgaagacgacgacgatggcgatgttagattgatacaaaatgacgtagtggttgggcccttttgtgttgttaaatctgtcttcttgctgctcctcacgttttgttttgggctttttaccatttttactctcttctcttctctctctctcgttgagagacactcaatggccaaaaagcaacctttggcgggcgggtcaaaattgactcttttgacctttcattttcattgaacctctatagacagaaaaggatggatttttctgatgaagacgacgacgaaaactgttttggttctcgtttcaacgacggtgtaaatgaagaagaagaagacgaagagggttttgtgtttaacgacgatgttgaagagaatgaagaagaagagggttttgcgtctgatttctataaggctggttctgattggtcttgtttagtggaagatgaagagactgtttcttcttctgtgaagaagatgaaacagtcgaacttgtttcagatttggggtttacaagagaattctcctgatacaacgaagaagatgaaacaaactgatttgtttcagagttggggtttacaaaagccttctcctttcacttcacctgcttcgaattcggcgaagaagacgacgagtgctcttggaaaaaggcgtagagactcttcgtttagcaatgactcgcctcgaccatgtccattttacaagaaacttccaggtctctctctctctctctcttcttcttctttgaattcatatgcctaaatgtgcttctctctttgccaatttcatgaagtttgtgattgattgtatgtaggaacaccgttcactgtggatgcttttcgctatggttgtgttcaaggatgttctgcttatttccttactcattttcacgctgatcattacattggtctcactaaagcttggtctcatggtcctatttactgctcctctctcactagtcgtcttcttagacttagtctctctgttaatccctcgtaagctctttgttaaagctgtctgtgactaaggacttccttcttgaaattatgtatttattagtttctgtgtgtaggtctattcatccattggagctagacgttgagtacactattaatgggattaaagtcactttaattgaagctaatcattgccctggtgctgctcttattcactttcgtctcttagatggaacatgttatctgcataccggagatttcagggcttctaaacagatgcaaacgcatcctctcctctttaaccaacgagttcatgttctgtatttggatacaacatattgcaatccgagatacaagtgagagcaaaaatttgtcaaatagtataacttgtgatggatttgaaggagcgtgtgctcgtaatgtaatgtttgatccattcttttttatgttattgttcagattcccttctaaagaagatgtgttaagttatgttgtgagaatcacaaaggatttcctcaggaagcaaccgaagactctgattgtggttggttcttacagcattggaaaagaatgtgtttatcttgctattgccaaagctcttggggtataaaatgctggagacattttctttctgttttagccatctttttgggactctatatgttctaactttttggagttttcaggttaagatatttgcaaatgcttcaagaagacgaatactgcaatcttttggttgggatgatatttcgaagaatctttctacagatgggaaagccacatgtcttcatgttctgcctatgtcgtcattgaaagttgaagtatttctctaaatctaagatgcttatctcaagtattattctatatagactccatgtcaacctcgcatgatcataactctgttctgattatttccctgaagagactcgatgaacacttgaagatttatagagaacagtatggagcagttttggcatttaggcccacaggtgattttttcccttgctgttattttatatggattttatttagactattggtatgaaaagtaaagttggtttttaggttggacttactccgagaagataggtgaacaccttgatctgataaaaccaacttcaaggggaaaaatcaccatttatggtgcgtttgatttttataatgcacattctctatgagcttagctctaaatatcatcattatattatgatgacttgtggaggccgatttgtctgactgtcaggtgattatgtaacttttataggggtgccatatagtgagcattcaagcttcacagagcttcgtgagtttgttcaagtatgtatcaggaatgtcattattttatctatccgtatctgtcctggataagtttttcacttcttttagcattaactgatttcgttattgcgcagttcttaaggcctgataagattattcctacggtgaacaatggaaatgctggaactcgcgagaaaatgcaatcatgtttcagagaatggctcagacgctgaggttcaactctaggttgatggatgatatattggtaagaaaatcaatggctttggccattctatttctaatattatttcctttttctgcagtttctgaatcccaatatgttgatcattgaagctttcaaaggatgtgtgatgcttctgtaagatcttggttattgcaattggtgaatacagtagattgaaatacttgaaggattcataatattctttgatctagatgttttattcttagttatttctcttatactaatctagtatatgtttcttttttttgtgtgcacactaatctagtatatcttcaagtggctaatttgtttagttatgatggttgggaaagataagagttcagagaaacaatactgtctaccattttacttctctttacctagaagaagggttagcatcacacgagtagacaatgcaaagagggaataagataaccaaatcagattcagaatctggagatagaagattgccattaacctcattgcaaaacttgatttgtcgctgtgtagagaactctgaagagattttatattgtagtcatatttcaaagcaattagctgaatcaccgggaattggaccaatcttcatcttgtctgcactgccctgttgtgaaagggttccttatcttagttgcattgttctgtgagtgatttactgtcttaaaatcgtttatcttcgtgtatttgattgtttcaaagagcatctaaaacaatggatcctatgagttaatataatctctatatatcttttgcttatgagaaacacattcaagtcacagggtctgaaagcatttgcttctcatgttttaactttgtttacagaagaagtctttccataatatataacaattgagagagaggtttgatacgcctagagaaacgaaactagttagactacaaagcagtagcgaggatcaatttgacgctctcctcgatttgaaatgctggaaatggcaagagagtcttcctttgtgcttccttcttctgccattactcgtagaaactcttcaagagcgctctgcatccactcataccgacacagctccaaggcttcttttacattcagctgtggcatttacacaaaccattatcactcactcatataacaacatatctactttcctcgcggttatcaaaagcaaagatttgcggttttacccatcttctctcgcggtcatcttgctcaggccatatcgcaagttcttccttcacctctaacgcaaacatataacctttgcatccaccacctaagcagcaatcagcttccacactgctactcttacttctaaattcccaaactcctaatggatcttcctacacaacacaccaatcttaaatctatacaagaactttcgataaagaatgactgccttaataaaaaaacttactcttagtattcctttaactcctgcttcttccatagcttcacgagaagcagcttcaagaacagtttcatcatcttcccatcctccctaaacaaataacacaagtaaagattctatttctatccaatagcactttgcattatagtttcaagaatttaaaggaaaacaaaatacctttgggaagacaagatcgtgacgattaggagatgaaatcataagaacttgaagcttgttttcaaagtcaacacttgttgagtcctcttcttcatctttcaccagcctatacggaatgcatctgtcatatccaaattaaaaagaaccaaaccaataaaatatcaaatcaagaacgatataaaggtcaacgacatgaaagtgaaaggagatgtaagaaaatggtgaaaagaatttaagtacccagaaacaagacggaagttgttgtcataacgttgatggtctcgtcctgttcttgcagaaagattcgacatttttgataacctgcaacacacacattaaaaacacacaaatttatttggagaaattgagaagaagagctaattacggtgagaatgcaggtcctaagctttgtaaaagtcgtgtctttatctattggcgtcagcaagaaacatcatcgtagcttgctttcttcttcttgtttcaaaataaaaataaaaacagaaccgatcttctttgtttaacccagaagacgaactaaagaaccaacaacaggtgaaacacaactccaaaaacaaaacaaaaaaaaacaagaaaaatggaaaaagaaaggaacggttttggtttgttgttggcacatataggaaggaaggaagaaggaaaaagatgagatttttgcggggacatatataataagagagagtcagctcgctgacgaagcagagagcattcatttcttttctttattaaaaccacccatcacgtttcattgtttttaaaattattttttcccaattttgaaaacagtgttacaaactttatatcaggaaaaatattttatattatgatataatgaaaacttttggattgtttaatttagattagaaaaaccggatactttttagagctaaaactaaacaagctggttcttgaagaaaaatactctggtttatttaagcagatgtaaaacagtaatttgaaaaacattgtttgtaaaaacaagttaatacatgacccaaattagtagattaaatgggaggttgaacggaaaaatctgagtattagaacattatcatttgtagtagatgatagacaagcgaattcctaaatacgcagacgtaaaacagtaatttatttatttatgtttgcgtattaaaataaaacagtaattttatgattataattgtttgcttttatgttttttctgaacaatgagatagctagatcctctcgattttcaatgtaaaattgatgtttcttgacattcagaagataccatgattgggcatgaatgagtcctaagacaagacttaatacttcatctaggtctcaagagttttttgaagcaaaactaaataagctggttttttttaaaaaaatcctctaaattgtttaatttaagcagatgaaaaatagttaaaaccatctccatcagttagaaactcaattttattaaataatataaattttattattattttattgttattttttaattattatttaaactaatcagaacaaaataaaagtaaaaataagtttttcagagtttctatccctaatgaagatgctcttatttgaaaaacattttgtaagaataaagaaataggtaaacacattaatacatgacccaaattagtagattaaattggagtttgatcggaaaaatctgattattagaacattatcatttgtaatagatgatagacaaacgaattccaaaatacacagacgtaaaacagtaattttacttatttacgtttgcgtattaaataaaacagtaatttttatgattacaattgcttgttttatgttttttttggacaataagatagctggatcgaaaacatataatatgtgacaaaaggataagacttaacattaccaaaacaaaagaaccaaaatcaaaattgaatacttctagttacgaattaaaaaaaaattgagcataaaatatggattttttaacgtatactacaaaatacaaatattgtgatgaaagagaccaaccaaacaaaaccaagttgacccggtttgattcgttggtatcttggttatatgagtggttcaccacaaacaaatttaaaatacttaacaggcccaccaaattggctagatagcccattaagtttcactctgtgtagaacaaatgtccccagttgttcaactaaaaacaacttattgggcctaaaatgggccttttaaattgaagtagacggttggtgcagaagactatgattgatttaatttttgagtcactttttcaatcatttccgattttgtatgatttattcatgatgatgaccacgaccgccgtttcaatcattggtctaaaactctaaacatttcaaaattctctagtttttaaaagaacgaaataaaaaagtttgaaaaaaaaagaagagaataaaaaaaaaaaaagtcaagagaaacgttaaaacgcagattgaaacaaaacatagaaaaacgcgaaacgcagatcgtggaaatgtgagtttttgaaaagttagcgtcagagagaagaaggaaatgtatgtcgatacagctggcttatgaccccaccattttttttttactctgtcgatgtgaggaattgtggtcctaaattaattattttattttgtaaaaaagtgagtttgttgaattttttatttataaaagaatattttatgaatgtttgttcgctggatatatctatttgtcattaataacaacaaaagggttaattttttaatttgctttctaatagtactagttaaaactacagttctttttgctattattgttggtgtatttatgttttagttagtagcagtataacatgtcaaaaataaaaaatttagtagcagtctaagatgtaagtcatgtgacatctacctataagaatcagaaacactagtatgaaacataattaaatattctattttgatttataacattgttaattataattttgtattaaaatggtgaattataaaataaaaattcttttactaaacttagattttactaaattacaaatatatgattaataaatgggaaaaatgtcatttaattccccaactttaaaaaaatggttattttatacatcaacttcgtatgtgcccgtttaaaacatgaactaaacgttgactaatttttaaaacatgatctttcgttgaccaggccagaatagacatgccgttatcagtcattaacggaacttttaacgtctgttatcatccgttaactttattagtcaagtttcaaattgtggtcattttaaacatcaacttcttatttggccatttaaaacatgaactaaacgttgactaccatttaagacatgaaaaattcgttaaccaggccaaaatagatatgtctttatcagtagaacctagaaataatgactgttaatctgtccaaaacaacgtcgtttgagaataatcgaaagaacacaaagattttttccatataaaatctccatatcaaaagttttaagcagaacccaagaacatagtttgataaagagataatcgcagtgccagtaattggaagcaaataaaggtgttttcgtttatatatttgttttaaattttaaagggaatcatggaagcaaattgaagactcattataagattattcgtcttgtttgagcggttgtagaaatagatttggggaactggggtttcatttagaatcttttgattattctcaaaacaaagtcgttttagggatactaataaagtcgttaacaagtgataatgaattttataagttcttttaatgaatgatgacaacatgtttattttggcttggtcaacgaatttctcatgttttaaatggtagtcaacgcttagttcatatttaaaatagtcacatataaagtcggtgtttaaaatggccacaatttaaaacttgactaataaagtcgttaacggatgataacggatgttagaagttccgttaatgactgataacggcatgtctattttggcctggtcaacgaataatcatgttttaaaagttagtcaacgtttagttcatgttttaaacggccgcatacgaagttgatgtataaaataatcattgtttgaaagttgggggattaattgacatttttcccattaataaattgactcttaatgtttagattaagcttagaattaacaaatcaactgataagagttataacaagtttaagctcttcttcttcctaaactgaatattatgccaatatttcaaatattagaaataaaggttttaaactaaatgtaaatctatgacatgacataatccttttatatttttgtaataaacataagaataataggatagtgcagaaaaagctgtgattccaatataattatgtgattgattgactaaacaaaaatatgaagtctaaagaattataaatttctgtagttatgaatcccatctatcattggttgcttattaatttatgagaaaaataaatttttattgacaatcttatttgttttgtttttggtagtctaatattgaagtacacatttattaaagtaataaaaataaaccattttaaggacacatacgaaaaaagaaaaaagaaaaaataaacagagagaattgcggagtaaaataaaaagaaaagagaagaaggcagagacagagtggtggtcttgttcgtctcctttcaaaacttgcggcggcggaaactacgtttcacggcggcggtcttaagtttcttccttctgaatcttctctcttaaaaaaaaaaaaaaagttcccattcgctgtaattgcaaactggccaagtaccccacttgcttctactcttgtcttcaaaggttctctttttttattccttccttttttttcaccaaattaaacaaatgggtttggtagttgcacaagagtaaaaactaaccaaagtaaaaagtttgattcttgttgttgttgttgccgttgttgattcttagttaagtaagtaaaaaattttcggtgagtcttaagaaagagagagagagagagagttgttgtctgaaacgatgtcactttctgtcggcattgtctgcgttccgacacaagacttgatttcttcttcttgttcttcttcttacccttttaccttcaagttgttctagaagaaactgcggcggtttgatttgatgtttccattgctctctgttccgttttcacaccaagctttcttgtttctgattagaaaaataatttgattccttgaatctgccgatataaggaatttttttcattgaatgtggagaaaaaaaagaatgtggggaatcacgtcatcgattttgttgaatttgtgtgatatttaatcgccgatgaagttgagattttctggagatctgtcaaggttcttttaaaaaatacttactgcatgttgattgattgatttttacaaagttgacaccttttctttttttacctctcaagctcctctgtttgcttttaaaactgtctcttctgtttttttttttttcttttcgccgacattcttgttttattctttctctccagggttatcgcatggtagtagaagcttggagcatcggtgaggaaaagagaaagagagagagaaggcagttttgttttccaaatgtcagcaattcttgcagctgccattggtggtgctgtaggagctcttgcattgattgctttgtttgtttttctcctttggttttgtgtctttcgtcgtaagaatctgtctagaacttctgagactggctcttctgatccatctactcaaggtaaatcacaaatcccatcaattctattcctctctctctctctctattgactttcttggatgatatcaaaatgatttagacttttttttcttttgttatatgtttgtgtgagttcagaaggaagaaatgttgcaattgagttgtcaatgagagaagctagaagatttgaaatggaggaacttgctcaagccaccaagagttttaccaataaaagtcttattggtattggcaaattcggcgaggtttacaaaggtttgcttcaagatggtgttcttgtagctatcaagaaaagacctggtttgcctactcaagaatttgttaacgaggtttctataattaatcttgttcaagtgtttgcttttagtcttcttagaccaagtgtattgattgagaggatatggtttatttcttcaggttcgttatctatcgtctatccatcaccgtaatctcgtcactcttttggggttttgccaagaaagcaacacacagtttcttgtctacgagtatgttcctaatggaagtgtttccagtcacctgtacggtaactctctgtccttaatgttattttcatttggtatttaatcagtttgagaaatgagtttggacgatgtaagcatcgtttaggtcttttcctctgttaggtgctggtggtaaagtacctggtaatagactagagttcagacataggcttgcaatatctataggagcagctaaaggtaaatcctctacaaaatcctcattgaagccagctctagcttgtgtcctgatcttgcatatacccttttgttatctctaggcttggcacatcttcactcgttgagtcctcggttgatacacaaggacttcaaaaccgctaatgttcttgtggatgaaaatttcattgctaaggttgcggatgcaggagtccgtaacttcttaggaagagaggatgttggtacatcgtctcacattgttgcagaccagattttcctctccccagagtaaattaaaaagatttcaccttctaagctctcatatgcttctttttagtatcaaagtttctcagattgtcccctttttttttcagggttcaagagttcaaaagattttcagagaaaagtgatgtctatgcttttggtgtattcctcttggaattagtaagtggaagagaagcatcagaaccatccccttcaagctcaacgcaaactctagtcgattgggtatgtaatcacactcaaaaccgtgccaatgtaatctattttgattctcattttgtatgcattgggagttgcagatgcaaaacttaacggattacgcagatataccaatgatgattgatgagagactaggaggtacatacacagcagaaggagttgaggaacttattacattgacactaagatgtgttgatgtatcaagtgagaagagaccaacaatgagttttgttgtgacagagcttgaaagaatattggataaagaagtgagcttaacaacagtaatgggtgaaggtactccaactgttactcttggaagtcagctttttaaagcaaccaagtgattattataaaggaaccatctttttacatatatatacatatatatatatatattatataagttctctgagacaagaaccaatcagagaacttaaggaggaagaagaagaagactgatcagctgttttgtgttaagtgtataaagaacagctgaagcttattgtttgtttgttttttccctcctttttcacttcctttggaggttattattttcagcaattatttttttgacaatgagtgcagaaaagtataactttgtaaaaacattatttattgatataaaggaagcaaagagtggaatgttgtgtgattctttgttacattttactctctacaaaagctttgaacttagcttgaaagactttattgccaagttggttggttgaataagttttgatgaaaagattccaattggctaactgttgaactaacagaaggtgataactccctgtctgaagaactctaattattatgtttgtacagaaaaactcagagctactttttcctataaagtagccaattttgggaaagattttgacctttagcttcaacctacctatgctttgatagcctttattgccaaaggggagatatagtaaccaagttggtctctaaagtcttgatcaaagattccaattggataacaacactcttggtcttggactagtatagttcctacatactccatttgctactagtgaaaataaactcaatgctctgatttattactctgtccctagttttgctaaaaaacctttgtgggcacacagaactataaacaaacagtctttggaacagattgcaaaatcaaaatcatgtttggtctgattttatgtcgggagagattgaagatctaatgataaagactcttcttctgtagatagttaactcgttaaattggtgggtctcacatttattattaccttccagattttgacctcacagaagcaaaaacacagtagtgattgaaaagcttagaaaagaaattacaaaaccagagattgttgattcttagttcatacatagaagaaagaaacagagctaatgttttgtcataaatactaaaaaccgttaaaagtatatttttaaaatgagaaaaaatgtgagccattcgatttttggatagacccatcatgtaaaggtttaagctttttttttgttagccaaagagaaagcctttttagttctattgacaatggcgacgaagctgatttctccgccgttgtcttgtccgtgggttacttcaagagaggtgataatcaaagggcttccacggcggagaagagaatggatggtcacgaagagaaacagagtctctgctgtcacggccatgattgtggagccactttctgttgtttcttcttcagcaattcagattcatcaatggtgggaacaaaaccctaattcgttactgttaatgacggaggctactggtggttattcgttggctagctattatacgtctttgggtttgtttgttatctctgttcctggtctttggtctctaatcaaacgctctgttaaatcaaaggttcgaactttactaattacaaaaccctaaatttcacttccaattcccaatttcttcgattttgaaaaagcttgaatgcaatgttgaggatttgtagatagtgagaaagacgtttgttgttaatgacgtcaagaaggagccaaagcaagtagctggagagattctatctttcttcacaaggaagaatttcaatatcactgatcgtggagaaacaatcacgtaagctacaaaaagctcgaacttttcatttgggtttctgtgttttgttactgacattgttttgataaaaagatttgaaggaaagatggttccaagtagaggacaagctgctctgcttacgttttgtacatgtataagcttagcaagtgttggtcttgtcttaaccattacagttcctgattttggaaacaattggttcttcatcattctccttagtccactcgcgtaagctctctctctttaaggtctctgagactgtttttttgtcaatgaaatggtgattattttgtatgtgtgtgtgtgttgcagaggagtgtattactggaaaaaggcgtcgaggaaagaggagataaaagtgaagatgatggtgggatcaaaagggagattggatgagattgtggttcaaggagatgatgttcaggtcgaagaaatgaggaaagagcttcagcttaatgagaaaggcatggtttatgtcaaaggtctctttgagagatcatcataatgataacattttagcctcccatttttgccttttggggaatgtgtctatacttgttttattaaggttgagattaatgactttttaactcatttcccatacttcatactaaacgaatcgatttgaatatagttcatttgattgagcaattttgttattttgaaagtccaaatccattttttcattaccaaagacaacaataaagccacaaatttactaagaattagtaagtatggtcttcctgagtgatcggctagtccatgattcccaaagccaaggttgttcagtactatatgccatcaatgatgagttcgaattatatgtacatatgaaatgggagatatggatacttcgatgccattgagaacaactcaaaaatcttggtgatcgagacttgaaataatgacagcattaagtgtacatctaaaatgtgttttggaacttttcgagatccttcagatgctcgaggtttgacacattttcttgaacacatgatgttcaaaggatcaaagctatatcttgaccggagtgaggtataatgattacaacaatagtagagacgaatacgtggagataagtataagtttgttatggaggctaataagaggttaaaacacgattgaaaaaaagaaaaaagaatcatgagaataagacttgatcaaacataatacattctatgaaaggtaaaacaccaagatgtagagttggcaaaaagaaactagaaaaagaaagtggaacttgttttttttttaatattaaattatatattttttaatattaaattatatattgacaacatataactttttgttaatattaaattatagaatttattttcatctttatttgaaatgttaattatatattgaaaacataaaaatagttacattatttgagtattttattatataaatcttggttttcaaagttagtaactcgtatgatcttgatcagatgatgcacaaactttgtagacatcatggttaacctaacataaatttatctaagttaatcaaaagaatcttacaaattaaaaaatgattaggtcgaggtgaagagaacaaattaccacatagtgttgtaattagacggacatatatgtttaagttaataatgggctttacctctatttgggttgagctcaaccttactcgattaacaaaaaatctgaaggtcgcgtgtttgatctacgctcaccgcaccatttgttaagaataagaaacgtaatctctatttcttaacttccgatacaccgtttcacaaaagattgagccaccggcacatcaccgattcataactctctctcacaagcgacacatacgttactaaacattcatcaaacaatgcataaaactaattacaagtctaatctcagtatttatatacaattgtttcttaatttttcttctttcttctcttcactcacgtgatcaatactaaactttgactctctcttgttacgaccacaaatttttgacgtatcgaaatggttgtcagtctaataaaaaaccgtaaataaaatctagtaaaatctctgttaaattaatagtgttggaatcaaaatattttgatttatagtgataagttatctctaaatgaatatttattattttatgatataaatgaattgttaatttgtagagacatttttttatttttttattaatatacgtatatcaccttgaataattaatacaaagatacttaaatgatactgtgtttatataaaaaaaaaaaaaaatcattagcaatcattcgattcggcttgcaataatctaaatggaccattttatcacttctccaacaagcaactctacagtgtttaattttaaattaagaatttaattatctatatcgtctcttctttagttaggaagtggataagataaagtctaatccaaattaaatcattaatacaaataaagttaagacaaatatttaatttaaataaataatcagaagaagagtgatgatagtgattcttcacgcgcctctctctcttcttcgtcctctacaaaaacacttgtctctcttctacacattgttcttcacgaacctctctgtatcatcttcatcttcttctcccgtaaagctctcgcgtctatggcggtcaaatgtttctctctttatctgattctggcggcgattgtaatcggcggcgtcacctccgagtacatagagtacaacacaaaaccgagaatcgtccctgagaaaatcaatgttcacttagttcctcactcacacgacgatgtaggttggcttaagaccgttgatcagtactacgtaggctccaataactccattagggtactctccctcttcacacatctctctctctgtctctttccatggattctttagggatttgatttttgttctcaatttgatttgaatcagggagcttgtgttcagaatgtattggattctgtaatcgcttcattgcttgatgatgaaaatagaaagtttatttatgttgaaatggtaagattcagatattaccaaatccggagttttcttttgtcttgcttgatgaaattagtattgttcttaggctttctttcaaagatggtggaggcaacaaagcaatgctaagaaagttaaagtcaagaagcttgttgactctggtcaacttgagttcatgtgagtttgattgatctcttaccttttttgttttgatgacttgtgtgtatctgtttgtgttgatatgtggtttttgtagaaatggtggaatgtgtatgcatgatgaggcaactccacattatattgacatgattgatcagactacattaggccatcagtttattaaaactgagtttggtcaggttcctagagttggttggcagattgatccctttggacattctgcagtacaagcttacctgcttggtgctgaggtataatttgttcatcgtttttgttcctttcgtttcatagtgagtttagatgagttcagtatgtgaatgattagcttatatcagctctaagttattttgatcggacaaccctttggtttcttctacagtttggctttgattcgctgtttttcgctagaattgactaccaagatcgtgcaaagaggttaagagagaagacacttgaggttatttggcaaggttccaagtctcttggctcttcttcacaggtttaaaccgttaaacctcacattataattctgctgtttccatagctggctttgtctcattgctatttgatgttacttgtagatatttactggtgtattcccaagacattatgaccctcctgaagggttcacgtttgaaataaatgatgtatcagctcctatccaggtaaaagcaattgaaccggctgtgctgtttttgaactttgtttgaacgtgcactgatgaatcatcttgaatataggatgatcctctcctttttgactacaatgttcaagaaagagtcaacgactttgtagcagcagccctcgcacaggtaaagatcatatccattttttcttgaaattagctaatagaaaagaagctttgctgtgatgtgacttggatttctcttttcaaggttaatgtgaccaggacaaatcatataatgtggttaatgggaactgacttccgttaccagtatgcatattcgtggttcagacagatagacaagtttattcattatgttaacaaggtacactggattttcatactagcatactcatatcaattgaatttcactagtctcaaggtaagagaaataccaatcttgattctcttgttctttggacaatccaggatgggcgtctcaatgttctgtattcgacaccatctatctacaccgatgcaaaatatgctgcaaacgagtcctggcccctaaagactgatgatttcttcccgtgagtttgatagctcgggttttactttctacaaatgcaaaatgcatgttgatcaaataaataatacatgtacctgtgtcaggtatgcggacaaacctaatgcatactggacagggtactttacgagcaggccagcctttaagaaatacgtgagggatttaagtggttactatctggtatggcctacaattattttatataaatttcatagatttgtggtttatattttgctcttttcttacacggccttatctgttttcaaacaggcagctcgacaattggaattcttgagaggaagggatagttcaggaccaacaactgatatgctagccgatgctttggcaattgctcaacaccatgatgcagttagtggtacacaaagacaacatgtggctgcagattatgctcttagactctcaatgggctacctgcaggtgatttttagttaggcatctcatgtgttgttcatgcaatttttgtgtttcttgttggcatagcagtttaagaatttctccatgatcattactaggccgagaaattggttgcctcttccctttcctttctatcagcagcaaaatcaagtactgaaaagaagaatcctggcacaaaatttcagcaggtaatgtgctttaagattttgcaggattccaatattactggtcgtgttggaagagttgaaaagacattgatatcgaatttgagtggttattaatatcgcttccgcaaatgatgctgttgcttaaggcaacaaagaagttttagtaagctgctttgtagcattttcatgacttgaatgactcaagttcccaaaacttatcataatctatgttaagctgattcttatcttgtgcattatattcatattggcagtgtcccctgcttaatattagttactgtcctgcatctgaagctcgtctgttgagcgggaaaagcctggtaagtctagcagacaggcttcctttgagtctatgaagccttggacctcttggttagtttttatcttctgttcacattgatctctccttgtaggtggttgttgtttacaattctctaggatggaaacgagaagaagttgtccgagttcctgtaagtattttcttatctacttggttgaccagtgtagttctcactttatctttgtttgttatccaatattatttaccaaatctacctgataacttctttaggtgtcgtctgaaaatgttattgtgaaagatgcatctgggaaagaagtcgtgtttcagcttctacctctttcagaaatcgctttgagaattagaaatgagtatgtcaaagcgtatctgggaagatcaccacgggatactgcaaaacacgtgcttgcatttacagcttcagtaccacctcttgggttcagctcgtatgtaatctcagacactggacgaacaggtatgtttcagaatatgtaatattgtgtcataacattattatgagttataggatcttgaatacaattgcatatgttttagctctactagccgcaacttccttactgataccaacggatgttatgtatttaattacatcttcgttttctaatttgattaagcgcgtggactatctgcatcatatgttacttctggaagcatgaatcaaaatgtagaagttggccagggaaatctaaagttacgctattcagaagaaggagttaaaataactcgtcacttaagtaccaaaaatcaggtgtgcctgtgttttttatatcttaacttacctatttttccattcggatatgtaaacatcatctgatgttgatttttggtggattttaaggttactgcagaacagtcatatgcttattatattggaagcaatggaactgacaaggatcctcaggtagctcagctctttaacagatacaaccttatctacttagctatcattttgatgtgtgtctgaaccattctcatatacttttataaggcttctggagcttacgtttttcgaccagatggtgtgcttccaattaaatctaaagaagaggtaatacatataagctgcatctataaccttatttcccgacagtatgtgaaaacacaaaagaaaaactaattgtctagcctgactcaggctcaattgactattgttcaaggacctttgttcgatgaagtgcaccaggagcttaactcctggatatcacaggttataaactctttgcaactagttaatgctcttaaacagtttaattacatcacagaagctataactgtttgatccatcttgtgatgggtctgttaatttgcagattaccagagtgtacaagggaaaaaaccatgctgaaattgagttcacagtgagttgatctcttttcacaattcttcatgttaaactgatgaagagaaatttcagtattttaatttcctactttctagattgggcctataccagctgatgatggtattagcaaagagattatcactaaacttacaaccaccatgaagacaaatggaacattttacacagactcgaatggccgtgacttcatcaagcgggtattagatgcaaaattcatgtgaagtagtttatttttatttttgtaacaaggggtattttgtttttattgtaacatactttgttacattttcttgcagattcgggacttcagaacagattgggacttgcaagtgtaccaaccggttgctgggaactattatcctgtaaggcatcaaacccatctgagattccttctcgtggtgtactaaggtcttgtactagactgagctgcactatatctggccttttgtctaatatatatattttcttccagctaaatctcgggatatacatgcaagataaaacctcagagctatccgtgttggtggatcgagctgtaggtggatccagcttagagaacggccagatcgagttgatgcttcatcggtttgtcaactaactttctctatataaccaagacaagcatatgttgttttgcttgtatttcacctttttttcattcatgtaggagaatgcagcatgatgacattagaggtgttggtgagattcttaatgaaacagtctgtctccctgaaggatgcaaaggattaacggtaagcttaagttctcatctcatttttagctgtccaagttgcaacgtatcagcttttaagggaacatgtgacagagcttgtttccaaggtggtattaaatcgttatagttggtcttataaccgttatggtaactctgaattgttttgcagatacaagggaagttttatgtacagatagataaacctggagatggggcaaaatggcgtcgaacatttggtcaagaaatttattctccactacttatagcattcacagaacaggttgctcttaaaaaaaaaaaaatacttacttccctccagttctataagatagtgaagtgagataaggtactttttttgtaggaaggagatagttggattaattcacataagacgacattctcagcgtttgaaccgtcatattcattaccaaaaaacgtcgcattactcaccctccaggttagttggattgtgtactgtatacatgtcaaagacggttttttattagtttgaccacactcacactatgattaattctgacattttcaggagttggaaaatggggaagttcttctaaggcttgctcacttattcgaggttcttacttgtcctctctatgcgtttccaccgttaataatgtgttatagctatgtgctttttggttgtggaaatgtagtttaacactaggccgattaaactagcaaataattagagatatagaaaaacttgtattactcagaaaacccaaatcttgcagtgtcaggaaaccagacaattagttgtatagagttagttcataaaaccaaaccgtaacgtttagggtgtatttttcacctaaaaatcaaactgttttcatgtttatactcgtaaaaagctgactatgcggttgatcatcgtgctatgtcatttggttttccttaatagttccacatgtgaaataagatgagacctaaagtaatatagaagggagatggtcaagtccactaattggttttaaattgagaacccatgaacttcgacagtgttgcttttttggttcactaagcaacgggtaaaatctaatgtggaatttgataattattttctatctcttctcttaatggtttcatcgaagttgagtccttctgagttactgtcttgttaaccttgtgaaggttggggaggatagtgagtactcagttatggcaaaagtagagctcaagaaactattccacaacaaaaaggttcgccaaaaaaagacgacccttctcttatttgtctcactgtatgttaacaaaaacaactgccgttctgtttttaatatgttttgaacagataagggaagtaaaggagacaagtctttccgggaaccaagagaaggcggagatggagaagagacggctaatctggaaagtagaaggctcggccggggaggaagtgaagagaggagaggcggtggacgcagagaagctagtggttgagcttgttccgatggaaattcgaaccttgttgatcaagtttgatgatcaaattgaaatggttggtgataaagagcagcaacataggttatgaaataatacacgttgttgttgtctttttaagtttaatcggagaagagaaaaaagtttgaatttagtgtctgatgcgagtttaaaattcgggtgattgcaacagtcacgagtgcgatcccggtaggagtatcgcaatttctgcattaacatttacgtttgctaaggggtgggcattttaaccgaaccgaaccgatccgaaccaaccgaactcaaaccgacccaaactaaacccggattaacactaaaattattcggttaggcttcttctcaacccaaatagttcggtttaaaaactttcctatcacgacaataaattttgtttggtgtttacataaccgaattaatcgtaccgaatccgaacttaaaccgaaattcccaccgttaacctggctatactgaaactatatatatacgtatatatatatatatatatacatgcgatgttgacaaatgaacacaaaagtagataaactcaaaccggtagttattacattaactgtgtaataaagattcggtatatcccacccgcgaagaaaaggaatcatatcacgggttaacgaatccgggtcgggtacacggagcaatcataaagaagaaacaaaaactacgacgacaacttttttttggccttggttaaaaaattttcataagtgaacacagaagaagcggtggctctgagccggcgaaatctcctttctcatccctaaaattttcatgtccatcttgcctcctccgattatccaaggtcacaattcgtcttctccttcttcagattcctctctaaaccctagctctgagcatggcaacaactcttcttcttctctctctcctcttccctcctctcctccttcccggatctcttcttccaccggaactcgattctccggacattctgaatcctctcacaatttctccggtggctctaggggtaatggaattgattgattaactcagctgcttgattttgccctaaattttagggtttttacattaaaagttcgttaattttgttgagttttgatttgggtttttagggtctctttgaaaaatcttagctttttctctaattttttattctttctgttaaactgtagaaccgagtgttgcagctgaggagggacatagccgtggatcttccaaagaggtaaactttagatgcttctcagtaaatgatgagactttaagtccttttttgttgaatggtccgttacttttgtttctacgctgcagatgacacaaaatggagcagggaaggagagtttttccccacctaatgcagataagcgtgaccattttcgatatgatggtcgaaggaataggtctagagggagaggtactggagctgctggttcttcttcttctcaattgcagcataattccggaccttttaattctcctagaggcggtgtttcgcatcataatccaactggtagaagagctaatatgataagtgggaatcatttactgaattttcagtatgatccgatttcgcaaccgcaatctaggggtcctcctccgcctcaaagaaggcaacaatataaggggaggccttttaacaaggatttgtttcttaaggccaattataagtttgttgtgttggacactggagatcattctcctgattcaatggatcctgataaaatgctgcagtgggatgatattatttgtgtaaggtattctactccgtctcctgtccagtgtccgatttgcttggagtatcctctatgtccgcagattacttcctgtgggcatattttctgtttcccgtgtattctacagtacctgttgactggtgttgataaccacaaggtggactgcttcaagaggtgtcctttgtgctttgtgatgatttctccaagagagttatacactgtttatattgagaacgtcaagcagtattctgttggagatcccatcgagtttgtacttttgactcgcaagaaagattcttttgctcctacccggaaaaatgagcatgacttggctgttcctaatggtgaaaatgagatatatgatccgttctcaaagttcactttcacccaagatgttgatctctctgtcagacaagcagtttcagagttagacagttggattgcaagagcagatcctcagctcgttgaagacttggagaagcatctttatgtaaatgccgctttagagcgtttggagcagagaaaattgtactggaatgagcataagctctctatttacagcaaagtgtgcacaacggctagaaatcagactcaatcattgtcacctcctgatgtttctcgagttggttatcaagcacccatggggggccatggagcgccagatagcggctccaatgatcaagataaatcaactgaagattcttcagcggataagtcagatggagaatctcaatcaagtttggaaaagggttgtgataatgatcttggtcatcctctagaagatcaagacgcaccgtcatcttcctcatgcaatggaagtaaaggtttcctgtctcaccaaattgacaccaaagacctgaaggacaacgacgcgtacaacttttatcaggtaatcagtttctgatgcatactgttgtgttttcataaagtactaatgagctgcatgatgattgttttattgctatgggctggtcaatctctataatctgaaataaatgttattatctgttttcgataatctaggtgggtttattaaataattgtggtggttctatccatatatgcttaatttgtcttacctttgtgctcttgttgtgtacctatacagtctgttgatggtcagcacattatccttcacactttgaatgtgaagtgccttctgcatcactatggaagctatgactttcttccaccaaggtaagattccaggtcgtttatgcatcacaattctcatttttcaaagactatggaataagttccaatgggatcttcttcgttatctaatcatttctgcatgtatttgggatgctgattcaaagtgtgatatatggcacttttcgttgattaatcaagaaccgttcgtataaagatccaactcttatttagtatgaaaatcagaacggacaatacattcaagtaaaaacggttcagtacaagatgttatcatctctagtttgttgttctaatagacttctgattttgatccattaaacggcagattgagtggaaagatactggaaatggaaaccattacccaatcagaagcgataaggagacgctaccgctttttaagtcatttttctttatcaactacacttcaggtatattttctctttgttgctcctatcttctgcatgtgttgctatatcttgacattttctcatgaggttatccttggtttggtaatcttttcagatatgtgagattgatatgaaggaatccttgcctcctgatgcatttgctccatttatacatgaaattaagaagcgtgagaagcagcggaaagaacgtgcttggaaggtattctcgttctaaccataaaacacaaccccacggtctacttcatctaatatctttcagattccaactcctattggctttgtttgctttgtgtcttattctcctatgtattcctttgtttaaggaaaaatcaggacttaagatcatatgatgttcatatttcaggatcgaaaaaataaaatcaaagctgaagtagctgcagctgcagagcttgtaccattgatggccagttttgggcagtcgtcttctagtgatgactttcccccattttccttggatgactttgaaggtaaacaagaggaatctctcgtctcgtaattggattttaggtttattgatctaataagaagcttttgttgtgtctctcttaagctctgggaaactctgccccaatatcatcaagccctccaaacattggagagagaagttccttctcacatgtgacaaggctcggtttcgcagctggtcacgactccccaaacctgaataacgagccaacaaacgttcaaagcagcagcagcagcagtgaagtctcaaacgcaaccacaggtaaccactgtttttagctctgcaaattctaaataggattctcggatgacctctaaacatggtttcaggtgcaagaaacacaaacataacatcctttgcgagtgtagcttcaagaacaacaacaccaatggcaccaaccgtcaaagagcccggtaagagagggaagaaacagagccgagtacttctatcgacaactagtgtacgccgttactgaaaaggcctatggatttgtgtatgtataataatcttttcatctaagaaaaactgagtaaagaaagaaccagagattatggtgagtgagtaagtgtaaaactcaaacttgggctttgtttctttttgcaacccatgtgactgataatgaaggtgtctctcattactactagtctactatgccatttaggacaattattgagactcaatcatatgatcctcttgactcagagaactagaaaaaaaaagattggataaaatttcttccaagagtgattttcattctcacatgttacaacaaagcatgaaccttatcctttaaaaaatatcttcttccttttgttcaaacttttatcttctttgtcatagaaagtttggaccactgattttagtccgttggattatcaattattgacctcaataatatcaaaatttacttcaatgagaataagattacaattttttatttttttttgaacaccaacaaatctgcttcttctctggctataaataaagcataaactgttccaaaaacagaaccaaaaaatatctaaaatcactaaacctatcttcttaaccaaaagatcaatagattacaaaaatgcagggagctctgtttatcaaaccaactattcttcttcctcttccttcttcagtttcttctccaaaactcacttttcttcttcctcacgcaaccaaagcttcaagactctcatctctcagatcaaacaactcatcatcatcatcatccttaacgtctgaccctaacaccgtcgactataactcctccatcctttcgtaagtccttttgatcacttcctcagttcatcccctcttgtttctcttctcattgacttactcaataacatctctatactcagtgtttttccagctgaagcatgcgaagtaatcagtggatacgcttgttctgctgatatttaccctgaagtcaagctcgatacaaagcccgtctcacgtcccgtggcttcagagcccgttgacagagaatacgaagagtataacagccccaaaacgtaagtgtttttcacattttttaaaaccctttccttagcttgatttttcatctctgagttttgtgatttttggacttggaaacagggttttccgtgaagaggcctgcgatgatcttggaggagaattctgtgaacctgactttcaaaaagatgccaactagaagaaacaagattttatgtcatgtgaatatgtgtttgtatttctacaagtctttgtaaccactccttaatttatgatatctagcttcactacttaatcaagattgatgttatggattagacccgagttcccaaagttaatactctctctgttccaagttatttgatgttttgggttttacacaagaattaagaaaaattaacttttatatttttaattatttttttgttagtttaataaatattagttgagtatttataataaatgactatagatttgaaaagaatgtacaaactaaccttgagtcacagtatcttgtcggaaacatgttggagaacacgtgtaattacgtaaatgtcctttgtaacatgttatttttccgaaatacatgcgataacataatatcctctttttatcttgttattttctcttattacatagtatttgtaaaaagcacgtagtattttttggaaaaaacattctattcagtttaatatctcattttatcatgatattttgtagtaatacacgtttttttattaagatcacacttgatttctttaaaaatatattcttattttttagtaatacatggtttttattaaaatcacatataattttttttttttaagattctgttcatgtaaaagaatttcataataatgttttttcttaaaaattcataacgttttttgaaatagcatgtttttaaactaaatataacatgtgaaattttaatgttacatgctattttgaaaatttacacggatgtgtttcgtttactgttcatcttacaacaaatgaagggtagctttgttatttcctttcttccgacaacgtggatccatggttattttgtaacaaaaaactttatctctgctagtttcttaatttgtatgttttatttggttatctactaatattactcatattagttttacttctctcctttactattggttacaaacaaaaataataatgattgttttccaaatcatcaattttggtggaaaaagtaaaaaaacttaaaacatcaaataactaggaaaagagagagtaataatttaaatacttgataactaaaatgatgagaaattttgcatactaaaaggttagataaaagctttgttggcaatgttcgtttgttcatatggatgatacaatcaaatgatccactcaaatgatcatctagataattcatatggatgttgtatgtttctgaatttggttgtgcatctaaacgaaactaattaacgtagtactaattgacaccgctgcaaaagaacgactctacttcaatcaacgtttaagagcatctcttttcttagaaactttttgggtttttcaaaatattttattttaatcaaactgtagatgctatgtgttaagaacctttttccatgggttcttgagaagcattcttcaatctctcttttactttataattacttttttaattgatgagaacaacaatggacatgcccaaaatttgttactcggaagaactgtgcaacaaaaaaacaaataagaaacaaagtttacatgtttttacgaacttgaaacgtggatagtctatattagaagcttttgatcaaactgtagatgctcatcttaaaaataacatcaaatggtaaataattttttaaaaattggtaaaaataaaataatagatagtacaaaatacaataaataagaaatattgacaaaaaaaaacaaatatgaaaagaaatctacgtactttaaaaacttgaaacgtgaacgacatatattagatgaatttaatgatctaacggtatcacctcaaaaatcatgtttatttagtagaaatattaataaatagatagtaatacaagaaataatacatacaaaaatgttgaccaagaaaacaaataagaaacaaaatctagatgttttaagaaacttaaaacgtggacgacatatattaaaagactttgatctaacggtagatgttcacctcgaaaatcatgtcaatttggttgaaatatttgtaaatagatataagaaacaataaatacaaaaatgttaaccaagaaaataaataaaaaacaaaatctacatgttttaagaaacttgaaacgtggacgacatatattacaagactttgatctaacggtagatattcacctcgaaaatcacgtcaatttggtagaaataataataaatatatagtaatataagaaacaataaatacaaaaatattgaccacaaaaacaaataagaaacaaatctatatgttttaagaaccttgaaaagtgaacggcatatattagaagattttgatctaacgatagatgttcttgaaaataatatcaaaatagtaaaaatatttaatgaaaattattttagaaagataatattagatagtataaaatataataaatgagaaacgttgactgtaaaaaaaaacatgttttaagaacctcgaaacctgaacgacatagattagaagattttgatccaacggtaaatgttcaccttggaattaacgtcaagataattccaaaatgctataaattgaggtttttgttttagttcttcttcacacttacatatcaaatatattttattcattctataaactaaaagaaaaaatcctttctctcatctccctttctgttgcttaccattttttcaaaactgtctttgaagtgatgatatggacaggttttctctcctgctttttgttttatcttttagaaatccaaattttcatatctcgtagaatagtaatctcttatttattaaccttatggaaatgagtttttgtccctcgtagacttgttgagtgtgaatacaaaggtggtgttttcgcattaaaccttttttttttgctgtgaaaaatgttctacttttgatagggtaaatgggaggttcaaggcccatcataatagaaatcttcttctttttttatcatatggatgctcctcccctctaatcactcattttatcattctcattttttatatttaccgctaatgcaagaatctcatcttccagcttctggtcagaggcttgaccatttgtatatgcgcttctcccatgtcccgtataaaccaaaattctcaaggttctagagattttctataccgacatggcgaaagcgtaaacaagaacagtcaagcatctgaccaggagttgaaaatggaatcttgagttagaagcgaatgtaaagacatgaaatgaagtgagagtgatcaaaggcgaccaaaatccaatgttatgtacttatgactagacaatttttaattttgtagatgaatgaatacatgtttgatatttgaatacccaagttagacctaaactaatcgtctaatccaatgaaactttttgattttttttggtattggtaagaatgtttaataagatgaaaatatgtagcattttggcacattttttcatatcaaaatatcacttctcacataacaacaattaacgagcaagaaaaataaagcctatcattgagcttcttcctcctaatcctatcatggacttgtaatgcttggactcttggggatcgtgtggagaaaagatgattcagtagaaaatggagtagtttttttttactgaagtaaaaactgaaaggtttgaatccttcttaagagagagactttcacagagaaaacatttagaaaaacaaaaaaaaagaagtaccaaacggcttggatcatcaagaggacatcactaaaaactagaatcacgaggacttcattactacatgcattataatcatagaaaaattcagagaagctaaattaaaaccctataaaaaaggttaggtttttaaaagattcaaaggacctaccacttttacgtttcttcatcacatcctctacgttctcgtgactctctctttctatctctaaccgccattaactatgtctcctctctatctctctaaatctttcttttgtacggatacatacaacgtatataaaagttcttaaaacattaagtaagcatttaaagaagaaaacaaacaaaatggtagggtctattctttgctctgcctcttccttcaccattcttttctctgttttttcttaaaaatctcaatgtttttcttcactcttacatcatcaaagctcatttcatcagctaataccaaagctatacctttaacataactgttttgtctgtatatgtgcaaatgttttgtctgtcttctttgagaagttcactcatgaacaaagatgaagactttaaaaaaaattcttgagcatagctttaagatgaaacataaatggaagttaacattgctaataaaaggttgaagttatgtatccaacaacaacaacctcaagttctcaaaagcttaatttaaaaacaactctcatttgcaattgcattacatgcttagattgaagttatgacataagaaaaaaagttgagaagaaaattgcagatttaaagggacttagttcttctagctctgcttcaacagatgcttaatggactcgaagtcaggatcagatcagatcataccagcataccctgctgtatcgaaaagcactgctttgatttgatcaggcagtatctcttgtccttcttggcattgctgatagacaaaagaaaacatgttactactaaaactgttctacaaatccttaacctttcaactgagagtagaagatcacctcagcgcggaaaacatccaaggcaaacccattaaaacagctgatcacagcttgctgaacatccaatccaagattatccaaagctttcatggtagcgagcaacagacccggtctacgaccacagaacatatgaatgttcactgctcttccttcccttaatctaacctcaacctgtgaaaaagaagcagagtaatctctcaaacatgaatctttgttttcttctttccagtctaagcaaaagttatacagaatatagtccttactctagcttgctggcctttaggacttggtaaagaagagggacacaactcttccttgacacgacaagaaagagtttgcggtgtaggtgtcaacggatggaagcttgatgaagttggaggcaaagatccaggaggagttgactcaagttcattgtgaa

SEQ ID NO: 468 - DNA, 87630 bp, Arabidopsis thaliana
gatcattgatcctttgtagaagttccttcagataatcaattgcatctccaagtattgatgctctatccatctgcaaattcatcgaaaatccataaaacactatcacgagcctcttcctcaaaagagtaaagcaactacatgcaaagtttgacaacaacaaaggccctacaaagctacaacacaacaattctctataacagcaacaagtaaacaagctcttaaggagataaaagagacaaagtaagtgtttactttgctgatcttggggacaactgatctaagcatataaagcctatcattaagcttcttcctccttctcctctcagccatcagattcttagcaggcatacctttcttcttaccctttcctcctcctccaatctgaacactctcagccgctttaccgctctcatttatctcatcagactcatagttcaacccagaaacctcaatcccagtctcatccatatctccatcatcactaaacctcctcattcccgaactctccgaatttcccattttgcttccagagctctgacgcatagctgcacgtttctggaacagagtaggctgtgcaccagacgatgctaacacctctaaaggcttcagaactttcgctctgttcccaacaaaaccaccattagcaggactaccaaaaccttccaactccaacggagctgtgaaaccaccacacaacattgtgttgttgttgttgctttccggcgcaagaagtgaccgagcagacaagaaatcaggaacagaactcaaatccctgttccccaattgtgtcaaagaaccaaaccccatcgaaataggagcatggatttggttaagaaaaccagattcagagccaaactcaaaagcattatcaaaagggtttgcagaagaaggaacattgagaagacaacccttgttgttgttagttgacaagaactgattttgctgagaagggtcaagactaaaagcttgagaaggagaacaagaagaagaagaatcaatagagtgttgaagaagaagattatcattagggttaaaaggaaaaccaccaaagtatctgaaatctggctgattctgtaacatctgaagatcttgtggatgtggttggttactactaaaccaatcaccttcaagcataggcttaaactgagaagaaccatcttcttgattccttccccatgaaccttcctcgttctcttccctttctccaccaccaccgtttaaccaaacccctccaccattgtttccgtcaagacccatcgccaaagttgacacctttaccccaaagtctgaacctttagaggaaaattctgcaaagttgagacctttaactgaaatttggaagcttgaagacaattctgcaaaagtttgaaaacaaaagatatatactttgaatattcagagacttggaaaagtaaaaaaagagaagcattaaagtagaatcacgaggatttcatgaattgaagaagcgaaatctgaaaaggaagatagagatagagagagagaatgatagattcatttctcagagctttcaaaaattgaaactttttttttgatggattcaatttcggccaccatgaaattgctttatcattgaacacataccccagatttctcgtgactctctttgctttgcttcgtttaccgtatctctctctctctcaccgtcactatttctccatttttctgcttaattttggcttaagcttatctctctgtctctgttgtcactgtctctgtctttatatagacagtgtttaagtaagttaatgatgatgatgataatttcaaagtgtaattagcatcattcatgcaacgcgtgtcttccatgcatttctttaactcatattattacctaattattgttatgtacttaaaagttctttttcaaaagatggtaataaaatttattttatattcttactattaaatatatttccttttattttttgtatttttttaaaaaattataaataattatgttgtaacgcatatctcgactttaccggcgtcgacatcttttcgatggttcctaagcttcttgaacaaagccacatcaagctcaagtttgtaagtaaatagtttaatttcataagtcttttaaacattaattaagtaaggacgagtaattccaaattttctgatgattgtagcgtttatcaccattatcaactaaattgagttcccaaaaaaatatagttgtgttgcgatatgctttctagtcttctagaggaagtaattagggattcattttctaaaaagttttgttagtttcaattgtggctttgtgccttaaattggctttttgcttatatagttttggtttatgctttattattagagaatttgtttttctaccggctaagattccggagatttaaacgtgttctccggctatctatcttagtttccttcatttaaaggttttaataaacattgaatttttttttttttatgggctgtttgttgcagtccacccatactatatgggttcaattaggatcactatgtagtagacctcagcccaattcattatgtattttttatcttctttctaatttcatacaaactataaaattctacctaaataaccaatttccatttatttctgtagttgtaatttataatcaataattcgcgtttattgtttcgaaatttgagtaaatctgaatttaagactcggtcaaactttttaagactcggccaagctttcaaagtgtttttgacatgttgttgggaaggttttaaactcggatttactctaatcgcgaaatagtaaacatgaattattgattttaaattgtaattacatataataattgaatttggtaaattgggtagaatgtggaattagatagaacaaaaagagcagaaggtgaattggatagaggtcaaaaatattggtaatcctagttaaacgcatataatacatgtggattggtacaaacagccattttttatttatgcatcaagtacggtagtgcattttatccgtttcatgaatattgattttgcaaattttcatttcacacagattaaaaatttatactgcattttctttctttctatctacttctttttatttactgtagctatacatgatttgattttcaataataaacacttcccaagaattataattcaatattagttttactttattttaaagctactataatacacataggaatcttgaagattgatctttgatgaaatggatgacgtatctatttcaccagtttcaatatattgtttctttgcaaatatatgaaaatagtctctttgttttcaataaatccagcatggcttgaacaaaataaacttactcattagaaattttttaaagatgaatatgaacaacttaaagcttatttttaactccatcaaattaaatggtaatggttagtgtgcaaggaaaacttatttccaagtagtcgatatatccttcatttggtagcaatttggtgaatgtgctgaatcaactagcaactcaatgttcttcaaaatttggggtagaatcttcggagtgctcttcaacttcgatttgagaaatcattattattttttgtttcgatccattacaatcaccgcaatgttaagtttattaaaactgagatcactaggtagaaaagtagaaccacttaatttgcttttcatatataagttcaaatttaaagaaattatttttttggttttccctaaggtttggggttgaaaattttgaaagaaagtaatagagttcgatatatgtatattaatttctttccagttttgatgtttaaagaaaaactatgtaattcgaaaaacaaaatctacttaacgatgttattgacggtggtccggttgtctttagttcgactagcatcatatccaaatatagtttaaaatatcagttaattttctgttaaagacatgaaatgtcttaacatgtgcatgccatccacactaaattttctacgccaaagaaaattcaattgtataaaattggaagaccataggtttgtctacgcataaaaaaatgttcaaaaaaatgcatgatcatcgttaagttattactctcacccacaaacttacaactctatagattaactattctttgtaggcatgatcatcactagattgtagtcgaagtttataagcaaaagttaatcccagtctcttacacttctaacaaccccaacaatattttcttcttctaacttaacttagttataataaaactaagcaaacatttctttattgggctttaaccaaaaccgatggcccaaaatacttctcagcccaaaccattatcttcttctccttgttgacttttctgttgaccatctccaccagcaataataactacaaggcctaacctgatatgcattcgacgagatatgtattcgacgaaaaagaaaaagagaaatatgcattatagaaacaagaggcctaatctgacaaaacaagatttagactgtaccaaaataaataatttaagtaaaaatatttttaaaataatgtaaacgtttttgtgagcttagacaattaaaaaatagccaaagttatttatggactttattgactaaaatgaatataaaacttatatgataaaactaaaatgaaatatatgagtatattataggcctttgtttgtatttcgtatgtgatccctatgaggaaactaataagcttggaatattagatcatattggtagctagatcaaggtgttaaacctcgtaaattcaattgttagattaaagagagaaatgtatatgcaaaagacagaggagaaacacatacgttaaagttaggctttttgaagtttgaaataaaaaaatggttaacacttcgtctgttcttacccatttcatttaataaagtatgaaaacaaatgataaagctcaagatatgttgatcatttccagagtacagtgttaaacaaaattttgtgtatttcgattgtacaaagaatgcatatgagagatagaaaagacttgaatatatgaccatttcaaagcaaagtactctactaattgttgtgttagtatatcaattaattgttattccttttaactagggatttgaccaaatgttttattagaaaattaaacaactttgttgtatgtaatagccggaatttttttggattagagtagtcattttagcttatccaattttttttttttttttgcgatatcattcgctatgaaaaattattcaattttgaaaatcttgtgtggtttaaaactaaggttcttacatgcgtcattcaaatgaaaatagctccatctttcttcatcttaattgatcatattaattgtctataattagtgttaacagctatgaagattttattttggcatatcgatttcggcacaatataaatagagaagaatcggaagaaaatattggagacaacgacatacttgatgacaacagagataatggaggtggaagtgacggtgaagacatagacaaagtagatgttaacgatgatagttataaatatgtcaactaattaagaaaacaccaaaatcacatatcatatctctaactattttgtgcaaaacaaacatgaaagtcgttcatatttgcaactttattattcatgttcaaaaaatacaaaataatcatataaaggaaaaaataatacacaatatacccatcaaagtctgggtggtgtagtcggttatcacgctagtctcacacactagaggtccccggttcgaacccgggctcagacatatctaaaatatctggagatgtatggtctttgggcttgaacttccatatattaaaaaatatatatatatatacataatatatccctttttcattgttgtcaaattttaaaattttgataagtaatatatcaaatcaaaagtctcgatatggagagttcaactatatttttagaatttttaaaaacaaatgtatataattgtgaaaacgcttacaatatgtgcaaaagatgcaaaaatgagatttattgcgtattattttagatttcataggattattttgcattttttgacgtgaaaaataaaattgcaaaaatgagtgacttagagaattttttcacaacccttatataattgaagaaaatttgaaatcaattacgtgtcttgcaattttaattttaaaacaattacgtatttctttttgacattaggtttagggttggtgatattcctatttaccttagtttcaccaaggtctatataaagacctcttatgattaataaagaaaaaatctacaacaattaacgtaattctctctaagagacacttgggtcaaagggaaggttttgcttaaatcacgggtactgcatattaccatatcactagatttaagtcttaggcttttgctcgtatcattaattagcaaatgaggtggctttagatcctaggtccaatatcagttattatttcaaactttgaatcttgaataaagataatgtgagaagaaatattcctttcattcaattgaaaaaccaaatattttaatacaagttagaacaacgtcaataaccataactaaaccaaaaggtaaatgttgttactaaacaagtaaaaaaactgagtcacaaataaactcagaaaaaggtgaagaaaagattcattatcatagatgcatcgatgagacaagtgcgccttgaagatatgaacacgaagatggaagaaatttgcttgcattcgttattaactctatcaactcctctccttgtcccttcaaaatgtatacttcttcatcaatcttcttcactaccgagctgttgcaatcagaaaacagaaccttcacaatagcgcttaactctaatgcggaacctggttcatcttggctcgagcaaagaccagtcgaggaaaatgtgtttggattcaaaataacgatgttgaacagaggtgatttagttgtcaaatctttgaccaacacgtgaaatgataactcctctttggagcattccactagctgattcgtaaacattctttccaatgtgtatttcctgaaaacgtcagaggattcacccgtcgtcgatgatgtggaaatatagcatttgaagagtctaactccaccatcaatgggtttaccgttgctcccaacaccagaaggataggctccaagaggagaggaacactcagggcaagcaaattcaatccactcgacattctttgacacatttgacgctttcgccataaaaacatcctcaagaaacccatcaagaagaaacttcttatcaagtgtaagtttcttctcctccagctgaacactctcattagagtcaggcgagtcatgtacacaacatccaggtagtgatgccttatctatacaacgcgtcttcgattcatccacttgaccacaaacattctcacctccactctcatgactctcagcatttccttcactaattctagaacccggttcaactacaccaacatcacaactcaaagctaaactcgactcaaattcgacttcagttccacctttctcagacaagatacactctacaagatcatctttgctaagcaacacagtagtagcactaagtaaacacaacccactagagcaagtatacgaattcgtgtacttaacaaccatcttctcactaattccaccaaatgaacaacaacaagtaccaaaccaattatcagctgattctctccaattaatagacggcatttctgagaaatctaaaagttccttctttgttaacctatttgaacaacttctacagtaaaaatgaactcctcccattaaagatagagtctttagatcataacccatcactaaaggcgccgacttttctctagaatcagtcaccaaattgaagtctgagactaaaggatgatcaacagggagtaacagaacaagtctaacctcgatgtgatcgtctaaagctttgaaatttacaggagattcagtatctagtaagaccctagggataggaactagaagagaaacaatctcttctttgcttgcagcttcttcatcttcttcgttgatccatgtgacgagaagttgagattttccgacgatggttgatacattgaggcttttgcagtggatcttagggttagttttggaatcgaaaagaaagagacgaaggtttggagaatgagattgagcttcccatgtgtatctccatgtcctctgggttttagagttttgctccatggaattagaaattgctctgcttcgatttttcattatttaattttgttttctgatctttagtcgggttttcaaacctgacccgacccgtattcatctcaaaaccgaaatattttaggtacctgaaataactgaaataaaaattaaatatctaaaaatattagttatttctaacacgataaatacaaaatatttgaaatatataaaaacagtaaaaatattcaaaaacaatttaatatacgaaaatatttaaaacaaaataattaaataaatattaaattttaaaattaaaagaatcataatcgaaatgaaatcaaagataaacttcaaaatattagaatggatattaaattttaaaatcgaaaaaatgaaactgaatggaacagaaccgaatagataacggaacgccgaagactacagtaatgacactggtgagtaaccgttatctttgttctaatagtgacactctaattaagattagccgaagacaaatatggtatttgggcctttagaagccttatacgtataaggcccgagatggaatcaaaatcacgtgtacccacgtgaccagaaaagttaagagatactgttgctgtagtaaaacgagacaaaaagtctataaaaagacagagtgatagagctcgctttgtctaaagtctgtctccttccataaggaagatgacaaaacaaaagaggtcttgattttatccaagatttttttatcagtaagtaacccaataatttcacactgattagtttatcttaatcgtaactaaaatcatagagaaagagaggttttgtgagttgtggagaagtaaagcctgtaaaacggtgtgttattgtctttattgtctctagaaatgtagacaaaactctctatttttataacatgattaaacctactcaacaaaagttagtggccactaacatgaattctttttcttactataatccttttctatctttcggttttaggtcaaccacttttcagtggattttagctttttgagaatctctgtcttatccaagattctcttcttcttcttcatttttcaattctttctttttaaaattcttatccgctggatgactacattggttgaatgaattaatggagactcagtatcgttttttgcgtttaaattagtctaaagctttgttgtattatattaaagcactagaatgaaaagactatgtgtactaactaactaatcaagtatatatataatgcaaaagtataactacatttttctttttagaagaatgtggaattttaacattgcattacacacgtatcttatgtacattcgatatttcgatccttaccaaaattcagtaaaacgaaacaacaacaaaaatctaactttaagtttaaacgacatattaaaaaggtttatatatttcaattcgtttaaatataagtaacctgctgttttaaaaaaaaaagtaacctaaaatgtgttttgatgtaaaattaaagtttttaaacaaaacacaaaaaatctgaatgacataaaaaaataatccaccaaaacagttatgagtaagttaaatgatataacaccattctttctgtcatttctattttatttgagttaccatgcaaagccttacattgagaaagagatatagaatgatcaagtacatttctcattgtcatttgattgaaaatataaaattcaaaaaaccttacatcaaaacaatagaaagtggaatgtatagctatctatgtggaaagtggaatgaaactttgaagattaaagaatgtaaaagaatcatagaaagaaataaaaaatagtttatcaaatgggatctcgatagatataatctaaacttcttctcccaactttttctctcgttgtttcccatgataaaaagctttaagacatttgcaccaaaaagatctcaaattcacgttcacatagaaaaattaacaagaggcagaaggaaaaaaaatgtggaggtcattcgcaaggtaaacacactcgcaagacatacgtctaatctcttctttattatctaattatagaattagtctccatctcaatttcttctccgtggcttttctctgcagaagcttcaaactcattaatgtaccaaatggtttgatatccaagccaattcgctctactctcctctattcaacttcttcaaggtcgatcctacatatataaatactataacgagattcgatcttttaatcttaattaaaactcacaaaaaccctcttaacattttttgcttcgactatatgtatagaaagttagaaggaaaagtagcggtcataaccggcggggcaagcggaatagggaaggccacagcggaggaatttgtgagccaaggtgcgcaagtgattatcgtagatatagatgaagaggctggtcatatggtcgcgaccgaacttggctcagccgcacatttcttaagatgtgatgtcactgaggaggaacaaatcgctaaggccgtggagaccgccgtgactcgtcatgggaagctcgacgtaatgctcaatagtgcgggaatatcatgtaagaacatattaaacaattataatgaatttattttaaactaaatatatgtatactaatacatcatatataagatttaaaaaataaaacattacttctataattctacatatacatatctttatataaataaattgcttatgtatacaatgcaggctccatatcaccaccaagcatagcggacctagacatggacacttacgacaaagtgatgcgtctcaacgtgcgaggtactgtcttagggataaagcacgcggctcgagccatgatccccgctggctcgggctccatcctctgcctctctagcatcagcggcttgatgggtggtctaggcccacacgcatactcaatctctaaattcacaatcccgggtgtggtcaagacggttgcgagcgagctgtgtaagcacggactaagaatcaattgtatatcgcccgcaggcatcccgacgcctctaactttgaggatgtttcgagaggcgtttgcgggtcatagcattcgggaggaacaacttttggcgattgtgaacgcgacgggagaactaaagggagagaagtgtgaggagatagatgtggctaaagcggctttgtatttggcatcggatgatgctaagtttgtgacggggcataaccttgttgttgatggtggatttacttgtttcaagtctcttaatctcccttctgcttaattaatttatcaagttagttaaagttttttttttttttttagttttctgatgtggttattacgagtgttttggccttttgggtcattgctgatgtgatcgtttgtaatctatgggacattatatggttggaatttggaattataaatttagcctctctgtggagtttcgacatttcactagtatagttgattatatcagtcaacttagtattagataatcattatgtgtattgtgtaattctaagtgattcattgtttctgatgatttacgtaaagcttatcagaggtttcaaaacatattgcaagcagagttatctatcgtggcctcaggtgttgtaagaatagcttgtccatcagataacatgtatgtagaaccgttagttgtggtctatttaaaactttttaaatactttctttgagatagatgtatttctcctaaatcacatatgtttcttagttatggtcaaatatagaatattaaaatattgtacctaatagtgacactagtcactagagttaggtgccactacaccaagctcttctgactttgtatccatcaatactagaaactcttttgatctcaacaagcagtcttatggcggccatagtactgatcagatctatcgtcaggttaatttagatcatctctcgattactactaatttgtttcaataaatcagcttaattttgtttcttcttctcgttctttcagaaactttaaacggccagccaccgcagcctcagccgcttactcgacaggtggtggtggcggcggttgtacttgtacgaggtaagtttcttcttctgtctctcatatctgattttgattggaccaaatcgatcgatctcttagtatcacatttaaatgaaaaagaacctattgctaatttttttttttaactcgatgagtcttgatctaatttttatgtattgatcgtaacacgttagtcaacttaactagatagattatatgtgttttttcactctggacttgaatgagttatggcatggtcaggacactaatacaaatcactagataatttccttatacatgtatgcactaatacaaatcactaaattctacagtaaaaagctagaaggcaaagtagctctcataactggtggtgctagcgggctcggtaaggccacggccagcgagtttctccgccatggtgcccgagtcgtgatcgccgacttagacgcggaaaccgggacaaaaaccgctaaagaactaggctcggaggcagagtttgtgcggtgtgatgtcacggtggaggctgatatcgctggagccgtggaaatgacggtggagcggtatgggaagctagacgtgatgtacaataacgctgggattgttggacctatgactccagcgagcatatcgcagcttgatatgacagaattcgagagagtaatgaggattaatgtttttggtgttgtctccggcatcaaacacgccgctaagtttatgattccggctaggtctggatgcattttgtgcacatcaagcgttgcaggtattaacataaaatcaaagtcttagattagatagaaaccttactatatcaaaccaaaagatggttacttagtagttagtacttagtacttagtacttagttaagaatgtataatatcatatcgtattaatcaaagcttggttagtacttagtacttagttaataatgtataatatcatatcgtattaatcaaagcttggttaaacaaaaacttaaatgaagcttaatagttttcaatttgtggtcaacactcaaatttgacttttggtatggacaaaacaatgtaggcgtgactggagggttggctccacattcatacacaatctcaaagttcacaactcccggaatagtcaagtcggcagcaagcgagctctgcgaacacggcgtgcgtataaactgtatctcaccgggtacggtggctacaccgctcactctcagttaccttcagaaagtgtttccgaaggtatcggaggagaagctacgcgaaacagtgaaaggaatgggtgagttaaaaggagctgagtgtgaagaagctgacgtggctaaggctgctttgtatttggcttccaacgacggtaaatacgttactggccataacttggtcgtggatggtggcatgactgctttcaaaatagctggttttccttttccttcggattcatgatcaatcattttgtatcgtctataaataactttgtactgtattcaagattttatatcaaagttggatcttaaaacatttaataaattttcaaagcaaccaactaaatataaaagtttctatagtaagagttaactttgataacatatgactttcatttgaatacaagctggcatgaacttgaagctttgatcacagtttccaactcctcgaccatctcaactctctctttcgaggtaaggcgttttgtgaggaaagttgctttatccaaacgacttgcgttactaaggatatatttcgtcacctctttttcatcttctcgccattcgtagtcttcccatacaaatgtctccagatggagtaacatacatttaggaatattctttggctgaatccatttccacaagggtacgccatctaaacttttctgccatggctgtggttatgagatcaatggcgagttaacacaaagtaaattacatgtatattagatcatcaaaccctaagttgaggtggaaatttgctaaaagatgaattttcaatgcttacaccgatgagcttgaggacttgtaaattaggagaatgatcgagcatgagcattagtagattccaacaatcagctctatatatacacagctccaaatataccaactgataaaatataggaaatggaatctatacatgaaggcaatattattagtagagtaacaatgcaataataaggaaactaactaattacaagaaaaccttaccttcaaggctgatatctccaaggagagacgtttgactgaagtcagtgatctcaagatgaaacttttattattgttgacaatatttgcctccaacagcataggtgcattctcaataagacaagatccacgaccaccaatccatatacttcaagtattttaaagaaggagcatttatcacaaagcccacatgttctttatcatttctattacaaatcgatagtctttgtaaggaaggaactgcaatagttaaaggcttcacattggagtatagagttccatgcacatccaagttttcaagattaggacaaccagataaaaggttaagaactgatgtattgtttatgaagttcacatagtgaaggtgcagagttctaagagatttcagacaaactgaagaagggacaaccatacgaaccaaaaacttgacttccaaggtatctagtgtttcacaattgcacaagctttcaggaaatatgaaccgtcctctaggtgcaatctgatccagtatgaaaattaatggaagatatctaaagttatttaatccaaatctatttttctaaataattttgataatatatatatatatatatgtatctatttttattaatagtttttattttacaatttaatttaataagtttatgcaattatttttgtatttttgtttagctacattggtggatatagcggcgttggtgaataaaattccagcgtatacaaggccagacgttttatcctataacgggccgggcccaatatttaaaccttctagctcacacagaggtcaaagtttttgctctcgtctctagatctgtagaagtagaatggtggagccatcgagccatgtgatgtgatcgaaacaaaaagctctttgcttcttcttcgtccatttctcgtagcacacttttcacaaagaagatgggttcttcacaatctacgcaaatggaagacgaagaagaagaagaagaggaaactgacaatgaagaagaagaagaagaagataatggcagatcaaacacaagacaattagacaatctcctagtaaagaaagttctagaacaagagcctgagatgttaccatgtcacgcttcagcttcaccactctcaccacaactatcatctctcggtactccaaggcttggaccatcgattaaagtctgggatccttacaacgtcctctctccgccgccgcaaccgccgtctatcttctctcgaatcgtgtctggtgatgaagatcgagctgtgacagaggtttatctgattagccatggtgagtctgatcttaatcttaaacctgatttgattggtgggagatgtcatgtagctgctcttactgctaatggtaaacgtcaagctagggctcttgctgttttcttcaaatctcaaggtgttcggtttaattcggtttattcgtcacctctagatcgagctagatccatggctgtttctgtttgtcaggtaaagtttcttctcttagatctaaggtttaacgaagtgtacaatgttgcctaatttgtgtgagattgatctgtggtaatatcttgggaatgaattaagtaagagttgattgatctaatgaatccattgaaaccactaagtactgttgttactgctctttgtgtgagcttatcttgttcatggttgattaaggagtttcttagtcttctataactatagcttaggcacaatctaaagagtatatatcttaggatcatacatcaatgtatcatttagtgaaagaaatgagattgaaagtggttattgaattggacacattttgtttttaaaggaaatgagttttccggaggagcatgtacaatcttcggatgctgttattgagatgagtttaggggattgggaaggctgtaatcaagcagagatttatagtcctgaaactttgagtttgattgaaaggtgccaacctgatttcacagctccatctggagaatcactgaggcaagtagagtttcgaatggttcagtttctaaacgggacagtctcaggagttgcagagaagcttaggtcagattattcttccactacgaatcacaatgaaactcatgagcgtgatggtggtgtgtcacttgcttcgactaactgggacttactacacaagcatcgtcccagtcttacaaggaagaaatctggtaaaagcaggcttcaagtgatgactaatcacgaacctgacgatggaaactccccaagggaagaagttaatcataatcacactgacctaagtgattcgtcttccttaatctcgaattgtgtcggggttttcacgcattctttgcctataaagtgtcttttaaccggaatcctcggttgcagtccggtaatgactcataagatctgtgtagaagactcttcagtgactgtgttacaacattcatggagaaacgggtggcagatcaaacgaatgaatgatactgctcatcttagattgttgtaactttatttaccgataaattatttggaaaaacgaggattcatatatgtttacaccatgaatctgcagaagctcaagaacaaaggttctgcagataatgaaatgccacggcctctttgtaatgttttgtttgtgacatgaggaaaaaagataaacaaaatggattcattgattttgatttgatatttgttcttgtctgatactatttgagtgtgaaattagagatttttttgtttgcaaatttcttttcctatgtttgattataagtacttataatcaaattagtcgaaatattactttgagacaaaagaatgaatgaatgaaggttcggagtaaaaaagcactgttttgttccgtctctcgtcttctccacacggagagacacacagagagacaaaacctaacaacgctgttcaacagatatgtcgacaaaacagatgttttctcatggaactctgtcatcgccgacctcgctcgtagcggtgattctgctgaagctcttctcgctttttcctcaatgcggaagctttctctatacccaactcgctctagctttccttgcgccattaaagcatgttcgtctctttttgatatcttctccggcaaacagacccatcagcaagcttttgtcttcggttatcaatccgacatctttgtgtcttcggctttgatcgttatgtattcaacttgtgggaaactggaggatgcacggaaagtgttcgacgaaattcccaagagaaatattgtatcttggacttcgatgattcgagggtatgatcttaacggtaatgcccttgatgctgtttctcttttcaaggatctattggtcgatgaaaatgatgatgacgatgcaatgtttcttgattctatgggtttggtttcggtaatctctgcttgttctcgtgttcctgctaagggtttaacggaatctattcatagctttgtgattaagagaggttttgatagaggagtgagtgttggtaatactcttttggatgcttatgctaagggtggagaaggaggtgttgctgtggcgagaaaaatctttgatcagattgtggataaggatcgtgtttcgtataattcgattatgagtgtgtatgctcagagtgggatgtctaatgaggcttttgaggtttttcgtagacttgttaagaataaagttgtgacctttaacgccattacattgtctactgtgttgttggcggtctcgcattcaggtgctctgcgtattggaaagtgtatacatgatcaggtgaatttgattcctgttctgcaaccttttcttgtcatgagtgacaagtttctttgattatatgtattgatgaatgtgtctaatttgcaaagataatgtgtctatgcaggtaataaggatgggtcttgaggatgatgtgatagtggggacgtcgataattgatatgtattgcaaatgcggaagagttgagacggcgagaaaagcatttgatcgaatgaaaaacaagaatgttaggtcgtggaccgccatgattgctggatatggaatgcacggccacgcggctaaagcgttagagttattccctgctatgatcgattcaggggttcgaccaaattacattacttttgtatcagtgttagctgcttgcagtcatgcgggtcttcatgtggaaggctggcgctggtttaacgcaatgaaggggagatttggtgtggaaccagggttagaacactacggttgtatggttgatcttctaggtagagctgggtttcttcagaaagcttatgatttgattcagagaatgaagatgaagccggactctatcatctggagctcacttcttgcagcttgtagaattcacaagaacgtggagctagctgagatatccgtggcgcgtttgtttgaattggactcttcgaattgcggttactacatgctgctttcgcatatctacgctgatgcgggtcgttggaaagatgttgagagggtgagaatgatcatgaagaatcgcggattggtgaaaccgccaggttttagtctactcgagttgaatggtgaggttcatgtgttcttgatcggagacgaagagcatcctcagcgtgagaagatttacgagtttttagcagaactgaacaggaagctgttagaggcaggttacgtatcgaacacgtcatctgtatgtcatgatgttgatgaggaagagaaagagatgacactgagagttcacagcgagaaactagcgattgcgtttgggatcatgaacacggttcctggctcgacggttaatgtggtcaagaatctgagagtttgcagcgattgtcacaatgtgatcaagttgatttcaaagattgttgatagagagtttgtggttagagatgcgaagaggtttcaccatttcaaagatggtggatgttcctgtggagattactggtgattagatattagaatttcgtttagatgagtaattcttctcgtgtttaatcagatttagtgtaagaaaatacaattacgatttcacaaatctattggttttgttaaccgttaaacttgaaaaatatggttcttggtttgaaaagaatgatatacaataaaatagtataaaagtgttacataacaccaaactcttgtagctcgtctggtctacgatggacttgagtttggcattgagagagagatagagagatgaagaagatgaagatgataaaattaaaagcaaatgcttgatcatatgaggtattattaaatatctcttcttttttttaaaccagttacatcccagaaaataatatcttaattcctatgacaaaaacttaaaaagtcctatcggatcttatttcggaaacacaatcggcttttatctaaagaatattactttcatataatattctaatttcacaagagatgtttcatggtttagggacgaaattatatgacgattaaaacagacatgaataaagtttataatccaatagagtggtctttaattttatcgagtatttactaaagaaaataatttttttgcggtaactaggtctcctagataagacggagtgttacttcagttcagtataaggttttaatcaattgacaacctcgaagtttaatagtccccgaaaagtttaaagcatggtatcctttattactatacttagaagaaggaatgagaaatcttgggtaccttgaggtacaagattattgcagtaagatagcttttataaggagatggtactacaactgtcacattttgatctttgattaaatatatagtaactaactacctacttatcaattagttgaggtgttctaaattatgtgcttttttttattagtgataactaaattttcctacgcaatgtgtgggattatatatataagattgatgtagcttaatacaaactttactagcataaaatgattttatcaacataaattgtttctaaacttaacatcaaaaaatttcaatccttaattctagtatatataatgattaacgtttgcaagacaaacaaataatctccaataaaaagaaaactagtatcataaatcttctttaaaggattaataatatattaacgccgtaacactaaataacatttattcatcaaatacaacacaccttcatgactcacatctagctatgattttcatataaactgtaatgttatattcaacacttgataatatatatgcaaattgcatttaattcttatatatattataaggatattaaatagctgatcaccatcaagaataccatgagcccatcgattgattatctagtagaagtcatcgagagagatattctcaacggagcccaaaccatcgaatgttccgaacttggagtaataattattagtagtcgtcgtatgtccacccaaaaaatcgagaggagtatcgttggaggtaagagccgtcgtgtcgtagacaaaagactctgtgtttgtggtgacatcatctatgactggataatagtaagaacatttgttgctgttgctgttgctgttgttgttgttgttgttgttgtgatgattaaaatcttggaggagaagatcgttaaccacagtgttttcgatccttgttaagtttgtgtaaacgtcgtcttcttcaagattgattacgtctacttcttcttcttccgatgcttttcttgcttgtataacctaaagtaaaaataaataaataaaattgagcctaaacatgtaacacgttttgtagaattttctttttagtagcgtgtaacgtacgtaattgtttgagtagagatcttggtaaaccatgatgaagtcacctagctgcagaccatgagcattcacaaaatcgcctggaaataatacccagctcgatccaatatttttaacaatcattgattcgattttttattatcataaaaaaaaacaaaaaccgggattgtcggtaactttacctgtgttttctagcacgtacattctgctattgttgtttggccagtacctaatgatcacaacattaggccaagactcaaacatctatggtttcttctaacgatctcatttactttagcttagtcttaaatgaaatgatgctattttaaaggtcttaagatcgacatggatacatgaatactttcaaaatgattgatctaccaagaattatccatgtagatcttaagatcagatataacctatccgttatagattcgtactagccaattttgaaattcttgctaaccaattttgtaactgaatagtttgattcaactatataagctatgctttgttacataacattgattaggagtaaaatgataaaagtacctatacttgaaggtccaaacgtgaaaaccgtccaaatcttccattcttataggaatcccttccttgcattcaagtgccggcaagtgagcctccgcggctttctatatggatcatcatcattagttatcatatcaacaccaacatcattaatcatcatcatgatcatatataatcaaagatcaccttcgggagtatcatacgtcggagagagctgacgtcactgttcttgagttccttttggaagaggaatcttagctttcttgggtcaattttctgacatcatcacaatatacattgaatctttttaataaaaccaatccaatagaaaaatatacaaaactctaaatctatttttatttggatcctcacagatcttataaaaataacaaaaaatagttttgaattaataatatttagagagagagagagagagggaaaatagtaaaaaagagtgaagagcttacacgtgcggggagaggagttggcacgtgggaaataggaggcataggaggagggaaagagagaaggttaaaggaagaagaagatcgtctctgtctaggcatccttctcttcttccagttaacaccaagaagaggcacagacgccgataacccatgatgatcatgacccgacccggatccaaacccatgatcaacacttgccactaaagtagaggccttggtttccacattttcatcaaccatcatttttctctctcaattggttaacactgcctagtaaaaaggaagtgtggaagaaaacagttctctgtgtgaaggaaaaaagaacaaatggtggatctctttgggtttcagtgatagagatagagagagaaagagaagatagatagagagagaaagagagactgtggtttgtgttgtgttgtgtgtatgtgtgttgtgcagatcgaaacagaggcttaaaatggacgctgggcaatcagagatttgggtttaccattggtttttaatgatttttgttttactatttatggtaaggaagtgacatttgtataacctacattcatgaatctagggttttggaagattaagattttctaaatcttgataagattattatgatgatagtaacgcaacaagatctaatgccactaaactaacactcaaccatagtttagagattaggttaggttaaagtttagaaccaagagcaaagggacgagtggattgtgcatggtgaacaagtgtagcaaaagttctgcttctttccttttttccagaattcaatggcgtcttcttctctctctctaccacatttaactctagttttaaagtcaatttaactctcattacttactggtcaacatgtgatttgtatatacgtagattctacgacttttttttagggataaagaacatttttgcgaccaagaataaaggctttttgtttctacagacttagacgataactgatttggaagagaagtgaaggattcattgtacctttgagattacttgacttaggttgaaatagcacatttgtctcatagcttaaagctagaatatcaaactcccatacgaaaatcgttacttgactttcatttagtaacgcccgtatcagaaaaaattatggaaagatgaatggaacaatatagtactccattaattatatttcagaagaaaaaaaagcgacaaaagaaatatgttttttttgttaaagttaaattatagaaaataaagaaacatgaattgaattttgtaaattatgcatctagttaaaactatggaaatgtgtaatcatttcgttaatctatcaatattcgacgaataacagacgaaaaatgtgtaatggtatttataatttgttagtatatacaacttagattgacacaaatttatctatcatctatatatattgttgtcattgttactaacaaataccatttatatgccatattctataattcgtcgaatgattgattatcgacatgataacacatttccatgggttttaactagatgcatactcttagaaaattgcaattcatgtttcgttattcttctatgatttaactttaacaaaaaaaccatactgtatatgtttggtcgattaatatttttcctgaatttaattaatattttgttcgattctactttccatttttcttgataagggcgttactaaatgataatcaagtaacgattttgtcaattttagtaatatactaaaataattttcgactctgcacgaatatattaggggaaagtatgggtgaggaagaatacgtgacgttaaaacgtttttgatattttttgttttctttgcatggacaagtggcaactattctctccaaatttaataaaagattctttctcttttttttcatgactttaaaactctaatgactaatgagttttcgaaaacaaaaagaagattaaatagttactcatgttagtgtacatatgtataatgaattttagcttacaactatagtgatagattgatagttcatgatttttgaatgaaaactagtcaagcgatatttgacaactaattacaatttaaaagtgcataaagaaagaaaaagaaaaattcactcactaaatttggagagaatagttgccacttatccatgaaacgtttttcattatatcacaaatgacgtataatttagtaaatcgaagctatatttcatttgattacttacttgacttttgttttattagaaaactatctcaggccctaatataaactcaatataatagattgcatattaaatcggaactaattaaactttttctggccagccacataatatagttagataattcttcgactctaaatggatatgttttggaatggtgttggatggggaggatttagaagttaaaaatatacttaattaatttcaaagtggttaagaaaaaaaaaagaggattctctcattcattttggagggattgcataccacttgtccatgtataaaactgattttatgcattgaaagtggcatgtaatctcttcaaacttatgagagtatctcttatttttttatttttttttactcactttgaaattataaacaaacgacatcttagatatgtgtatattatataaaaaccatcaaaaataaatattgacaaataacaagtaatgggaagaatagatttaattctaatttcaaagtgtgtaaagaaatgctagtagtaattaataagtatatatgtactataatagttataagtatatatatttcaaagtgtgtaaaggaatgctagttaataagtatatatatactataatagttcttcgctatactctacatgtatgtttcaggccaatatactttcaattagtttttatccatgaattatatgacctaccaaaatataaacataactaaaataacattaaaaaatatagttagataatagtatatgaaattgagatatatataaatatacttgactactataatatgcacatgtattaaaaagagacgtattgtattgatttttgtttttttaagtattgttgatctatggaaacagaaacgtgtatcatgataaaagatgagtaacgtctatttaacttttttttttttaaacactttttggtaaaatatatatatatataactatttaaataataatatcaaattatatgagaaatgaaaacgaatttctaaatataagaatttgtttaataagttttcaaaaacaaataaaaaatctaaatttcttaacactaaaaagctgtaacagatttcaactaaaattttcagatcataaataaataaataaaaatttaatatttaccaatttgtaaatgaatagtttggagtaaggaatgaaatacatcaaactaaatattttgatactatttttttttctattttttaacctttctctactatttttgattaaactatagcaatagtataaacccgtttagaaatatgtgtagattttatgtattgacttataacaatttttaaattaaattgtaaactacttgtggtttcatattttttaatctattctcttataaattaatttgcaggtctttataaatctgtctaaacctcttataaatcaagtcaatatatatataatatatatatatatatatatatattgaattgaatgtaaaattgtattatcaaccaaaaaagcttttacaataaatgcatcatattttaaattacaaattgaaaatgacttagactgataaaatggtatgacgtagcttatggatgaacttaattaagtcattaaaagataactctctaattagttgttctctttaaaggatgaactttctaatggttataaacaacgaaatattattaattcctttataaattacctttaacctctttattagaaaattatatgcgctgtatataatatgcataatactcattaacactcattaacatagaaaaaatgtttataaaggtgattattagaattttgaaaattatacattaaaccataaaatataaaaaattataagataaaaactcgtctgcattcttattaaaaataacgaacacaagtaattaaaataatgttaaggagttaatatcataatggataataaattttgctattttgaataattgttattgtttagcttgtaaaattatatgatttgtttttaataatgtaattttcactccatttttttgtcatgctttatatatattgaattgttttttcttatatattttttttgctttttggtattcatttatcttaattttactgttatttatgtattatttataatattcttctaaaaaacaagtaaaataataaatctttatcaataaaaacaagtaaaataataataattatgatatttattttagttaatatatatttatatagtagaaacatattgtttggagtattattataatactatgaattacatttataagcgtttccaccacatacctagttttcgaaaaaactgcttctgtgattccaaatgtttcacttttgtgcactcacttccaatttcatgcaacctacaatcattatcatttaagcttgtaacaaatccataaaccatgaggactacaaaagcatgtaaatttagtcgtctatagactatatgttgtcaaagcatgcaaataatgtgacataatggaataaaaatggtaaatcaattaaaagaaaaaaagaaaagaatgcagattggctaatttcgccaagttaaaggcctctttttactgggtcgattcatcaatttttaagtctaatgtttcccttattagaaataaagaaagtaaggatagaagaaaattttacaatcacatcgaaaatttctgatcatgtaaatttcgattttggaagcaaaaaagaaagtacctactaataagaacttagtacacacaacttcaggatcttattattgtagtaaatccttcaatttatgctaggttattgacaaaaaaaaaaaaaaaaacttatctcttgaatgtgattcgtaatatatgatgaaatttggattccggtccacagaatttgacggtatgttgatcttggtcgtattttgcagtggcttccaggattcattatattttgtaggaccgcgaaatcttgatttgctctaaatcaaagatctttataaaacgattaggaaagtcggttttcgaaaacgagtgaaggcaagatttgatctctttccgtaatccaaactagctcacgaacatcaccggaaaagtcgtcggaaaattggccggagccacatatgtaaaattgatttttctaacatatttgtcgtcgtcgatttgcttcatatatcattccaaggaaagcattgatggaaagatgttatatctccgttgattgcatgccgatcttcaaccaaaaaaggcaacaatagtgtggttttatgtcggtttcgctctctttgagataataattaactttcacacaatcttttgtttttcttttgcgttataagtgtgatttttcacacttctcacgcacacgatgtcttttattttcttagtacggttacttttgttgatgcgttctctctatatcaagccacgcgtacgattcacgatgacgtctattaataggatattttcgattaaagatttgtcatcttcataataaatatcatatattgaacgtttttttcttcggatttttagaattttttacttttattacctttctaggtaataccatgagaagctatctttcccttcattttttaatatttcaaattacaactctttactcatggtcacgcctcggcagttttagtatgatactattttgtacattaggcttcttcatagactttaatgtcattccctatgatctatatctcattgcatctacgtccacttttccacattgtataacttatgttggtgagttttctaacctttgttaatgaacaattcgtttatttgtaaaatctaaatcctaataatttttataaatccaacccgatattgaattttgtttaattataaaatttaaacgcatttataaatctaaactaatatttaaccttgtttaattattaaatctaaaccttaaccttcctaataaatttaaaccgctatatgattttatttttggtggtagataagatttaatagttaaatgaattcaattttgtttaatttaactgacaaattctaattggataaaaaaatggggtgcatttttccaaaattattagtcacactggtaattattgacaaatccgtgtgttgcctttgtgtcctcccgtgacacttctatcgccatagtgcgacctattactgcagtatgcagcctttttcctgaagctattaggtttccctatggctcctatgcctcctttagaccaactccaacgggagtttctcataaaatttctcaccaataaaataagaaaaaaaatgtcaaaaggaggaaagaggtaagggaaagtttctctttagagaaactcatcgacaacgtttctcacagttgtcattcaatcattggtttaattaaaatacttttcaattaaatattaataatatttatgttcacacttatatttatgttcacacatatattgagaaacggaagttgagaaattgccgttgctgatgctcttagttccttctttcatgtctatatgatttgtaggttctctaaagttgagatgggtaaatgttcagctaacccatggagttggaattgtgattctcacttgttcacaattgcttttggtcttcacaaggatactaattgtatgctttgtttgtggttgtgctttgtttgccattgttactcctttatggagatctatgttctatcaaatccccctgttggtggaaaatctttatttgcagggaatgagagcttctttggtgtttgtggactcgctgttacatcttgtttggacatgctgtcttccaaaactcttgaagttcccttgcgagacatttctgtcgcttatcgttctagcacctacacgttggtagcagaagatattgtagcgaagactgccttatcgttgaagaacgccctcttgttggtgtggaatgaagactctttggttttgcaattgttcttggattcccagttcagtgtaaaatctttcaagtcactcgaagtcaccgttgagctagggagatttctgcttgttttaagcttcctccacctccggtttatccccttgttttttgcattaatctcttgtactgcgtttgtatttgcagttctttcagttcttagtgctgtgttttactcttgtaatggagactaaatcatttctatatctatgaaatcagtttgaccaaaaaaaaaaaaaagaagaatgcaccctaacaaaggcggcctttgggcaaaaactatttcaaaaaatatgtttaatttctccaaatttttccttctctttgtgctttaattggcctttgaatcaataagactcgttgatttgttgtctccatccttctcctcttctcgcagcaaaattcttcttatcattgttttacttggacatgctccaaaattatataagctctgataccatgttggaatattgattctagttcttaaactcaacatgtacaaaaagtgtgtcaaatgaaatgtaggtgttttctcctccgacccaaatgttgtacattgcgatgatgttttgtggcccttccacgtcaacgtatgtatggtcaccggagaaatgcgttgggatgattcttccaaatactacctccccaccgttgagacctccttctccagagttagagaaccgtctaagccatatagaaaacatattttttgcaatcttgccttggaaaaccatagagtgccaaacagatgtaccgaaatttaacgagtccgggaacctgagtcccaatataccatcaaacggtactttcgtgaaaaaaacttttttcaagagtctcaacgccctctatgaaggtctgtgacgtgatgctaatcccaccaaccgtaacggtgtcaacacttaagaaacccgttccatacttgagctctgcctttattcctattttacgcacatactagagaggttaacacactgaacgtataaatacagtctaaacagatatataattcaaattttgacacagagcaaaataaattcacaccaaaatatatttgtttcatgaccatacaaataatcatcataaaccatgaataaggattaatacttttttgtaaacagtgaaattggatgaaagataaagacaaccataaaatttagaatatatttgataaaaaactataataacacagtctaaaacttaccattttctttaaaggttcttgatgcactggatttgtaacatatgttcatagagagagctgtgtttctgtttctctgtttgtttgttgcgttcttgcagaacttttaaccctcttatgcaatccaagctatgaatatagttttcatatagttgttctcatatcaacaattaagcattttgttatatgaatatttgatgatcacaccatgatcagacgccttcggattcatataaggggtaggcctttgcaccgaacctaactttcccaatcggaacataacaatgtatggtttttttttttcaatttcttaatgaagttctataagataattttggtgaatagtattagtataccctcctaaattcattgatcacgtgacgtgatatgcttcattttttttgtcaacacatgatatgttgcttctattggttaaagccttaaaggctaaaagctttttcttctataccaaatttccttctcataactcatttttcttttcattgtatataaataacttggaggatttaaatccaaattttgtaaacccatcagaaatttaaattaacaatgaatattccaactatatgcttatggttgaatcacttttgtctttctttttcctcaagtcaaaactaagttaaattaacaattagtcaaatacttatgataaaccaaaaaaaatgattacaccatcatggaaatttttttgcagcttcttccgcaagaaaatcaatcagtaatcagcaaaatacatctgggatggatgacgtttcaatagaaacttatcttctattcgtctcaagagaacaaaaaaagtgtcaacaatacgtgatatgatcaatttatcacatttaatgagatctggtcaaatcaccaatccatttgtgtatctgaaatatttacaattagtttaagacaaatctcattatgataacaataaagccgtctctcttgtccaaatactaaatccgttgcaagagaaggagaacatataactagtgttctgtttcttaactaactaataaaaaacagagaagagacatgggctagaatgagagagacacgagagatattatactgaaacttgttatttacttgacaatttttacataagacaacatacacacttatatagatgtttacataactaactacataaccgtttggtgacaattgtaacttctccgacaagatacgtctcttactcacaccttttcgtagtatatcatatggcatccattgcctctaaatataaactatagtatatatgatatttaatcatggattcaattctaacataaacattatcaatcgaatctgttgtgtatatttggtagtaattaacaaatatgtcaagttatttgggttagattagtttggttatagccttctaagctaatatgttttgtatttcttctactttttgattatagccttctaagagattcgacctatcaaaatgtgtttatacatggactcatgacgagatttcaatcaattgtgaaaccagcaaattacggctagccggctaggtgatgatttacaaaaactgcaattatgcttaatttggggtaataatgaaaaatttgacataggattatataaagggaatagagagagaaattaagtggtggtcttcacatggcagccatttttagaatatgatgagatgcaagagatgagtggacctatccacaaaaacaacaatgccaatccaccactcttcccatttatatccatacattcttagtttcttacattagcatatctttaaagagttggaaaaacatgtcttgacaaaattagacatgaattatttgcccaaatagatcttcatcattcatcaaacgatttatgttttgatgtaaacaaattttaccaattaatactatttttctgatctccaagtgctatttttttattttattttgcacaaatagtaacccaaggtctctaaatacttagatttctatatttatgaatgtaaggaatgaatgattgcaaggatccatctaacaaacgatataagtcatttggaggataatataatattatgcatagaagaacattcaataatatgtattttttataaatacttatgaatgtttctatgccattgatgttctctaaaaacaatacactgcaattgctaatccattctaatttaattattgctagctaattaattagtcttataccaaatattttctctaaaaacaaatgaacaaaagtttggtggtaagaggcaatgaagtgagtcttctctttcatccaataataatacttttgttttgtgtgttcccttttgcaattatatgcaagtgggtctataattgagtttgattatgaaggctacacacccatctttgtttttttcattattttttacatatatacattttcttttgtattttcactttaaagttctatcggccaaggatggttgatgtgtttagtgtgttattcatctttttttgtcaccattgagaaaatatggttaacagctccaaagttttttaagaattgtttttgtaattattggtgcgaacaatgaataatttgtatatgtaaatatgattgtcttgaataattgtttcatccatatttctcaatagtaaataatgtatcgtttgctttcttaatcggacaaaattaacaacaattgtcgtagattccttcacatttttatcatgaatcatttaatatttcagccgaccgtttcaagtttcaaccatgtgtacactgttttttcacatttacctagcatattcatttcaattgttgccaccattttgaatgaaacctaaattaattattttgtattttatagaaaaataattatttgagtagcgtttggatttatatgatatggaaaaaaaggaatttaataataaatttgctaatgtcatcacctactgactacgtatctccacggatggtgtatgtcctcataaccagacaaattcagccagccttgcttttctttttttcctcctttaacaacccacaaaattaataaaattaaaaactcaaactttgatttgtgtaattaaactacattctctctgaaattcaaaacttgaaaacaaattattgtcgtcaaaaaaactgtattaacaataagaagtgccaaaaaaatataatagtgtatggaagagcttaatcctatcttattgtgagccaaaaaaatatatattctatttcatttcggatatatttaaagataattaaccaaatagtgttttaaaatgtcaaatgtcaaaatatgaaatttatccttgcttcactcggaaataaaactttgttatgaatataacaaacatcttcgtttaaataatcaattaacaataattttagatggactgcgtagaatttgttcctgctttggccaatttttagatgaatttagtttgctctatgatatgttttacaacattaatttagcatatctaagatcaatgtatgctaatgttatttttataaacttttttttggattggacaatgaattttttttttgtaaataaaatttttaattttgtggtttaagaaaacattaccaatagccaatacgtaggtaagtgaatggttaacattctttaaataataactaatcaatctttaatcacataaattagttgaataattgataattattaacgaactactacttaatgactttatttctgcgagtacataaatctctcttactcgcccacaagacaacaatggcataattccgtaattaaaccataaaaccaaggtcaattacaaaatctctctcaagtctgacactactacatcaccttctcttttttctctctttggcgagaatggcctcgtaaccagtgattaggacacatgcatgccatttcccatcaacggtcaagatccatctcctcttcttctccttcaaaccattccccaccgttagatcatctccaaacctaaccacggttcattctttaaccacggtttgtttcggtcagccaggtaggggcctctctgatgtccttcaagactttttatttttctccattaccaaagtcaccaagaagccagaagaaagagaatagagagagagagagagttttgttcttcttctttctggttcctttgctttgctttggttgcgtgatctcctctctcatcaatcttcttcatcatcattctcatcatcattagcttcttgatttttttttccttctttttttcgtttcaagaaactaaacaaagtttctatttatggttttctgattcttcttctacagatctattatttgattctccttcgatcattgtcaacgttttcttcttttgtaatcatcacagttttttttgagaatttgttcatttttttttctcatatattgattcgagttctttcttcttgaatcttgttcttcatagatctagtttttgttttttactctctagatctatagatctgttgaattcacttctttaatccatctctgtgttcttgagttcctatggtctaagtcaaactcaagttcaagatctgttgaatttggaatcttgctggtgaagttagagatgaattatttcccagatgaagtaatagagcatgtattcgactttgtaacatctcacaaagacaggaatgctatatctcttgtatgcaaatcatggtacaagattgaaagatacagtaggcaaaaggttttcattggaaactgttatgccattaatccagagaggttgcttcggagattcccatgtctaaagtctttgactttgaaaggaaaacctcattttgcggatttcaatttggttcctcatgaatggggaggttttgtgctaccttggattgaggctttggctagaagccgtgtaggacttgaagagcttaggttgaagaggatggttgttactgatgagagtcttgagctgctttctcgttcttttgtcaattttaagtctttggtccttgttagctgtgaaggttttaccactgatggtcttgcctctattgccgctaattgcaggtatcacttttttcttgtgtgttataaaaattgttccttgtgttgtaagattaggttttatatgtgactatagatgctatgtttcattgtggtttacatatcattgcacacttgcttcctaatatggctaaaaagacgcaaatctagcttttggtcgaacaataatatccgatttacttagaaaataggtggaataaacagtttagttattgcaatggttccttttggttgtgtgttacaaatgtagtagtgtttgctgagtgttattattgtgttaggtctgtaactctgttttacaattctttcttctttgtaggcatcttcgggatcttgatttgcaagagaatgaaatcgatgatcatagaggtcaatggttaagttgtttcccagacacttgcacgactcttgtcacgctaaactttgcgtgcctcgaaggagaaactaatctggttgctctagagaggcttgttgctaggtctccaaacctaaagagtctgaagctaaatcgtgcagtaccgttagatgcactcgcaaggttaatggcgtgtgcgccgcagatagttgacttaggagtagggtcttatgagaatgacccagattccgagtcttacttgaaactcatggctgtcataaagaaatgcacctcgttgaggagtttgtcgggttttctagaggctgctcctcactgtctctcagctttccacccaatatgtcataacctcacctccttgaatcttagttacgcagctgagattcatggtagccaccttattaagcttattcagcattgcaagaaacttcagcggttatgggtaagcgaatgtttcctaaagtgtatatatgaaccgagcagatagatttatacgtaatggcttcaatgttttcttgtagattttggatagtataggtgacaaagggcttgaagttgtagcttctacatgtaaagagttacaagagcttagggtttttccatctgatttactcggtggaggcaacacagctgtgaccgaagaaggtctagttgccatctcggcaggctgccctaagctccactctatactctacttctgccaacaaatgacaaacgcagctctcgtaaccgttgccaagaactgtccaaatttcatccgtttccgactctgcatcctcgagccaaacaaacccgatcacgtcacatctcaacctctagacgaaggctttggagcaatcgtcaaagcctgcaagagcctgagaaggctttctctctcaggtctccttacagaccaagtcttcctctacatcggaatgtacgcgaatcagctcgagatgctctccatagcctttgcaggagatacagacaaaggcatgctatatgtgttgaatggttgcaaaaagatgaagaaactagagataagggatagtccgtttggggacacggcgcttcttgctgatgtgagcaagtatgaaacaatgcgatccctttggatgtcttcatgtgaagtcacactcagtggatgcaaaaggctcgcagagaaagcgccatggctcaatgtagagatcataaacgagaatgataataaccggatggaagaaaacggacacgaggggaggcagaaagtggataagttgtatctgtaccggactgtggttgggacaagaatggatgcgccgccatttgtgtggattctctaagtccttttcagaccaaactggttctgattggtcgtcttccgttagtgtgtctttcccgaattaggtgtactttttgttttctttaaattaagacaagaactgattcttctgtgaaagccattctgtttttgtttttgactttcctccgttgatttattggtttcttttttcaagttattacaaagtgctacggtttgtcttatttttctaagctttttagatttaccttgctaggaaacaagaatgtacacaataaagaaaaaaacatgtacataatgtaatatgttaatagaatcaagtaatcatagatttgagacttacaagtatcttaattccctaatccaatgttttaatagttttcgttgtatttttaaatatcattttgaatttttgatgttaccaattttaatggtaacgtcacaataatgaaatcaccgagactggtgaggtcaaaatctagccaacaatgaacaatcatcaaagcataagataatatgttctattctatgatgctaaaactgtttccgtaggatgttattttaagtttttaactgttacatatttgattattgagtatctttttaatgaaaattttaccaaatgttggtcgtaaataagatacaaatctgacactcctttgtctgaaggtttttgtaggaagaagcctattatggccccaattcagaaggcccgtaagaaaaacaggcaatttacacggtcattttcagctgttggatttgttttcatacagattaacttggagaacacaagagataatatttacattatgtacaacattactatttaaggtctcatgttataatactgatcagtaatccggtgaaggtgcatcaagaatttcatcgctgcaacaaaaatttgagtttttgaatcacacgttattttttgaagtacattttgtagttggatcggatcaaaacatatttgaaattgtaaaccggatattcaaatctacctaccaatctttgcatccaaaatcacaatcatcagatcttaagataacatcaataatgatctatgatgccaaaactgttagtgtagggtcatgcatcataacatttgatggatgttaaattaactgtcacatacggatatcttttgatgtaacttttaacaaaacatttggtgtaaagaaactatgttatataaatcaaacaaatgcgacacgacttgaccactacgcacaaaaccaaaagacttcaaagttttgttagaaacataggaagatgtatgtcaataatcagaaaaagtctttcacgtcaagtgttgccactaacaatgtcaaagaaatttgaatttcagttatcattagctaaatttacgtctatatgtctgatatagaacatatttgtcttaaacagcttccatgaacgtaaaatgtattacatatatatagacaatatgcaaaaagctcaaagtcatcaacattgtctctttccatgatcattcatgtcgtgcctctttaattttgtatgaaggtgaatgtctgagatgaaagagaagaacatataaggatagccaaggagactgcctgatatcttttttataagcaaaatggtcattgcttgatacaacttatagtgacttcaaacaagacactaaacattttacacaaagagtcaggcaagtcatccttggctaccaaatatgattcttctattcatctttgacatctccttctaaataatgtgtacactcacaaacacactattaaaaaaaaatgctttctaaatcgaatgcaaaaaaattgacattttcaacccaggagacaccttaacaaagattgaatttttttttctgaaaagaatttatagtgactatggagacagaaagaaaaacaggtataacgtgaatgaaaaaagcatgtcaagatagccaaggagactgcctgaaacctaacccgcaagattcaacatgatttcaaattattatacttttgaatgtataataatccaaaacccatgaattacaaattgaatcatggaggtgaaaaagatcaggcaagtcatccttggctactaaacatgactcttttcgccatgttagacctctcttcctcattatactctttattactctcaatatgtgttgcctcattcctcacatggatgtgctctctttttataacccttgagaaggaatatatgcatatagatttctaaatttatctattttctttttgcatgggctaaatatagtcaacttttctttatgacgggaatatgttcctttaaatggaccattttaggggtccactaagacaatcttcttttcggttcattcacaaaatataatatcgcagtacattgatggaatggtgggtttaagagtttccacaatgtagacgaaattttacattgtcgaatcatatagattttgtttttataaaataaatcaatgtacattttatgtgagttcaattaaatcgatgaaccaaatgcagatttagatgtggctatatcaatcagtatgaaacaattatcttttgaatagaatagtttaatgtttaagttgaatagaatagctaaagatttatagaatcgcagatattttaaacctgaatattattaaagggatagttaattaaaatcgaaatatacatattggctaaagataaaaatcttttcaacaaatatatatgcgtggattaactcattgtggttgataaaaaaatgttttcattttattttatattgctttttattctcacaattaagttgaaatacaataatgttaaatcgagtatatatatttgttccctttatcttagtgcaatgcgtaaaacaatgttcctctgaattgatgcttctgccttatggtatgggcaagttgttcttcactttttctttaattaaaaaattaaaaatcgttttccttaaaattctaaaataggaaatgttttatgatgggttggatttttgtattacctcttttggatattgatagaatgacagggttgaccattaaattaaagaaagaataccgtatttgggacattgccgaatcaatccaggcctattcattttcaaaagtagtcgattctcttgtctatcatccatatcttgttcaccaccgattgttgagatttgattcggttcgaatgtcatcatcataacatcatgtcactttactaagttttcacaaatattattcactaccacgtctcggaaaaattgtaacaagcgtaatctgtagaaaaatgttcaaatacttgttttccaatgacatatatatttatctctcataaaaaaaaaaaagaatcataacatgtatattagagcatcagaagacttgtagtttctgttctctagtttcgttttggccttttgggtcctacttttgttcttctcgtgtactgttgctggtttgacttcggttatgtgcacacctgattttattcggctatatccagcgttcatagattcgttagaatttttggtgggaaccttctggctcagtatttcagttttagtgcttagctctcttattcgtcccatgagctgttttctgtaggttcttggcccttcttttgtctccgtttctttggtgctttgtttctagaggagggtgtcatgctggctatgtatgtattacaaaagtcttttttttttcactacaacaatagttagtattcttagtattagaagatagcaatgggtgtggttctactgtattagacttaagcttgcattttggatagcgtttatgaatatgtaaacgctataatttgtttggttcaaaaattacgatagcacaattttcataactgcttttaaaggtgttaatcaaattttcgtaactatattataacttttcaaaaacgataagctttataatcatatagataaaactaaaatcactttgaaccaccaatatttaacgaaattctttcccatacggccaacacttagccaaaaaaataaggaaaagctcaaattaaaaatcaaaccctaatttctatatctcttatgcatcctctttctcaggtttacctcttcactctctttctcgattcatcctttttacaaagattactttcttctccttaactctcttttatccctttagtctcttcctgcgattatacaccctggatctaatattggattttatcaatttctatcactctttgtcactctcgctctcatttccaaattcttcttcttcttaaattctacagattctttttttttttttttcgctggcctgaaaccccaaaccattgtcgatgctcggttcgccgttcaatgacgtcaaccttctctctctttatccttctcttttgcctcctccagtaaaattttgttagggttttatgagcacttgggttaaattttgttagggttgagttgatcgatttgaattagagtgatttcttagaaacttttggccaaagttatgatgatgtttttcatgacttcccctatggaaaattaccttccatagtgtgatcacgaaataccacgtagaactacatattccaatttacattccacgcggatcttaggtttcatttgatcctggcacaacgtaaacgtaagaaaggtccggggttcgttgatccaatgatcacaacggtcaagtgatgagtttgatacaaaatttattgtggtaatatatatcccttttttcttacattcgaatgctcttgtttttcatacattaaaataatcaaagctaataaactctactactcacaaccacttagatattcagaggaagaatctaaaaccctaactttaggaagaagattagatgaaacatatataaatcacttcaaaatccaattcaaatagacctataaagaacaataccctgtaatgaaacgtgactatatatcaaggtgcgctgcatcggaaccataccctaagaggaagtttccatgaagcttcatggcaagactcattcgagtcgatccaatcatataaatattgatgtatacgcaaaatgtaatatatgctatatattcatccaaaaagcctccaaaaatcgtcaacattcgctcaccattatatttgttgtcatgtctatcttattttggatgaaggtaaatatctgagttgagaaagaagaacatataaggatagccaaggagactgcctgatgtctatttataaacaaaatggtcatttcttggtataacttatagtcacttcaaaacatgacatcgaccattttgttcagagaagcaggcaagtcatccttggctaccaaatattgttctcctattcatctttgacatctccttctaaataatgtgtagactcagccacataaactatgaaaatgctttagaaaccaaaggcagaattttgacattttcaaaacataacaccctaacaatgattgaaacttttttaaagtgaatttctagtgattcggaagacagaaaaataagtataacatggatgaagaaagcatgtcaagatagccaaagagactgcctgaaacctaacccgcaagattcaacatgatctcaaattattataccttttaaacgcataataatccaaaatccacgaacttaaaattgaatcatggaggtgaaaaagatcaggcaagtcatccttggctattaaacatgactcttttcgccatattagacctctcttcttcattatatttaactctctttatgtctcatgccttacattcatgtgctctcgttttatttataacccttgagagaaggaatatatgcatattgatttcaatatttatctctttctttttgcatgggataaatatagtcaactttgaattctttaacacgggaatatgttcctttaaatggaccatgattcgggtcactaagataatattcttgtcggttaattcacaaaactatacatcgcatttgatttgtgggtgtaagcgtttccacaatgtaacaactctacataaaataaaacaatgtacatattatgtgactttaattaaatcggtgaatcaaatgcagatttagatgtggctatttgaatcagtatgaaacacatgtttcagtttgtaaattcgaacatatctttaaatataatgttaagtttggatttaatagtttatgatttatagaacagcatatatatgattaatagaaagtttaaaacctaataaaatattggctaacgataaaaaggtttttcaacatgtacatgggttaacacattgtggttaaaatgtttcaatttatttcatattgtttttattctcacaactttgcatgcatacggtcccttttatctaagttcaaattctaataatagtaatcgagtatatatacggtccctactcccttctatctaagtggaatgtctaaaaaaagtatatgttccttcgaattgatgcttctgccttatggtatgggcaatttactttttctctaatttcaaatttaaagtagttttccttcaaagtccaaaatcggaaattttgatgatatgttgcatttctctatcacctctttcggatataaaaagttttgaccatcaaatgatagaatcagaagaccgtaatttggatattgcacatattctagagtagtcgattctctatttttcatatcattttcactaggacccttgagaatgtgatttgatttggtttggatatcattatgtccttttcttaagttttcattaatattattcactggcaccggtccggaattttttttataacaattttagtctgtagaacaattttcagttttttgttttgtccaataacatgtatattagagcaatagaagaaaaaaaaatcgatgaattttcgagttagtaaaaatgacgtcttcccactggctattagtttgccttctcaaagcaaatacatgaattcatgaagatcaagaataaattatttttatttgttctcttacatttgatgcgtttgaagttcaaggttgattgtttagtttgtaacgttagacttcatgctcaagattttacttttgtaagatctatgtcaccgatttagatttcagaactttttaaaaatttaactaagattattgatcaaacaaaactggtattatataatagttttgtcatcttcaatttactaaatcaaatacagccttaaggaagccaagataaaacgtaattgtgtcccaacagagaaataaaaacaagttagcctcttctcctaccatttaatttgaagcctctgaagaaagcattttgtagaagggaccgtctttttgaatataagattggtgacggccttcttttttaacacttcttacaaatttgttttaaaccccatttacattcgtccctacaatatattgaaaagacaacgttttctctgaagaattgatcgctctgacgaactccctcgttgaggagaacataacgcaatccggtcttattgtgagtaagctcgaggaagcccaaataaaacattgaatttccgctcgaagatgcgagacgagacgtggcaaataaaggcagttctcacatatatatttacctttccatgatatgaacaccaaataccatgcaatttcgaatgatccatgttcttccacaatcgcttgattttcatgtatacatatatatatatatatatatatatatattgatgtatgcgcaaaatgcacgacatacatatatatatgcaaaaagcctcgaaatcatgaacattatctctcaatgatttttcttgtcatgtccatcttattttgaatgaaggtaaacgtctgagatgagagagaagaacatataaggatagccaaggagactgcctgatgtcttttgatgagtaaaatggtcattgcttgatataacttatagtcacttgtcaaacatgacactaacccattttactcaaagaaacaggcaagtcatccttggctaccaaatatgattcttctattcatctttgacttctccttctaaataatgtatacactcactttcatatactataacaaaaacttttgaaaccaactgcgaaaatttgacatttttgaaatttaacactttaacaaagaatgaaagtttctgaagtgtaaattttatagtgattttgaagacagaaagaaaagtaggtataacatggatggaaaaagcatgtcaagatagccaaagagactgcctgaaacctaacccgcaagattcaacatgatatttgacctattatactttaaaaggtataataatccaaaatgcatgaatttgaaattgaatcgtggaggcgaaaaagatcaggcaagtcatccttggctactaaacatgacgctttccgccatgttagacctctcttcttcatcatacacttcattactctctatatgtttttgccttattccatacatgcatgtgctctctttttataaccctcgagactcgagagttgagaaggaatatatgcctatcatatcgatttctaaaattatctcttttctttttgcatgggataaatgtagtcaactttatattctccatcacgggaatatgctccttcatatatcggacaatttttcgggtcactaacataatcttcttgtcggttcattcactaaattgtatcgtttttcattggtgggtttaagagttaatatatatatataacgttctcgatcatcttagatgttgtatattatatatacacacatatataaacaattaaatgcaactttagacgtgtttagttcattctgtctgaaagaattgtttaaattttatgaatccgaacatattttgaaatataataacgttaagttttgatataattatgaaatatctatatagatgcataggtagtttaaaagctcaatgatatactatagacttaatattaaaaacgacatttcaactaatatatacacacgtgactcattgtggttgataaaatgttccaatttatttagtggttattaacttattattctcactactttgcatacgttttctttgtactttttgtactacaattcaaattacacgtagctaatcgaatacatattcggtcccttttaccctagtgccatgtgtaaaattatgttccttaaattgatgcttccgccttatggtatgctcaagtgactcaagtggttctcgactatttctctaatttaaaatgaaagtttatttttccttaaaaatccaaattaggaaatttgtgtgatatgttacatttttatcatataaccactattgggtataaaaaggtttgaccattacattaaagaagagtcataatactttttggcatattttttttaggacattgtggaatctcatttgaaagtcttcgattctcttttctgtcatccgatccatatctttttcatttccaattgttgagatttgatttggttcgaatgtcatcatcttgtcgttgcaataaaagtttacacaaatattattcactggtacgactgaggatatattgtgggctaatttttgaattgggctaaagcctcacatgtgattaattttgagttgggctaaaacctatcacataattgttagttatttatgttaaaatagaggttgctctctctcactattcatacatttctcagcattttggctaagatcaagtatagtatctgattttatcaatttaatatctgatatatggactattggttcacatgatacgctatttttaagttagaaactcacattaaaatagcttatctgagttttcacaagtggtctaagcgttgcttatattattgcacggatatggctcattcccaccaccaaatatagtccaaatttttatgtaaatgcaaagacatgggatttggtggtcttagacaacttgtctccaatctccctccatctgagttttgtttttgaattttctctaactatgttagaaagatttgtagtgatgaaactctatcatatatccaacacttcccctaaaattcctttgtttccgtttctgcataattccagttacacacaaagtgcatgcttccatcaagtaattctaagaaaaaaaacatttgttcacaaactatgtcctttcatttttggatggtatagtatatatgggacaacaagtaactagcttttttggagtgtcttgttcaaatttttgacatatagatttgtttgtatactactatatttcatttaactgcatgttttaataaagaaacggatctttgatacatataggtagttttctaaaatcatttggatcttgtgtcatatcgatttatttgtacgtgagatttggctcaccttgccgattaaagttcaactaacgttttgtaaattttattttgtttatagaaattcagaagaggaaacttgcacgtctaaatttgtatataaattataaaaagagccaaaatgtcactgttgttggtgtttataacctctcttacatacaagtcgcaagacaagaggtggtaaatgtggacttttattctaactaattaaatacagaaagatggaaagacaactttctcaattactctctcaaacacaaatttgattctaactaaattaaagttcaactaaagttagtttgtaaattgtattttaggttatacttaattgtactactttttcaaaaaataaaaaacaactatgtttttattttccgcgcatctttgcttggacgagtttgtcgtgttcttattataaacaaatagaaaaacggcaaaagtctcacacaaatgggggttacattacttcgctcaatcttcggtctctgtgccgtctcatcttcatcaagagtaactgattcctactgttcaacgaagtcatatctccgacgacgccggacctccgcctcgaagcaacgactcacggagatcaaatccgtaacatccactcctcctcctccttctaggggtattcgacggagacggaagaataaagatgaaaacgtggtgcacaatccgtattcgaagatggagatttgcgaaaaagcttgttggattttttggaagaagcgagagatttcgttggggatggaggaggtccacctcgttggttctctccgttggaatgcagagctcaagcgccaaactctcctctcctcctctttttacctggttcgtcgtataaaacttctttcgcctttctatcgtaatatgaatgaatgtggttcccgatgggataacttgattacacttcaaacaaggttgttatacacgtgtaaccacttggattcttgggcattggtccgggtgctttagttagggtgagtttgcggtaacatgcaaagagcatgctcacctccggattagtcggacttgacctagacacgataccgataattcagtttggttgagttgggatagtttctacggatttgaagttttatttcatttccatggaacactgaaatgttaagtcttttcaagttaacaaaactgagaaaactaaaacttgcagggatcgatggtactggactaggtctcattcgtcatcacaagaaacttggggagtaagtaatgttttattcatttccttttaagtttctattagcttttccatttttttaacattccctgtatctaaaagagtatggtttctctgtttttgtaactttgattttaggtagtttaattttgaagtattggcatgttaagggatctttatttttaaagtttttgtatttgaataggatttttgatatatggtgccttcacattcccgtcagtgatcgtactccatttaaaggtgcctttataacccccttgtaaagtaccaaaatggctatttaactgagaagatagctaatcccgtttaaacctttttgtgtgtgtttagacttggtgaagcttattgagaggacagttaagtcggagaactaccgtttcccaaatagaccaatatatttagttggagaatctattggagcatgtcttgcgttagatgttgcagccaggaatcccaacgttgatcttgctctgatcttggttaatccaggtacacaagctaggtctgcgggattcttattttgtcgcaaaagataacaaaatatgtacatctttgttcatcatagacattaattaattttcgcagccacacatgtcaacaacttcatgtcaaaacctctattaggaatgcttaatgttttacctgatggaattcccacactatgggaagacgtatttggttttaagcaaggtacttttattcccttatcatattttatcttgaaatacaagcttgaggtccaagttggatctctataatggttttggcatcttgttgattttacttagaaagcagtgacggctgcaaaattttatataatatcagttccttgtagatggagaacttattaaaacatcaaaaacttgtgtgtcttctttgttcccggggctttatcatgtaggcgctccattgactggaatattagaagctatgtcaaatgaattttccgtccagcgaatgggcggagtgggtggagggatgctaagagatctctttgcagtttcagctaatcttccagtaagtgttccttcttaggaactcatgatttatagtttatagtctatacattttcagtttcacttatcaagttcttaagtaatgcgatcaacaccttgaaaattatatttgtagactctgagtaggatgttctctaaggacacactcctttggaagcttgaaatgctaaagtctgctattgcttctgtaaattctcacatatactcagttaaagctgaaacactgatacttccaaggtccaataattttctttgttttagaaattatgaatctcttttacttttttcaaagagatgttatagcttggagcataagtgtaatgtgattatgactatctcagtggacgtgatcaatggctgcttaatgaggaagacattgtcagatactcgcgaacgttgccaaattgtattgtacgtaagcttgatgacaatggacagtttcctcttttggtaagtgatctctcttcatccaatacttagggtttaatattgatactactattaaataggttcttgaaatctctatatatcctacacttcaattatctctcttttacatctcatgttaggaggacagcttagatctggctactatcatcaagcttacttgtttttatcgccgtgggaagtcacatgattacgtttcggattacattaaacctaccccttttgagttacaacaactattagacgagcaccggtaaatgccttactaattgctatatcttagtttttctatatgtatatagcaaaagaaataaaaggttatagtaaatactgaatggaatattccgcggtgcagattgctaatggatgctatttcacctgtaatgctatcaactctagaagacggtacaattgtcaggagcctcgaaggataaccttcgcaagggccggttgtgtacgttggatatcacatgatattggggtttgagttggctccaatggtaggtctactcttaaaagagaggaatattcacatgcgtggtttgacacatccgatggtatttatgtatatccaagactcgttagtcgacccgaagatgtttgacaaatataagttaatgggtggagtacctgtctccaatatgaatttctacaaactactgcgtgaaaaggctcatgtgcttttgtatcctggaggtgtccgcgaagctttgcatagaaaggttatgttataattaatatattgttgcgtggtgacctttttcggtttctacaattttggatattagtgttttggaggttaacatgtaaagagagacttcacagggtgaagaatacaagctgttttggccagaacaatccgagtttgtgagagttgcatctaaatttggagcgaaaatcgttcctttcggtgttgttggagaagacgacatctttaatgtaagtattctctacacaaatattaagatctacactatttcatttccttcatgtaactatttatcacatatgcattattaaccccattcaaatttctacttactcgagattctcggcctttaccaagattgttgcgttattcaacatcttaaatgtgcgttcagcgaacctcggtttcgagtaactttggcttgagacattggctgattttcagattgtattggactccaatgatcaaaggaacatccctatcctaaaagatttaatggaaaaagcaacaaaggacgctggcaacctaaggtgttttatgtttgatcacactatatatattctcatttataaacacatatgtgattttgaacgtcataattgtcagggaaggagacgaaagcgaattgggaaaccaagattgctataatcccaggacttgtacctaaaattccagggcggttctactattactttggcaaaccaatagacttagcaggtatctatataatctaagtgtatgctctctacatcaaatcactgacctcattacttgcaataatggcggggttttttttccatggcaggtaaggagaaggagctgaaagacaaagaaaaggcacaagaggtttacttgcaagcaaagtctgaggtcgaacaatgcattgcatacttaaaaatgaaaagagagtgtgatccttacagacaattgttgccaaggatgatgtatcaagcctcacatggttggtcttgtgaaatcccaacgtttgatctctaacttatactgtggctatatatgttatagacatctaatcatatgatgtttagaggttctaagattctttagagatctaaagatcttttatttgttcatcgaaaataagacaagattatttaactgaatgtacatgacatgaatctatctattactttcgtaagattacaagtttttatttatgttttgaatgtaatgttaaactagactcaaataaatattaccacaaatctgacattcttttgaaaaatctggcatgctttggaaaatatggcattcttatatcaagtgtgagatattcttttgaaaaatctgacatcttttgaaaaatatgacatgattacatcaagtgtgactgtgacattctttagaaatatatgtgacataactcttttgaaaaatctgacattcttttgaaaaatatgtatcataagtttttttagtacaccaagtgtgacatatattcttttgaaaagtctgaaaatattctaagaatttgagactttagtttccagagtcaaaccaaacttggaggcctttacatgcatctcttatcaccagtcgctcggatttatgaaagttataatgaatgcagtcgtatgtaatctttctttaggatcaaacaacaatttcaattactctgtctaaaattcttgatttacatgcgatcaaggtatactgtatataggtaatttgttaaaaatgcaaaactcacaaccgaagaagatttatgttattttggttcttaaagtacgtagatagttttctaaaatcaaattaaaaatctaagaaaatatacaacgttaagaaagaaaaaacaaagacacacacacacatacatgtgaacaccctcccgattggagttaaaactaatttaagtttcgaaattaaaacaagatccaaaaggtcactgttgttgcggtctttacatccaaaaaatgtatttatttgtgctctactcttttaaatacaacaggaggtgtgcaatatggactttctcaattatgttgtatcctacctatataatgaaataaaatccaacggaagaaggccattaattctcctccacgtgcgttatgtcttttatttgttttctatggggctctattatgtttggtcagcgcaacctaattattatttttttgtatcatcaaacagttgtgtttttattcttccacgatagttcaatcttgttttgtgtttttattcatcaaagattcaattatcttttaaacacctaattttcatacaaaatataacttttttttttataagatgataagacttttggtattccttctattataattgtgattccactcttgtgtattgtaatttaaaaacttaaaattttatattttagactaatatatcgtcaatattaaccacttcaaatatttattataaaatctacttcggcattttcaaacgtacccacttccgattctatgcagtttaacttattacactaatttttattttgatgtgtttttatttattatgaaattattacaataatctagtaaagttaaattataattcaccaaaagtttgcggttgccaaatattcttcattattattatttttcatatctcaaacaaagtagttatgcaaccttgcttaaaatatatgatcccataaattttcaaaaccggttttatatgcaaagtacatgtcaaaacgttatcttatttacatccatttactaatcaaatatctattttaccacaaaaggtgtgttttataccctatcatgttttactcttgagatatgttctttgacaccacccacaaaatatctctacgaaatacgaagccactatatgtctctttaatttcactttttatagtttttttcaccgctaaaattgttgactaaaaaatatattgcataaaaataattgataatatatttataagaaaaactatgataagaaaaaatataatcggttgaaatgagtcatgactaacaataattaaaggttaggaaattaaaagaaaataaattctgaaataactaaaaaaaaaaaaatagaagatgatgatatatggatccctatactaatattttggaagtacattgaaaaactaactttcaaagacccaattaattaagctcattaaggataaacatgttaaatactaacttatggacattaattaaattaaaaattataaaacgaaaataaattgatgacaaaaaaaaaactatgaattttcttattaggatttgtaatctactttcttgaaaaaaattgaagtttactgacggcttcctttttttggaaactccaaaataacaaaacatatgaagaagttttggaatagcctttgactcaacaactttaacaatagaaagaaaacatgtttaattaatgttcatgcacttcgtctcggctgccccttgtggcctgtggggttgccgggttggcttagcttgagacgacccaatactgaatttgttagctcggtcagtgaagtctacatgcatgatacaaaaagattgactagtgtttaagttttttttttttttttttttttttttcataaatggtagtgtctcatattagaaatggtagtttgaaaagtattcagtttgtttgttcactttggattatttgattttggttttgttaattgaatcagttttgtttgaaaagtattcacttttgaaaagtgttcactttaaaaagttttgtttgaaaagtgttcactttgaaaagtattctttgagaagtgctcagttttggtttgtccacttacgattattattcacaagctacagcggatagtagtgactagtgacttatgactttgaataaagaatttccctctaaaggaatgaatacattataaatagattattaacctaagcttgatagagaagacagaacaaaaaaaaacacaagaacagggcaaggaaaatgtcggttttcctctgtttcctcgtcctcttacccctgatcttaatcttcttgaacgttttgaaaccttcgaaatataagcttcctccgggtccaaagaagcttcccatcatcggaaacttacaccaacgcaggacactacatccgaggaatcgccgtaatctcgccgaaatgtatggaccagtggcgcttctccaatacggattcgtccccgtggtcgcgatctcttcgaaagaagcagcagaggaagtgctaaagatcaacgatcttgagtgttgtagtcgaccagaggcggccggaatgagagcaactttttacaacttcaaagacatcgggatggcacccttcggtgacgagtggagtctgatgcggaagctctcggtggtcgagctcttcagcgtgaaaaagcttcaatctttcaagtatatcatagaggaagagaataacttgtgtgtcaagaaactctctgagtttgctacgagacaatctccggtgaatcttgagagagccattttcactttagtcggaaatatagtgtgtcgtatcgggtacgggataaatctctatgagtgtgatttctttgaagctgatagagtcgtggatcttgtgctaaaggctgaagcggtcataagagaaactgtgttctctgatttctttcccggaagaatcggtaggttcatcgactgtatctccggtcagaacaggagattgaagaataatttctcggtagtagacactttctttcagaatgttcttaacgagcatcttaagcctggaagagagagctctactattgttgacttgatgatcgatatgaagaagaagcaagagaacgatggagatgctctcaagttcaccactgatcatctcaaaggaatgatctcggtaagcctttagtctttttcaagttatatatattccacagtggttaaaaaatcttgcaacaacataccaatatatttgtgactttgtgtttatgtcaggacatatttgtagcagggattggtggagtcgctggcataacactatggggaatgaccgagctgatcagaaacccaagagtgatgaagaaagtgcaagacgagattcggacaacacttggggacaagaaggagagaatcaaagaagaagatctaaaccaacttcactactttaagctcgtggtcaaggagacattaaggttacatccaacaactccactcttgctcccaagacagacaatgtctcatatcaagattcaaggctacgatgttcctgcgaaaacacagatcttagtcaacgtttatgcgatgggtcgtgatccaaaactctgggaaaacgcagatgagtttaaccctgacaggtttctcgacagttccgttgattttaaaggaaaaaactacgagtttataccgtttggatctggtaggagaatatgtccagggatgacaatgggtaccatacttgttgagatggcattgttgaatttgctttacttcttcgattggggattggcgaagcaggaggaagccaaagagatcatcaatggggaagaaaattttctagccttctttcaagttcttcaccactgaatatatggtttggttcctatcaaaaaaaatatatatatatggttttgttatgtacactagtttctaagataataaatgaaaattgtatctgcttttgatttagtttcaataaaaataaaaagtgatgatccagttggagtcagcttctaaatatctgtattgttaatggtggaacattatatccatatttttaatttcataattaatgttaaaatctttcacttgtgtttggctatatgatatttgatatagtagagagaattatttgtaaagttgtttagatatggatataagaaatggcattaattgtaattcttttgaaaatgaagatttatttcaaattttcacttcaaaaatactaatatagattaaaattgtgctacaaaaatggtcattatatcacataatacacactatgatatgtgaatatataataccatatttaaacaatgttatcatggtcaccctattatagctccaacaaatacatcctatactattatttggaaagtacataataaaaaataaccttattttttgtaagtaattacataggtatgccattagaaataaaattttaaagagttaattaatttaatttaattagaaaaacgaaaaacattattaatttccaaaaaagtaaccaatcaatatcaacatataagatttgatatctaaattttaattaatttaatttagttagaaaaataaaatacattattaatttccaaaaaagtaaccaactaaaatcaacaaattagatttgatatctaaattaacatgttaattttttattaattattatacttcacctctcatctttatatgattctatttttgcgaaagaaataatatcatcatatcatcagtataaaaaaataattagagttttttcgcatattccatgatttgaatttttaaaaacgaatagaaactgttcaatacatgaaaatatattataacgggtcaaaaatagatttaagaaaacttttgactgagtaacgggtcataatttgaatatttatatttaatttcatacatattattttgaaaatttataatcttatatactataataattaataacatattagatttttttttatgtgtatgatgtaatttaatttttagtacaagctggaaaatcctacaattgacgggtttagatcgatatgaatacaagatggtatactacaggtgaaacgctaaaattaacaatcaaaatacaagtgtataatcttaaaacactaaacaatataaataatatcaacaaaacatatacaactcgcagtgtactatacatttaaaatcaaataaaataatatcatatatttataaatcatctttacaaaaaatgtttttagtttagctaaaatataagtctacctgcggtataccgcgggttaatatctagttgtttatgaaaacggtatcacaacaattttttataaggcatcatatttagatgttctaagattctttagagatttaagatctttatttgtccatggaaaataagacgagattatttagttgaatgttcatgagcctatctattattccggaaggtgtcaagtttaactaacttgagtataaaggttttatgattctagtcatatgtgatgtggctctagcagcacaagtatttcaactatactgtttgaaataatggattcttcaggtacatgttgaaggtagagaggtaaaattttcattgtaaaactcacaaccgaagaagagcaaattacaccttcaaaatacacaacgttaaaaaaaaaatgacatgtacgtaagtttgtaaattttgttttgttttgtagaaatttcagaagacgaatcttgcacgtctaaatttgtatctaaaattataacaagatccaaaaggtcactattgttggtgtttataaatgctttcttttcatttttgctctaaactctctaaaatacatgaggtggtaaatatggacttttagtctaaactagatacacacagatgcgaacaaaactatctcaattatgctggagttttgcctttcctaaactttgttatagattttctagatgttagacacaaataagataatatcctctaatagtatatgtcttctgtttccattagcattattattaccaaaccttcatttattccctgttgagttttgatccaatttttcctgtttctttttaatctataatagtcctttttatttatctatctaaagagaattctcatagtggcagcaagtaaggattatttagtttattgttatacttaaaagtgtaaagtataataatttaagtcgatcgaaccagggcttagattgatgtcggctggtagattatagtgtcccacgtcagttgtcatttgtaaggttgcaattcatttaaaatttgaaaaattgatattaccatacacacattctatgcataatgtgcattatcattttttggacaacgatgttattactttgctagtatattgttctaattaatcaatcagtttacaactttgactagccatacaagaatattgacttatcattaacttgacgatttcttacttcataaaaattaattagtcaaacgaatatctatttcttaatttgtaaattgtttggtaaattctctaatatttatactgttttctaagattacaaacaactctcttattttcatgcatgatttacacgtgaataagtaacaacaacataggtccgcaatgatacccaaagcatttcctgaccattcacaccattcaggtctagtacttgtgctcttattcaatcatatatgttatcactagatttgtttctttatttatcccttttaatcaaattgttcaccagtttctacggctcaaaaaccaaaaaaaatcataacacatgacacatgtgacatgtcaaatatatatatttttatccaaaaaacgacatgctaaagttttattttccaacagaaaattcctttttttgtctttttattttttatataactaagaaattttccaacataagttttttttctttcaataataactactattactatatttatttcatatattgtctatttttaaccaataattaccacatgtgacatgtccaatatcgtaattgtatttttttcaaaaaggaaatactaaagttttaatttccgcgcactttcttggctctttctcggaatagtttgtcgtattccgactataaacaaaaaaacaaaaactcttttcttttagagcttctcacaaatggctgttacagtacttccttccgtctccggtctctctgccgtcgcatcttcatcgaacctacgacgtctgacctccgcctcgaaccatcgactcacggcgataaaatccgtaacatctacttcttctcctcctaccccttctagtggtgttcaacggagacggaagaataatgatgaaaacagagccacggtggcgaaggtggtggagaatccgtattcgaaagtggaggcggcgcgtccggatttgcaaaagaggttgtcagattttttggaagaagctagagagttcgtcggagatggaggaggtccacctcgttggttctctccattggagtgtggcgctcaagctacaaactctcctcttctcctatacttacctggttcgtccgctatatcttctttagccttccaatttctatggatttagattttagttccattccatggaactctgaaacattaagctattcaagttaacaaaaatttgcagggattgatggaactggactaggtcttattcgccatcacaagaaacttggggagtaagtaatatggttcctctgtttctggaaaattcctctgttttctctttttggtttgtccaaaaaatttgattttaggtagcttttgaagtaagtgatctttatttatattgtctttgaataggatttttgatatatggtgcctgcacataccagtcagtgatcgtactcctgttaaaggtaccttctcgttgccctttcgaagcactaccgagaagatagttaatgcgagttaaagccttattgtttgtgttctgttgtattcagacttggtgaagcttattgaggaaaccgttaagtcagagaactttcgtttaccaaatagaccaatatatttagttggagaatctattggagcatgtcttgctttagatgttgcagccagaaatcccaacatcgatctttctctgatcttggttaatccaggtacagaagttcgccttattttgtcggtgaatgtcacgaatgtttctcatcatagacattgttttgttgcagccacacatgtcaacaacttcatggtgcaacctctatcaggaatgctaaatgttttacccgatggtcttccaacgctattggaagatatctttgattttggttttaagcaaggtacacttttgttctcttctcatattctatcttgaatcataaattaaaccaactaatcagttccttgtagatcaagaacttattgaaacgtgacaaaaatgtatctctttgttacggtaggcgatccattaactgggatgttagacgctttgtcgaatgaattttctgtccagcgaatgggcggagtaggtggagggatgctaagagatgtccttgctgtttcagctaatcttcctgtaagtattccttcatagaaacttatgatatatgcgtttttcagtttatagcctacatattttcaagtgttcatctagtattgtgatcacaatatattttcagactcttagtaggatgttccctaaggacacactgctttggaagctggaaatgcttaagtatgctattgcttctgtgaactctcacatatactcagtcagagcggaaacactcatacttctgaggtccaaaaattctgaatatataagatttgtaaagaggtattaagtgtaagtgcttatctggttatgactattgcagtggacgcgatcattggctcctgaaggaggaagacattgacagatactcgcgcacgttgccaaaatgtattgtccgtaagctcgacgacaatggacagtttccccttttggttagtgatatctcttcatccaatactgatactagttttctcatgtcaattgagaatatcggatcattcataacttacacttcaactatctcttttacatctcatattaggaggatggtgtagatcttgctactatcatcaagtgtacttgtttttatcgccgtgggaagtctcacgatcacattacggattacattatgcctaccacatttgagttaaaacaacaagtagacgatcaccggtaagctctgagttatatcaaacaaaatcagaatatcaagtaaaaagttataggggatactgaatgatatattccgcagtgcagattgctaatggatggtacttctcctgtaatgctgtcaactctagaagacggcacagttgtaaggagcctcgaaggattaccttcagagggacctgttttgtacgttggctatcacatgatattgggatttgagttagctccaatggtaattcaactcatgacagagaggaacattcacctgcggggtttggcacatcccatgctatttaagaatctccaagactcattagtcgacacgaagatgtttgacaaatataagataatgggtggagttccagtctcccatttcaatatctacaaactactgcgtgaaaaggctcatgtgcttctgtatcctggaggtgtccgtgaagctttgcatagaaaagtgatatatagtttgtaaactttttccgggtttctgcattcttgaaacttgttattttagaggctttaatgaacaaacaaaatttgcagggtgaagaatacaagctgttttggccagaacggtccgagtttgtgagagttgcatctaaatttggagccaaaattgttccttttggtgttgttggagaagacgatatctgcgaagtaagctttctcatatgctatacattataaatatccgaacctcggtttggcgtaactttggtttggacattgaatgattctcagattgtcctggattctaatgatcaaaggaacatccctatcctcaaggatttaatggaaaaggcaacaaaggacgctggcaacataaggtgttgcatcacatactctatttataatttgttctcataatacttctttcaagtaatattcatatgaacattgattttgaacgtcagggaaggcgatgagagcgaattgggaaaccaagagtgctatttcccaggacttgtacctaagattccagggcggttctactattactttggcaaaccaatagaaacagcaggtatgtacttagtcttaatgtatgctctctacttcaaatcactgacctctatacttgcaagttgcaataatggtggtttttctttttcatggcaggtaaggagaaagaactaaaagacaaagagaaggcacaagagctctacttgcaagttaaatctgaggtagaacaatgcattgactatttaaaagtgaaaagagagagtgatccctacagacacttattgcctaggatgttgtatcaggcctcacatggttggtcttctgaaattccaacgtttgatctctaagtctctctttgtacccacccatttaatcatgatgaatagaggttctaagattctttggagatctaagatctttatatgttcaagaaaagtaagacaaaagatcatttaattgaatgtgattgtacatgaacctacctataaaggttttatgaatgcagtcatatgtgatgtgactttaggttcatacatgcgtttcaactacagtttaaaaggatggattcttcatttacatgttatgaaagtagaggtaaattctgcattgtaaaactcaccacagaagaagaacgattctgactaaacatcgtttatcagacaagacaaaaatgtagaatcttctccagctgggcaaaagtgttatgtgaaatcccctttgattcgcttatctactatgctttgacatacttgtctacataaccctgccaaaacaaaaatgaagaaccatgacgagtctggttcagtgaatgatggactgagaggggattatgtttcttaccataaccagtttggtaagcttctgctgtgaagaatcaatgtacttatcgatcttagctcttgatttgggaatacgacgaccctccattgagtttgatactttatccaccactctcttcacaatagtcttaaacgcctccttgctcatattcccttgtctccacgatggtttcagaagatccttgacgaattttgtaagcacgactttgaaaagcttcatggaccttgatgaatctctctcctttgatttctctcgagactttttccttgtgttatcgccttcatgtacattgttctctaccttcggattctcattatcagagtttggagtcaaagtctcatggctattacattctcttccatcgtccacattcttaccaaactcatcatcctctccagaaacaacttctccaatctcaattccagcagtgttttcttcaacatcagctggtttgttcgaggaaacactgacccgagcagtcatttctgactcacataaaggttccttatcaacagcttggttgttttcttccatactaagcggtctattcgaagaaatgctcgccttcggtacaatgcacaagtcgttatctggttcatgctcctgaacacaatctaatttcacagacgctggttcaaaactgtctacaaaaggatcatacatatcaccaacaagaccacattccggaacaatcttgccttttccagagtaaggcgaagaagaagcttgtctagaaccatcatcaggaacctctgtctgaaaagtcatgcctttgcttgttacagactttggttctgagctaatagataagtcaattcgagaagttggagtacttgattcttaaggtctcaagctaaacgccactgcagaaagaaaaaaaacacacaaagcttttagaaaatcaattcatgggttacttcaattaaagccctaaaacatgaatcaaagcaatgctgcaacacaaatatcaaaagttcaatactttaagaaccctaaaaccctaaaaccaagaattaggtgttaagcacagagagattcatcgccaaactgaaattgatcaaaacaaaaacaaaatcgaatgtgaaacgaagagaaacatactccattacgagattgaagaagaagagaagctaaatcgcgtctagtgatgaatacatgtcctttgtttaattcaacgaagaaaccagtttctacttgtgaagttgtcatctttctgatttttgttttttttcttctactcgttacaaaatcaaatccaccattacaacaagagacgatttcggagaaatcaagagaattgaataagaggagatgatattgaatattgatacctaaatgtctttggatcgaactcactcctcaggcgaatgaaaattgtatttttatatatgaaagacgaaagaagaaccctaactcttttctttgggccttttgttgggccttaacgtttaggtttggtgttgagacttaaacttagctaaattatattgacccattttaacaggattatttacggtggttgtattgaattgaggatttggagtaatttgtgatatcacatatacctacctacaaaattgaatgtccgagctgacacttttgcaaaaggggctcaatctcgatatgttattttttcccatataagttttcaggttctaaagtggttggttctcgatgctcactttttaataatatatggagtcttttggcgtaaaaaaaaaaaaaaaaaaaaaacttgtcaagaagatgattcgatgatgctcggtttatgatctattttttctttttgtcaaaccaaatcatatatcacttaaacaaggtttagaggatacatatatagggcggtcttaggctcttagcgagatggtcagccacatagtttgctgctttcgggataaacttacatttgaaatcactaagggaacttgaaataaagaagatatctgataacatgccatgaatctccacaaggggcgagttcgagaggatggccttgactaaaacttggcagtctgattctagagtgacgaagttagctcccagttgtaaggctgagatagcggagataacacataattgcaagaagaagagtgtttggtgtatgatcccgaagcttgggagaagattttccatcccaggctcgcacgatgctcgggaaagttgaaagcagcatcggattgcaggataaacatattgggttgcaaggagtcctctcatcatgaatccgagggaaaagggaaggagtagaaccaagcatggatcccatctgctgggcagtttgccattcctttgcgtcaatgatggatttcataataacttcctgcttagagaaagaagtgatagcaaacaccacttgattgcgagcagtccataagttccatcaaatccaagggtatagaggtctccatcctaaacccgtaggagggagacattgtctcttcttcacaagagcaaagccttcttttgtattagagagggtaggcaattgacattctatactctctgagcaaaagggcagttgaataagatgtgagtgatggtttcaaagtctctgcatcgggtgcagaaaggttctatagaaatgttccgggaaagcagttgagccccaacaggaagagcattattgagcgctttccaaatgaggagtttgatttttggggagattttcaaggaccaaatatctccaatccagttgttcgtcatatgagggactggagggttctatcgcattatgttccttgccacatgatagcccgattttgtggtgtagagaccatctgagctgaggaaccaaacttttttgtcaaggcataagtgtttgctgggcttgatggctagtgatatacctttactgattttaggcattatttaggcatttgtttttgagtatttttgttatttctagagtcgtttctattccttttcatgtttttacacgttttagatgcatttggagattatggacaccaatatctgacggcaattcgatttcgagtctctttgaagttttaaagatttgcatattcgccccagaactttgggatgcatttggagattatggagaattctagaagaaaacatagaacttatgctgtagaagaaatccggagaccaaaattcgcataggtgtcgatcgacaccacccctagtgttgctcgacaccaatatctgacggcaattaaatttcgagtctcttcgaagttttgaagatttgtagattcgccccagaacttctccctattttcaaagaagtccatgcacgtttatagaacttatatatagatttttaaggtcatttttagacctaagcttggagaggttaatctccttttctctgttgttcttgggagaaaaaccttgtggaaactccggttagagaagatctttctaaacgctattctcttgttattttcttttaagattttttattaaatcatgttgtttgcttcaatctccatgcttgagtagttctcttgctaggttgagggtttatctttagggatttagatgatatataagatcgccaagctgctatgattatctttagagttcttcgccttgattaatcttaatgatagttctagagtacctaactagaattttatcctaagtaataggtaacctctgaaagggcgcttattgctaaaactatcatagataggcctaagtatttagatgtggatagctctggtttcgatacttaggtgagcagatcaaacctgatattaatgcatgtttagcaattagggatccgcgactagcattgggatctttagtcattaggcataattaattattgtgactagtgttggttaactttacattagtgatttgagttctagaacggttcgataacaatcctaatcatagctagatctactagtcatctatttcttgagaatatccttaaacatgatgcttttctccatctgatttacaacatgattttaaatgcttttctagtctttaatttacaatctttttctgtttagattaattcgaaactgttagtctattgtgtgatcttgagagttttgtcgaattcgaccctaaagtactggagtcgatctcttaatttgagagagtagtcttaggattaatttgacatacaacaaatttattggacatggatgtagaaggtgatttgagacggaaaagacttgtctagtgtaggttcccacctttggaggataaccatccattgggagaagtggaagagttggttctccaaagatttgagtagatcaggtttgttggcgaatatatctggttcattggcgaattgaaactagaaaaggctgtttccgaggtccgcacccaccaggcgggaagaggttttccagtgatcagaaagaaaagggatgagggacaaaccttctcgattgcaggattggtgagtctttagatgattgtgagttcatgtcttcgaagaagcttggagttgtcgaaaccagggacttcaactctaggaggttgacagggtgtggaaggaaatgattgagcttttcccttttccgcctaggagagacgatgcgccattgagcttaacataatgttacatttgattttttaaaatataaattttaaatagaaaaggattattttagaactccttttcacaaaagttcttaactagaaaaagtatattgtttgaataacatttgttttattatagatttacaaataatgaaatgtataacatacaaattttagattttatacataaatgatatactcaacacaatacaaataatgttattatcattttacactctcattgaatattaaaaatttaaatcttcttacattcaaatagcttgttaacgtttttaatatatccaatcatattttttatgcataaaaaccggtcaattaacacctctctcagcttttatctttagatagatcccatcttctcttgctctccaatcccatacgcctccatcatctgaagcactgtaaagtttaaatgctgtaaagttttgatggtgtctataattaggcccttgtctcaaggtacacatgaaacgagtcgtagcaaatatgttggtaccaaaataattgaacctatgccctccgatcggtattattaatggacctataacgtcatctttggaataacatctcatccataagagttttttgtttttgagttcgttaccaatcctgattccagcgctagatacatggccaagtatgcaaaagctacacacaagtagtattgagaggttttgcatttttacatatatatttggattgtgtttggtagatgtttagatctttttcgtgttgacttgttttcgtgtgtgctacatttgtatttaaagcttttcttgtttctctattaatataagtttgctattgatagttgaggtaacaaatgatcgaagactattaatttgtggtcaacctaaaaaaggatttgaatttgtaagtaccagcctagcttggttttttaggtttttgagtggacctcgacatcaaactggagggatctggaatgtgggattgggaccgtttctgtggttgggtggttgtgaggtccagttgaacatctgataaataaatagaaattctgtcatgatgtcacatctctagaattagtcggataacttaagttgttgatgttagaccaagatctatctaatcctagacccttaattcgatgttgatccggatcacctataattatcaactatggtaaataaaaagatccaaattaatatatattgactaataaccatgtttaaagaaatctttaaaaaataaaatcctaaattattgatgtccagcctaaaaagctaataggttggtatctcatgtctgtgccacaccaatagaaaaagtggttttttattttgtatttgccaacaaactaatgcctatagtcgaggtatcaaatcaatttatgttaatccaaattaatcaatataatcgaggtatcaaatcatttatggtggaaaaagtaagtgaactaatttatgaattatctcattcatagattgtatccaatatgtcaactctataatttgcagcatacaatatgtccaccaaaatgaaatcgcaaataagttgctaaactgatactatcttcataatctatatatacttactgattatgtccatcgtttttgcatatataaacaaaaaagcgcacatggcgaatcaatctgttaactatatatcctaacgcaacggaatttgacaaagattaactgggagtagaaaacaaatccaagatgaaaattcgaagaagggtctatgcatgcatgaatcatgattattgattgtgggttacaatagatatcattctttagctaaagatactagttttgattttacattagtagttacacacgaattttgtggttgttacatatgagtttaaaggcaagttaattatagataaattattatacacatgaatgaaattatattattttcttagaagccattactcatagttttttggtggcacatcacacataaattagtgttaatagttttacagcttatttaaaaaaaaaaaattgcttagtagacaaattaaaattaaaataagactatttttgtatacataatttgtcttaatgaagagtattgaatcttatatataaattaggtagcttgtaaatatttactatatccaactttgctctttatgcagattgtctgtgtcatcatcaaatttggtcttatagattcttcttaaatagatcccatcttctctagctctccaatcccataagccagaatttttaaatgctctaaagctctgactgtgactaaatccaggcccttgttttaaggtacacataaaacgcgttgtaccaaataaattatgaaagaaataatctgtaaattgtcctccatttggtattattgttggaccaagtacatcatttttggaataacacctcatccaaagggtcttcttatttttgagttcgttgacgattctgattccggcgccagatacatggccaaacatgcaaagactaaaaaaaataaagaaaattgtgaaatatttcattttttctgtagagaaattttgattttttttgtcgtgttgacttgtttttttgtgtgtatttataacaacatctatgttgctatttttgaatttacagtttcttgttttctgttaacataaattttctattaaattttgtccaacagaaaaagttttctattaatagttaatataacaaatcggagactttcaatatatgttggacaaaaataaatgtatgaacttctaagtaccagcctagcagaggttatctcacccggatattgtatcgccacttgcattacatcatttgcagcaaatgatatgtccaccaaaatggaatctcagataagttgttaatattaaccttcataatctatgtacttataatgtcttttattttggcataaacaaaaagtgcaaatgccgaattaatcgatcaactatatcttaataaactatttttttacaagtacttcagggcaatcctatagattatagagttcactttttgtatacaacgcctcactacttatgacatctactaaaaattatgaaattttaattctaaagcttgcccttttttctctaataaataagtagtagttttttttttcttttattgtttccaataaaacttatagctagtaactaggcaacaaatcctcaagaaaatagattttatcatctctagctaactaattatatgatgatctacccttaacaaacaaacctttcgcatgatatgtagtaaaacctataaaattcttataatcaggtcctttatatatgtcgcaccaaaatcccgtcgttccccaaacgttggtttaaagctgaatgacataacttttccatttttgatatattttatacctatattgtttttatatatatacaatgcaccttgacgattttcttgcttttgcgactgaattcggtcatgaccgtaaacatagattttttcatgtatacatcaccaatatgcaaagcccaaaaagaaatagaaagattgagagatttttcattgttatatagaatacttttgtttaggtaaactagttagttttctctttgaagtgttatatatacacatgctggtattttagcaattacatttctctttattattttaaattttctattaatagttgaggtagcaactcaatacaaactaatgattgatagttgacaaatgatctgcgtattggacttttgtgtaattaattatagatataagtcttttcgcttataaacatgttattgtttatacttatacttatagttgacaaataagtctttagtatagtttgtagtattttgagtaatatgtttttgtaacgcagcttcaatcatcatccagctctcgagatgagagaccctaacaacagaaacaaatttgaagaagaaactaacaaacttttcttggttatgaatccacaaatgatcttcagctctgtttatagcttcacaacttgatcaactttcttctctcaatttcagattcacccaatcatcgtttgccaagtcactactcatattcccaccaatcagttcttaagaaaacctccacgtcagtcactcttatgcttcattttcatgtatcatggctttaaatacactagaattacccatttttcgtctcagcttgttttataaataacttgagcaatatgaaacacttttgaaactatatcttaatacagtaaaaaatttcttttacgagtacttttgagcaaaacaagatttcagagcccacctttatacttattgtaacatctactaaaaattatgaaattttaattctagagcttgccctttttttctctaataaataaagtagtagtttttttttgggtactatgaataacatatctatactaatattacagaagaacctaaataaaatcatattagttttgtaagatataacgttacaatgctttagaaaaaaaattataacgaccgatttaatttacgagttataaagtcaatttatgggtctactcacaaatcctttttcttctaaacgttaacacaaaatctaaagtagcaatatcacttattttaaaatctaagacatttctatttttccaattgaatataccattattttcattaatatgacatattgctttagtaaacttataaaaatgaaggtttgttatatttaatttttgatattccattttttctaatttaaaaaagaataattttccaaatacagaagaaataaatgtttactatatatatatttagaaatgtttagtctatatatttgttctgtttgttctaatacaaactgttattgtagctcaatgattgagaatttcatatgagtgcaacatgtcagcaatttgaatcgtcacaaatgctatattcgtcttattttttaatgaaataatgttggcagaagacttcaaatgacgtcgttttcatttaacggagatttctagctgattgttaaacccataaacgtctaattaacaaaaactttataaggtgtctagaatgacccacttaacgaaacttgacatttttatcgaaaagtgaaactaaagtttacgattaaatgacgtttcgaaaattcatattttttatcccaaattttatagtttacattttcttacatttttgccatttctttttctcttttcttttattgtttcagtaaaacttatagccaataagttttatagtagctaggcaacgaatccttatgaaaatagattccatcatctctagctaaccaattatacgatgatccatctttggcgaacaaacctatagcttgatatgcagtaatacctctataacgcttataatcaggtcctttatataagttgcaccaaaattccgtcgttccccaaaagttggtcttgaagctgaatgacataacttctccaattttgagatattttacaccaatatcgttgtttttggatttacaatgcaccttgaggatattcttgtttttgggatttaattcattcttgaccgtaatcgtagatttttttccgtatacatcactaatcatgcaaagcccaacaacaaatagaaagattgagaggtttttcatttcttggtatttgtttttgaattttttgctatatttatttgtaggtaattaaactagttagttttatgtttgaagtgttatatacacacatacttgtatttctattattgtaaatattctattaataattgaggtaacaaactcaatacaaaaataatgattgatagttgacaaatgatctgtgtattggatttttttgtactaattagttacagatttaagtctttttgctaaaaataaacatgttattgtttatacttacttccgcatcgtttatagtattttttagttatgtttttgtaaaaacaatctattttttttatttagttaaagtgatattttcacattttcaatataagaaatatatgtatatatgtttcgtttagttaatcttacaataaaatgattatttcattgttgtattgataatttatcaaaaccaaactaaaccgtgttcgtccttggctctgacactatcacaataaaattatccctttttcgtaccagcttgttttatagataacttgagcaaaaagaaacccttttgaaactcggttttattattattcagttttacgagaacccggaaatggtaaactgtacaaagtgggtcagagccattctgatttgtgactataaatttgtatgtacagaaaaagtccattgatttcttcttaaacaagaaaatcattgagcttgtgtaaccatgaagttaagttctcactcggtgatgtcgaagtatcttgggttttcagggtaatggtactcgacattcaactgcaacacagacaaataaatgatttttgttatcacttttacaaaaataaaactcaactaattttagctatttgctgatttgcaaaacgatggtcaacactcaaaacacacaaatctcatacgtacctttccttcatcggaatctgtgtgacgttgaggaaacacgactcttaagtcattgtacagatagaatctcctcttcccatctgaatccaagtttttcttttgccccgtggattcggtttcttcagatttctttgaacttttcttaggtaatgggcaaagaaatctcagatgaagagcgtagcgtagagcaccagaaccaccgttacattctttcgacggctttaaacagatttttccactttcatgcaacacatctccttccactgaatctactgaatcagatccttcacaactctctttgtccccatgtttagagttttctttttccaagcttgtggcttttctagtgttctcttgcgttgcttcactagttggattagatgatcccagtgtaaccttttggcgcaagaacgtctgcataataccaaaaaaaaacgaaaactaatgttcaaacttcaatttccatacaacagagaacatgcaatgatgagttcaaaaggcgaaacaagagcaaatgaaaactacgacttcatcaagttttgcttgaagcctagtgctttcccagaagtgatacaattactctttatgtctatagcagacacattatatcattccctaatgattttagtttccacaaaaaaaaaaactcatttcctcttcttaaaatgaaaacaaataaaacggtgttatcttttatgttctctattacctttgttccagctggcatatcagtcaagtcatagttacagaggaaggtgtgaagaggtgttttctcagggttactaagaacctgcaatagaacagtttatgtcatgagtgaagattcagaagctttttgacactatctatcagcaacattgacaaacagtttaacttagcctattagacatatttagcactgacacttgacatggattacaattacaaatgtttaggtgacgattcaacattcaaagaaatgtctaactcatacttcatacgcacttggctatttggaatccagggagaattgcagaatgcagctgttaacccactaattagtcttttaaaatcatttacacgagaaaattgcggttatgacgaatgatatctactgcaaccggcaaatgagcttttagccataccttgataatccagtagcatctatactaaacgcagaataaatagaacaaaaaaaataaagagaaaggagataccagttgaatccgacccttcatggggatccgcagttggctcttcgaactctgggcatcagagttcatttgacttgttttcactttttggccccagaatttgttcaatttagatcctccagcgagatctatggaggcgtagtataacaagaggcaatcatcaccagcactagttactgagaatggaagcttctgtgattttggagagatgtttcccccagcaatactaagaacggcaagaaagccgtcaatcttctgtacacaaaaagcagacagaagtcaagaatctaaattacaaaacaaacaaaaaagtgataacgactttttccttttagttgttgcatatatacaataaaaactataaacagtcttctgctatagccagttttaccaatcctcaatttctaatgcggcacatttttctttcattactatcttttgacatataaagtaagtcattaaagcagcagagttgaagatgaaaacctgatttgttggcccgcatgacaatcgtcctgtcaagagtgactcctcaaaagaaccaaccaatgacctctgaataggccgtccactcaagcttctaatgaaccttttacatggagatgcaggagctgattcagtacttctctccattgaaaacgctctcctaatggcatatgcatcatcaaacaatctacgatcaactcttaattctgcttcttcactgatattccttaaatcttccagtattttcccagtttggcaacttcttacagcttttactctctcagaaaacttcggaccaagtggtgacagacaaagcggcggagagacagatatttccttatcacaaggtaagggcttattgggtgtgctagacgtttcatatagtggggaatataagcaaacctcacctcctttgacgggttggcggagatctacagagtcaagcaatggaccatcagtgaagaccatagacgagagtctaccactgtttgagacattcttccactcccagcaacttgtggttgtaggagtagtggagagatgtaacctactaggggtattagcctttatgtgatcttgtgcgacagagttgcagaatccattagactgaccagaataagtaatttgttggtggttaccacagctgatatcatgcaggtcacctctgaatttgacagggaaaagagtatttaagggggagagtactcgtttcctgactaatgctccaccgatatctactcctgcaactccaacagtggatgatagagagtgatcaacagcgacactcgtttgtttgttgtccagtgagcttgtttcgcctgacgcaaaaccaactatccttctagctccagtaagactcgaactaaccttacctgcagcataactagtcgatccatgagcacttgatgaggtaacaacacaagtcccacggaatctacacgaatcatcagtgaactccagaggctccaatgatgtttttctatcaaactctgcaatggaagagcaaattccttcctcacttccactgttaagaacatctgaatcatgggaagtagcatacacaggcagactttgcgaaaggctacaacttggagtagacaaagcttcctgggattgttcacttgaagcagtctgtggcagacccataactaatgctcttatcaagtaaaagggtttatggtcacttctgagatgtgagtttccaaatccctaattatctaaaaactccctagaaactaccaaatccttgaaaataaacaatactgactaactctatctctaacagaacaataaataaaaatctagaattatgtatcagtcacaggcatccacaactcgtgcattgcttgcttactgacccgcatacaagaaaccaaacacttaacatttatccgacattggtttacggcagaacagtctgaagttacatgaaatgcaagggtgacagatacagagttcattgcagttaccctttcctgaaacaaataaaacggagaaagcgaatcaatgacacagtaagtaaatacaaccaaatttgttctgctagactgttaaccttaatcatcaatagaacacaaagtgcagaagttaatcaggaatggtcaaaagaagttatgactaattccagctacaagaataagaaacgatcaaacaaatcatgatccggaaacatacgccataaaacccaaattattaataacactactaagcaagaagaagagttcatacaataacagccattccaacaaaaatgatcatcacaaattctcaagtgttataagtttcaagcaaacatcactataataaaaaagttaagcaaaatacaaataatcgaacactgggaaaaaaatcttccacaagtgatcaaacaaatcaatgatccacatgagcgttcacaaaatgaaacagagagattgcaacgggataaacttgtgatcaaatcaatctgatcaaaaatacttaagaatgtttcacataggagacaaataatcaccagaaaaaaaaaaaaaaaaaatcagctcatcaacaacaacagcatcgtaaaactcacaacaccgatgcaatcatgaaactcttaacgaccatgaaaagacgcaccgatgacgcaaccggttcaacaaaacatttcagacgaacaagttccccaaaatcggaatcattcacataaataaaccctctggatccaaaattagaatcaaactcaaaatcaagaagaagagacgaatccaaaaggtaagagaagaagaatcttcaaagaggtgcgtgagagaaagaagaagcaagaggtacctctctctcttcttctcttatctttcaatctgttttttttatataacaaatcccaataagctcatcgccattaacatcgctctctttttcttttttcttctaattaccattttttaacctttatcaaaatacgttaaagtttgtttttcccagattaaaaacattctttgattcttttttttatacaatgaaagctcaaatttcaaatttcaaagcatagaaacaagaatttctcatactttttattacattagatctttaattaatctataaacaaaaataaaccttaccgtttttattgtctttttaccgtaagaaaaaaacaactcaaacgaacagagaaaaaatggagaattaattatgttttgtttttaaaagacgggagagacaagaaagctgttgggaattgggatgagctattttgtgccctttcactatttctcactcttatccattagtgggccataatcaaggcccacatactagtggatcaatatattaagcccagcacgttatcgatctcacgtgagagaaggcgacagattgatgatccttctcctccaccacccaaagctgagcctctttgtataacacatgtcgactatgaaattaaaaatcatatgagtgattttatgcaaaaaaagctatattaatgtcgagatgatatacaacataaatcatactatgaatgagagtgtaaaatcgacctagaaaggtcgagaagcttcttccatcattttcttcactcttgtcaacttctctatttctttcagaatctgaagaacattgttcataaaattttaacatttgtaaccataagttaaaatgataaccaaaaagagctcaagactttacctccaaagcaatgtcttcagaagttactgcttccaagtcttcaaattctagctttgtagctatttctgtttccgtgtaacaaagcagaatcagtcacataataaaaattgtcatgaatattatttgacttgtgatagatccttactttcaagggaaatggatacatctgctgtttcgtaaccctttcttgatttctcgtaactcgcttttagtgtgtcaaacaactggattcatccatcatgaaagtcagtttctctgtaataaggccaaataggaaatttatgcagctcagaggaaagaaggaagaaaaacctcaggggaaggttctgagtggaatgaatcatcatcccctttagcagtgatatccagaggaacatcgatccatatggagatcccgtgtctaagaagtgcactgttcaaatatttacgatcaaatgagaacagacgggagagatattaaacagatataagcagcgtgtgtatgtcttctaaaagaatgaactgctagagagaaactagtgaaacttatatagaacatacagatttctcaagctttggaccgcaccatctccagcgcaaactacaagccgacccatagatgatagctgcttcagcacttcagtctgcagaaacatgttagaaagtcatcgtcaaaaaccatttttgtaagtgcgatcaatactctttcaggaactggaccagagatgcatttgtacgataaaaatgcagatcaaacgatatatagtttacctctgattcttgaaaagccttctcatcagcttccttcaaagcttgagcagacacatttccaccagccgcctctgtgatcaaattatcactacccaatcaaagtaaactaaagttagagtaatgtgaaagtacttacaaacattcaatgtgaatttatttcaagacgaggagaaacattatggtggcaacggacaaccctatgttatggaggtaaaggtccaaaagagagagcttagagcttaaagcttaacactaatgctcggataaactggattgcacaaggataaattggattgaaacgaagataaatacagttagtaacagtaagaaatgtctgaaattcaggccactctaaacaactataagggtttcaaaaaaaaactaaaagtagaacttatgatgaacttatgagtgcttacctatcaaagtagtaatatcgtaatgcctcagccaaaagcttccccgtgttcgttttaatagagttattaattcctattccaaattgttaatgctcacacatcagtatccatccatatgaagtacacacttcaaaaacgggagcttgcagcttaaaaaatcttagccaagccggccttaccaaccagaaatatggaagctcctttcagttcaggggctatgtccatagctttcctctgagtttcagacggaaaatggttaaggaacttctgaagtaaagaggaagcaaaagctggttacatctgtataagatggttcttatgaaaactctcacctttacaacatcaatgggatccgaatcaacaacactgatccctacgcaacaaagaataaaccgaaacaaaacatttagataacttagtaaaatttcttcgtttgttagagtagcaatttactaatagcatcaatgtaagacaaaaaaaacacaccaaaatttagactaattcagcatcagacatatcgtcgaacagttggtacacaatcaatctaacgatttcgctagacttaggcatctctcaagttccaaattagggtttgaaaactaaccagtagaggcggattgatctgcgagagaccgagacggagctatacgactgtgacaagaaatgagtctagtagaagaagaagacagcaacggcttgcagagagtagttcgagcttgaggagagagcaagggaagaagacgaggaacgaatccagttaaagttagagaagcagacgcagagaagatctccattgacgacgacgaatgctctcttaagctccttctctccctccttcctctagtcccaagatatccgccacgtattaatttcttttatcatatgtttgtggaaattttattaagaaataaattttaaaaatatatatatatatcaaataaaaaattaaaataaatttatagacttaatttttgttattctgcataaataaatttaagagggagggaaaacctctccattgcttatccatcctgattttctcgttttacatccgtttcttttcaaataggtgtaggtgatcgcctaaaaccactgggatttgaatgaatgttatagtaaaagtagtctaaacagctaacgaattaggccatcttattcttaaggtgaacatcaatccatcgcggcagatttcttttatttttctcgatcgtgctacagactgaaatttgtgaacgataaataaaagcggtctaatccgcaaatcctagatgtcgagatgacgtttaaactatagaagttacctttttacgcgttggaactatgcattttgtattagacggttttacgctatcttaaacgcactttgggggccttcccatcccgacaacggaaatggacagacatagacttagtttcatacgttatatacttttgcatttttgaaaattttattttgaggtttcggatatagaaggggatgaaagaagaaaaattgaggggattgaaaatgaaaagggaataaagagcagaggcttcagatttacaatgggaaaaaaaaaaggagattaaccaactaaagaataatacatatactgacttctatattcacttgtgaagatctctgaatttgtacaatcagcgttttggtcaaacgtgacgcagacgcggaagcctcatcgttcgatcagctttcctactcctgcatgattaataacctatggaggtttcaataaatccacagcaaacaaattccatttatgaatcatgcaattacattttaaaaatacttcatgcagttacattttcgagtcgtttgcgtttgcgtgtagattgaaagtgtcattctaaacgccaaacgcaaacaaaagttaaacaagaacatttcatttgtgttttatggaaaactgaacatgcttttatgtttcaaaaatatcattctttttctgtaagattatttcacgtaaacgcataaaatgagtttgaaagaatcgattatacctctgatttgactggtctgagcaactcctgtggcttgaggaagtggcctagacaggctcattggtgttaacggtggggatgctactatatcatctctcctttcgaccagccgttgagaaacaactctctggtttcttgaaggtatagagtagcttctagggacaaccaacggaggaaccggaagcggcgaggccacaatgttggtggcggacggaacagcaacagtgacagtgcttctttcttggttccatgcggttagaggcgctgagtgaccaaccagaccaggggacttggctcgtcttggaggtggtgcaaagtggcctgggggtcttggaagctcgtgaagctcgttgagccttggggaagaagcaggaggaggtgaagcggtaggggagactcttggagaagatgatgaatgagggtgagattggagtactggaggagtcggcagaggacaaaaagcgcctgaataactgtcagccatggtgatgggttttgttgaggacggtctgagaggtccagaaaatgcatgtcttcctgctgcttgctgctgatgatgatgcgtgtctgttgtagaaggccgagggaggcggccgtagaagctgttgctttcggcgtctttcccatctttcccgctttttatcggctctaacggagatgaatgccatatgtttccggcactgtggtttgttggcctcggatttaatgcttgggaaaccggttttgagtaccttgaatcatttggtgttggtaatacgtaggcattaaaagatggattcgcctgtctcaacctctctgatacatcaggtttcttttctgggaacaacggagctgaatggctgctcaaatacttatcgcgggttgaaactggatattcttctctatgatcagcatttacctgtgcaagagagaagtaaaatacttatcacactagactctcatcaacccgattaatcgcagttgagagcatttggtacacaaatattggaaaaaaacataccgctgctggtcttgttgtagaagggcgaggaaacgagaggtctgtatcatccatctagataaaaagagaagagcataagaacaagttttataggtaatgtgtgtatttatcgctttaccgtcaaatcaacttacctttgtggcccatggtgtagagagagaagaagcttctaccttctgctcatttgttctgtaatcaaaactgagttctccttctctattcatgtatcggccatcatcatcatcatcctcgctagcttccatctcgttcccatgaacagatagatcacagtcaatgtgttgtttctctacagcaacttttacatgacgctcaactgcctcgagcgatttcagtccagtgtgaaacaaacgcatctataaagaatcataagaaagaaccgtcagaaacacaacagacgatcaccaaagttcatgagaaatgaaacaaacagacgaaatttgaacataagctttacctgagcagtgtggtgacggactgcttgtattaggagactacgagcttgtccttctttaagcgatttcaatcgaaaaatgcacattgtggcttcatcatgaaactcactgtaagcaggtcgagactcaggaggaatatgtctctctcctttactgcttttaggccttcctttctctttcactagcgacatctcatacacattcctgagagtttacaggtaaagaagttgttgaaggaaactttatctaaactataaaataaaaactccagtgttagaaaagtaataaacctcttcccgtcgcattgttgcttcatatcctgctcatttatgatgataaaaagatgagtaaacataaaaagtaaaagcgttccttgaatacaagagtagtaaattatggtatacctcaacatatctgaggtccttgagaagcgcctcggacggggatgtaatagtttcgaatatatgactacgctgaagaacgaaaaccatgatcagagtaagctttcatagagtaataaatagagcttttgcggaattcatgtttgtaacaaacaacttacatatgtgtcaagaagtctttgaagctcactctgtactttacccaacataaacaagattctacctacagaagaaaacaatgttacaatacatcatagaaattctacacaggaaagtaaagttctataatacttactgctctcttcgtcgttatgaggcgcgatttgctccaaacaagaacccatttctcccaacgactcagagaactctacaatccaccaaagtacaacaataaagtgtaagaatgtttcttaagaaacctacttgcattttgcatataacagacaattggatgtttctttaccatatgcgctatttgccgtggcagcagctgcagcgagtagtctatcgtaacattctctcatatcttgcatatcctgagaaccacaagagaatagtgtctaagtaaaaatggaaactttttgatacagtttaaaagtcaaattccataactaaaatagtccatcttccatagaaagccctaaatctcatctaaatgataaaattagctaccaattcaaaagtttctaaatttgttcttcactcctaaaaaaggtttcaaatagaacattttccggcgaattaagtaaatcagaaactcgatcgaacaacgagtacgcaattacaaagcataaaccctactaaaatctcgacgattccgcaacaaaacccaacttcgtatgaacatcaaattacgataaattttcgaagttagcgtaagttgtgttaccttcccggctcgatcgagttcgtcgatttgtgttgtagccatgacatctcctttctccttcacatcaaccttatgtgaatgcgatgttaatctccttaacttctcaatcgaagctttcatcgtagaataatgcctcaaatcaaaaaccctaattacgaaatttccagtcaaaattctctgagaaaagcttgggatcgaaaattctcaaaaacaaaagtgagaggagatatagatgaaattgtgactaaaaacagagaatagaagagaagaaagagtgagattcaagtatcgtcagatatgttcaacgacattgaagaaagaataaggaagaccaaaaaaaaaaagtttctttggtcaaaaaaaaacagatcgaagaaacagagagagacggagacggaacccagataacagcaagcaacgaaggatgatccaacggcgttaagtatttatatgaagagagatgaaaatacacgtggcgaaatcgtaacggatgataaggaagagtcaaaagtcaaagattgatgacagggaaagaaagtgattatcattatttgggtttgaccgccagtgggagggtcaaacatctcttcccttttttttttgacaagttattaattgtttcttttgaatcaaaacaaaagttgtatttaattgcattagatatttaatatcccctgagttaattaaagtccaaataatctgttcgttggtcaagaaaatttaagcttcaaatctattttagatattaatatcaaactagtatgtttattgctagtttaagcttcaaatctacactctttaatatttggtttgtaatatgcaatgaacatgttcctataacaactttgtttacatctatagtacattcttctttcttttttttaccatagtctgattactatcaagacaaaatttcatttttctctaaaacatttgccaacatattagtacggttaaccatgaatttcgtttttaaaagatacaggtaattaaaatttataaaacatatgtcgtggagttttgggagctcattaactaaactaaggagataagaatatacaaatttgacgaaatttaaacacaaataatggttttactacaatacttgattaatttaataaattcttattatgttttaaatatctaaaattgtatgagatgtaaatttatatacataaaaattctaataattaataaaagttacataaaaattaaaatactaaatatttaaaaataaccaagtatattttactctaaaattgtcagtatcatgataattaaatgattaaatactgttttttcactatatgatgtacgagagttttccatcaaagcctaatgataccggatccatatttgttatttgagaaaaacttctaaaggcacaataacaaactctgattagatgcgtatttaatggtgcaaaatatagtaaacaaaactgatacagttttttttagatgttgatagtgatattgataatttaaatgtaaaagaagacctacatttatagatgttcttgtacataatcaatatgagagttctttgctaatacaattttttgcctacagaatgggactaaatgattgaaaaagagctttacaacaacaatggtgtcaagtgttagttataaccacaatagtgttacctgacctttttgtatgcaaatcaagtttttaaccgtgttgttatagagtgtagacatgtatgaaacttatgagagtttcaggataatgtgatgtggataatggtgattgaatatttctttactttgcccgataccccaatatgatcattgaaaaatggagctttgataatccatatacttaagaccaagtctgtttggtggaatctacttacgcagttacgctcatgcttgataattctcctaatttacaactactcaagctcattagtttctacttagtaagttactgcaattaaatacaaattaccaaaatgagaccaaaaatcggcacaagtaaacagtatgatttcgaaccggaaatataaatccggtttaaagacgcaagtggattaattttggccgatatcgtcttcatttttcacattccgcctccgcttcattattttctgaaaccctaacctcagccgtgtttttttgtctccaccgccgtcgattttcacagccctcgaactacttcgtcctcccttaactcagctggatttgaagatcactaggaattgatttattctctatcgaagagctagcgtttggagtgttgcgatgcatctgcgttttgaaggggattgaaatagcgtttgtaaatgcgatagtactcgggaaggaataataattcaataggagatcttattgcaattcgattgctttcgatgacaatgaaacgatggtatgtttcctctatgtgtgcttatttcttatgaactgttcttaggattttttacactgaagttccaaactaagttagtaaacgctgtggtgaaagtttgagcaatgagtgattaggtctatgaattgtccttatggttttttacactgtaagctccaaactaagttagtgttatttcgtttattgagttttggggctttttgtttcacagcaaaagttgtggtcagagtttgagcaatgaggataggatcagtcagttacctgaagctttgcttctgcagatattatctttacttccaacaaaagaagtggtcgcagtgagtgttttggctaaacgatggaggtttctttggaagatggtgccgagtcttgagttttttttactatttcacaaatgatc

SEQ ID NO: 469 - DNA, 12106 bp, Arabidopsis thaliana
ttgagaggttttcatataatgtcagcaagtgtttgttttcacatcaagctccgtttctacagagtttgcatctcaatatgaactttgggtgtgaccctcgtataatggattttgagatattgattggaattgcgtttggacgccaactgcgtaagttggtactcaaagtttactctggggattggttcaaatttcctacaagtttgtataactccgaaactctagagaccttggaactctaccattgcattcttatagatgtcccttttccggtttgtctcaagtcccttagaactctaaaccttcacgaagtggagtttgtaaacgatgaatcagttgttaaccttttagctggttgtattagcctggaaaatttggtgattcatcaaactacagatcttaatgtgaagacttttactattgcggtaccatccttgcagaggttaacagttattgttgagtattatgaagagttttctgtctttgtggtaaatactccatctttgaaatacttgaagattgaaggtattattgtagatgataggacttgtataattgagaatacacctgagctggtggaggcaagtattattgatgtgtcttttaaagtctttgagagcattcttggatcccttgcttcagtccaacgtctttccttgaaggtttcactcgtggaggtaaggttttcctgtgattaaatccagttattagttattgcattgtttctctactaatattgcctttcatgtatagattttttcacttcctcctatcagtaataccttttatcacttgacatatttggagctatccacatataaacctaagtggtggaatctgcttacgctcatgctcgacacttctcctaatttacaagtcctcaagatcttcgatttcatgacagtaagttcatctttcaacaatgtttccagctcagttttgcggtttaatgatctaatttatgtgatttattttgtgtttcctcctcgttagtctcaggaacagaggccttgggagaaatggaatgaaccgaagaatgttcctgaatgtttgttgctccacctcgaaacatttgtgtggacatgttatgaagggaaactagaaaatgagatagagctggcgaaatatatcctaaggaacgctaggcgtttgaaaaaggcaactttctccataattgaaattaatccggacaagagagttgagatggttggtgagctcaaaagcgtggtcagggcttcaaattcatgtcagcttgtgttcatatgaaacttatatgtttgtgagaatcttttgttatctttagtgttctgttattttaactgattaggaaagaccagtcaaattttccgacttagttgagagtttaatgtttgtaaccaaattttaagctaaggcgtttttttgtgaagagattgttgtttggattttgaataattttccggtacattaaaaccgaaattaagcaaaatcgaaattgagggatgttttggttttcatccggtttgtatcggtaaataaatatctcatccggcccgagtaaaaaggtaattgtagaaaatgactcactcagctccgcctcctctgaaaccctaacttacgctgtaaattctcttagtggtcgaaactccgatttgagttgattctttctctaatgctttggagttgaaacggcgtttgcgtctctatcaacgaaaatgaaacgatggtatgtttttatgaacaattgttttctctctgaatcctatcaactgttctagggttctcttaaattgttagttccaaaccaattgattcatgttttttttgggtatttgaaagtttgagaaatggaaatggtgtgaatgaagacaggatcagtgacttgcccgaagctctgcttctgcagatattgtctatgcttccagtaaaagatgttgttaccactagtgttttgtctaaaccatggaggtctctctggaagttggtacctacactcaagtttgattatgaaaacaatcaaagtgaagatgagacatactcagagattgtttgcaggcttttgctttccaataaagctccttttcttgagagtttgcatctcggattcaggtttggcgaatgtcgttcggtggaagttggaatgtggattggaattgcatacgcacgccatgtgcgtgatttggtactccatgttgaatctgtgaaagggtctttcatatttcctacaggcttgtataactgtgaaacactagagagcttgacactgaggagttgggtactcgttgatgtcccttctccggcttgtctcaagtctcttagaactctgcgtcttgagaatgtggattacaaatacgatgattcggtttataaccttttatctggctgccctaatcttgaaaatttggttgtgtatcgaggaaatctactggaagtggagactttcactattgcagtgccatctttacagagactaacaatttatgatgacaatgatggagaatactgtacgggctatgtgataaatgctccttcattgaagtacttgaagattgatgggtttaaggctctcgagtcttgtctgattgagaacgcaccggagttggtggaggcaactattatgaatgtctctaagataatcaatgagaagcttttggaaaccctcacttcagtcaaacgtctttccttggctttatcacccttggagttaaagttttcttgcaataattattcgggtcacttgttgttatgacattgtttttgtgctaatattgcctcatgtataatcagattaagtttccaactggtagcttcttctatcagttggtatctttggagctatatacaaataaagcagagtggtggaatctacttgtgctcatgctcgatagttctcctaaattgcaagtcctcaagctcatcggcgtaagcaatgttcatctgtcagcaaattttacgaattggttttaaattttgtgattgatctaataatagcatacattgtgttcccccttcgttggtctcagaaattgtctggtgaaaacaatcatttagccagtatgaattgggatcaaccaaagaatattcctggatgtttgttgtttaatctcgagacattcatgtggaaaggctgcaaaaggataggagaagatgaaaaagaggtggcgaaatacatcctaaggaacacaaatcgtttgaagagggcgactttcaccagagaaatctatgaagagaacaattctcaagacatgtttgagaatcttgaaatggtggaggaattggaaagtgtggtcagagcttcaaagtcatgcaagcttgcgttcgaaactagcttgtggtcactatcctaatatataagtacagtagtgtcttttaattatctgtttattaataggagaagtagtgtctccactttctactttccacttaccactttctaacttccttgtttctaggatcaagtttgcttctgttttgtatttaaagacgttcacgtcaagaagagaatgttataactgaaaatttgttttaaagaatcttgtgttgttcttatgagcaattctctttggctttaatgagtgatcaaaattaacattgattgttaacataatatttttggtaatttgtatactaaacatagttgaaactaaataaaaatgactaaaaactaaacataattccgaatttcccgaatttaagttttggagtgcaccaaatcttacagaaatccaaaggtttaaaaacgattaatttttgctaacaaacccaaatcaaggaattaactaagcactaagaatttcactatatcaaaccgaaatttatcccttctaaaccgaaccagaataataatacgtgacttttcttagattgaggaaaaattatgaatataaaatgcatgatagacaatattttaattatttatctttttatcccatttctccaaaataaatcttaaaaccaacataaccaaattttaattgaataatgtttttcttttatatttcagcttaaccgaatagttttttttgtgtcaaatttaaccggatagtttattcggttcttaatcttcataagtaaacggtatgacgaaccgcaactatacattcggtttaaagacgcaaagttttggtttgacttgtctgttcgtctctctcaatcctgtgattactctctttgacgttaagagttaatacttaaatactgtgattactctctttgacttgtctcttcgtttttctcaataccttgaatattgtattcatctcttcttgacaatgtctcttagtattcatggattcttgttctatataagtttatgtattccagttatattctctgaaaccctaacgttagaactgtttttgtctcctcaccgcagccgatattcacagcggtcgaacttatttgtcctccttaacgcagctggatttgatgaccattaggaattcagttgttctctatcgaagagctatcgtttgcagtgttgcgatgcgtctgcgattataaatgcgatagtactcggaaggtattgattaagaggagattttgattcacttcgtttgttgtcggtgacaatgaatcgagggtatgtttcttctatgtgtgcttacttaattctatgaactgttcttagggtttctttaacaccctttcgtttcttgaattaggggcttttctctttacagcaaaagttgtggtcaaagtttgagtaatgaggacaggatcagtgagttgcctgaagctttgcttctgcagatattgtctttacttccaacaaaaaaagtagtagccatgagtgtcttgtctaaacgatggaggtctctttggaagatgttgcctcggcttaagtttgatgattggatgtttcctgataatgtcaacaggtgtttgctttcacatcaagcttcgtttctacagagtttgcatcttgtaatagattatgattttgtgtctcatatgcatactgggatattgatgggaattgcgtttggacgccatatacgtgagctggtactctatgttaatggctttcaagagtcctttacatttcctttaagcttgtgtaactgcgaatcactagagacattgacactcggtcataacgttcttatagatgtcccttctccggtttttttgaagtctcttagaactctacacctagatggggttgagtacacagacgatgaatcagttgttaaccttttatctggttgtattagcctggaaaatttggtggtccatcgagttatacaagctgatgtgacaactttcactattgcggtgccatccttgaagaggctaacacttactactgaatttgatgatgatgaagactcagtctatgtgataaatgctccttctttgaaatacttgaagattttaggtgacaaggcttatctgattgagaattcacctgagttggtggaggtaagtctgacagataggcaagttactgtggatggttatcccatcgcttcatacgttgagaaccttcttagatctcttacttcagtcaaacgcatgtctttgaagatatcatcatacttagaggtaagcatttcttgcaattatattgattcagttttacgttgttgttattagtacattgtaactttcctaattctgttgtctcatgcatagattaagtttccaactggtagcatcttctatcagttggtatctttggagctatatacaaataaagcagagtggtggaatctgcttgtgttgatgctcgatagttctcctaaattgcaagtcctcaagctcaacggtgtaagcaatgttcatctttcaccgatttttccaagttggtttgaaattttgtgatggatttaataatagcattgattgtgtttccccttcgttggtcttagaaattgtctggtgaaaacaatcatttagccagtatgaattgggatcaaccaaagaatattcctggatgtttgttgtttaatctcgagacattcatttggaaaggctgcaaaaggataggagaagatgaaaaagaggtggcgaaatacatcctaaggaacacaaatcgtttgaagagggcgactttcaccagagaaatctatgaagagaacaattctcaagacatgtttgagaatcttgaaatggtggaggaattggaaagtgtggtcagagcttcaaagtcatgcaagcttgtgttcgaatctaccttgtggtcactatccaattatgatgtttaattggatacgagttctagtatatagcctttgtctgaccgtttgataatgcaaatttccgaacatcatatgtatttgatcaggtgatactattttgggttttgtgaagaggttttggtccttttggagaagcttttagtggaaactataatacagtagataaattttattttgtacttttgcagctcctatacaaaagaaaggagaaaaaaatatcgacaaaaatatttatagttttatcggagatggaataaaccaaaacatgtgcatgagtgtttgttgctccgtctcgagacattagtgtggacagattacgaagggctaataaaagagaacaaagaggtggcgaaatacatcctaataaggaatactagtcgtttgaaaaaggcaactcttaacgttgtaaatcaacgatttttgctgacttttcattttcgccctcgcttgtctcagaacacgttttggaatttcgatcttgtggctcttcaccaatggattagaccaaagaatgttcctgaatgcttgttgcttcatctcgaaacattcatgtgggaagactacgaatgggaacgagatgaggttgaagtggctaaatacattttaaagaactcaaatcatttgaagagagctattttctcatcctcattaagcatatgttctgaaggtaggcttgtgctgatcaatggttttaaaagtgttgtcaaggcttcagttgtagagagttctaaactcaagagttcatttagatggatgtaataataatgcagtggatattggaatcttgattggacttgagtttttgatgcaattgtagctacacatatttggaggagtaggagtctaagaatggtaaaaaatagagaagtagtcaaaaagcttcttgccactaacacatcatatgagtttccccacagtttcactctaaacctcaattagtttaatatgaagaatttaaaaaccaataaaatcaaatgcggttagctgtggaggaaggtacagtcggagggcttagaagcttcttgacattgttaaatcttcttcttattttcaatcctactgcttcttgcctctttactttctgctccttaatcaattgaacataaaaacgttagtgctttagatatatttgtggttgtaatcaaatttatggttacaaccacaactagtaaaactacttcatattcgcactcaaaatgtaaacagaaaacacaatgttgcatgcatatgaagtttttcaaaattcatatatatatataccttgttttcgtctgatatgttcttgttccgttgcaaatcatcaacgactacacatataacaattgtattagtattaatcaaatgtagtttagttcctacccaaaaatatattaaacactagatattgaacagaatatgttattcgtcaatagtatagagatttttggccaaaaagtataccaaaaatgtatatatagattagtttacaaacgaacttaactgtcatcattaggatttctagggaaaacacaataaattcgaaaactcggagattcaggtgaatgttttagctcgtctcctttctcttgtccatcatctttccattcattttcctcctctttactactcgttgtattttcaccattggttttggaacttttactatcggtagatatctcaagaatctctttatcggatatgaaactatcagcagtttcgctatctttaccgatagatcctagccgagatccttcttgtcgtccttcatctgtctccggccttgaaacaccacaacccatgttgtaggaaaagccggagcaaagtcaaaaagacaacaaaaaatgttgaccaaaggaaaagtagttagaggaagataacgtccattgatcgcactagaaaaaaaaagagagtccaatcttttttttaattaccaaacacaacaaaacaaccacgaattgtatgggagattcttaacctctgaattgtctcttaactaaaattagagagaaccaaaaacatacctctttagcaaagtttgttatttcgtccatatcttttcatagcaaaaaccattaatccatcatcattacaagatagaacaaccctaaactttttaggttcacacaaaacggagagtttttttgagtaaaccgatttagataattaaaacagagcagtacatcctctggagctcctcatataaaccaaatgagtggccggtttggtttggttttgcatgtgttcaatatatcttagataacaagaaatttttactagttttgttttatagttcttgttcagataaatctagtcttgtaacatacactctcaccagtttttacaaaactttagttacgtgtaatgattttgaataataccatgagaatattgttttcaatttagaggtgtagtccggtttaacctaactagaaacaactcaataatacagaacacaaagtactaactatgccaaggtcccaaggagtttatgtcctctccaatacctgattagcatcaagcgatttttttctaacatttattttctcattttcttacaaagtgagtattttactagttactaaattagttttgagaaattttatttttgtgttcctaaaacatatttttctcctttataattttctatactaatttcgatacaaaataatgacttttttgaaagaataaaattttttatgtgtatttgagattttgatataatcgtattttcttttgaacgacaagaaaataatgttgaaaataaaaaacagaagtaacagagccaattaatgaatgagttagggaaggagaagcagagcaatcggcgcattaatggcgaaaaacaaatgccattaattctccttcttccccactcatttattgctcctctctcttctctctctctctgactctttctttcttttttttttgttctacgtgcaattcagaaacattgatttcatgtcaggtcgtaaaattcaaaaaagtcaaatttacacgacgaacatacagaaacccatgacctgatttgattttacccatttctctaatctctctattatcaaatccttaacatgggtttatctaaagacacaacctttaatcatgggtttgatccagattttgtttctaatcctaatttggtaatgacttcttctcttggcttccatttcccagctcccttgtgatgaacggtgatgaattagggttagggttaggttttggtggaggagctgaacaaactgggatcactgatctgatgtgaactgctggagctagtttctgatggtttaacacaaaacttggaaagggtaagagcttactataacagtttctctccactgatgatgataatggtgatggtgatgatgttttgattctcatctctggcttaggatcatctaggctctgtttcttctctgcatattcttgacatttctctagcaatgatttgactttggattgttcttgtgtgagatttgttcttgaaggccagaatctctgtggtggtggtgatgatgatgaagcttcattggtatatagattgatggatctgagtttctcacacaacaagtctcctgtggttgttgttgttgttgttgtgttttggcgaattgttctgatgactgttcttcttcttgactggtttggttctcttcttttcacttctttgggtctaaatcttgagaggactcttgcaactatctcttgttccttctcttcacctctcaatgggtccaatcttggcactgtgtatgtagcaaagggtgaatgagagagataacaaaccaataagatttgagtaaaaagtttggagtttggaggtactttttctcaaggagaaccaagctgcaatggctgcattcttctcagcttgtttcttagtctttgctgattctccattaaaactcattccagcaagctccacagtacaagagaatgttgggatgtgaccaggtcctgatctcacacttgtgtaaaccggtagatcaagaccagctctgtgtgctgtctcttgaagcagattcttgtagatcccagtctcatcctcagagaaacaaccaaacattattagacttcgcaaaaaaaaatgattcaaacatgagaaagaactttgcatgctttagaggagattaagacttactagaactctagcagttagagactttgaaggacctttggaagagagagcactaagagcaacttcagcagctgaatgctcagcttgtctgagagtagaacagtaagttgggctttcaaatatctcaccattgaagtttacactagctttgaatcttggagcatgatctggtccttctcttgtgcatgtatatgatgggagactgaaacaactcctctgtgcaagctcttgcaactgattcttatacatcttttggtatgtgacaaaaagcagagagattgaggaaaagagtaaaggcagcagaatttgaaactccaactttatcctaaaactgaaaagctgttgagggtttaaagagaagacaaaggaaacccacctgcttaaattggtatttaagatttggtgtctcttaatatataaacagaggagcttgtctccatcatgtgatatggaccttaagactctacagtgttcaagaaagagagagaagtagcaaaactacaagaaactcacttggttaaattgccgttgaaggtttttggtgtaatgagtaaaaaaaaaagcttagggctctctgatgttgaaagtgaatttagaagacagaaagataaagatgaaaagaatagtttcagagggtttagagctctctcacatggtggttctatcacaagtaaggttcctaataaagaggagcagaggctactaaatgataatagtgacatttcaattgaactatggtccatgttatataaatatattagttttatatataacactgatgaaaatcttatcgactctctttaagatcctgtctttatgatctgatgtttgtgtgacaagcttagattttcagaaaatttaacttaaactctataattcaaggctttaattattgatttggacatttttcttgactatatctttgactcagcagagaccttaacacactcatcttctgtaaccttgtcctatcaaacaaaaacaaatttaaattaatttagaggcaaaataaattaaacattagggctcttctgcattaagtgcagagccatgcttcaatgaacaactatataaatgttctgtcttttggtccacatgtcttgataattctgtttcagcttcttgataaaataacacagaaacttttttgtttatatatcaacttttttctcctctaccttaaaaaaaacagaaatctctggttaaatgtattaacacaactaaaagaaaagaagaagaaaacaaatccagaagaaagctcactcatacaaacaacacaccaattcaacctttgctttaccacaacaaagcccaacacaaacactttccacattaagaacattagcaagttctgctttccctccataaaccacaaaccacaagactgattataagctgaataatcccagaaaaaaaatacacatttgaaaaagaaaagaaaaagaaactcccctcagattttctctaaacctgtattcaccataccgaacttcggctatgttctttcttccttcggtgctaaaccatgtaatcaattatgtaggccggttctccgtcactaaaccgcttccgctgctgctacctccgccgttctggttttgttctcctactctggctgctaaggccataacttctggtgacatgtcccagcttccgcttttccttccccagcttgagcgtctcgggtgcatacttggcctatcactctgttcatcaactgttgccctaatgtctggagatagctcgcctaactcaccgtccttaacatgtaaccgctcattgttaccatgtttaccgtcaccat

SEQ ID NO: 470 - DNA, 73686 bp, Arabidopsis thaliana
gatctgacattgctggacccatgtctgcccaaacagccttccttcccatttcaatctcatcattggctttacccatgtttggactcataaaaccacctgctacagatctaggaggtaatggaggttcacgctggaccatagctctaaagtcgttctttgaaggagggattgtggaaaaaaatgtttctttgaagttattaaccactcccttgttatgtgggttgcttcgccgatcatatctgtatcggaaattctcgtatgtagtctgcaagaacaaagataaatcaatggttacagagataccgtgattccttaagagagggtggggattggatggtcgcaacatacctggttcgtgctgatgagatataaatggaaaactgttaagccaccaacaaaccacattgatatgaatgtgtatattattagaacaatggaggcaggagttttaagcattgccttccaagtggttgtgtgctctgattccataatctttcttatatagacccagcagaaggcaaacacatatatacatagaagggtcgtggagaagacgaacatgaagaagaatcggtagttcctctgcaacaaccatcagaatatgagatgatatttaggaaactatggtttatgtggatagcttaaagacgggatcagttggattttgacttaccatcccaatacattggccgacccaagggcagtgatggtcaaacctttctacgcagttgttgcaaattgagcaatgcgagcagcgaggcggcctatagagcatgcaagtgtcacagtacttgaccttaaatgtgattccattaagctgtacttccttaatgcgaggcaatcgcagctgcggagtctggccagcccctgcatccatgtttccatcaagggtttcaggctctggaggatgagcatttcttgggataatacctggatctcttccggatgtaagcagcagaagaattaaatcctgaagaaagaaacggaatcataagggaatacaaaataaaagcatcagctacagaatattatagagaccatctgctatgcaatgcgagaaaaaactatacatacataaatggtgaacacgacggcgacagctactattgagactccccagctatcggagaagtcatcaattagcttccttgcgacaaagatgcagaaaattgtaacagggacagcaatgagacaaatggtcagcgccagtgatctaacatctggcccaaatacaaaccttccctgaagaaagaatatctgcaaaataaaacgcgaaaataaacagcccggtagagaaactttcgagaacaaagtattccccaaaaacaagaatcatccaggaaaacaatacaccagcgatgaattcagtacatcacacaacacatgtcttaatcagtactcagagtaagtaatcattgaagaagtattcagattctctagctgatgtcttaaggcaacacagagagaaggttattgaaaacctccttatacacaagtatctactatatatatatgtgtaatctcaaattacaaaacctttctgtccaaagtaactcaatctatcattgagctatatttagataaagttaaaatgccttgtccagcttaaaacgatccaaagggtattcaccacaaaagcaacctatgaaaacgacaccaaaacctaggattcacaaaaacgcaatagctagattctcctaaagacttaataaagttccaattttgaactaggttgaaattgaaaacatagcagctaatctaaagtcccatttaatagacttagcaaaaactaaaaaaatgggaaggaagagtaatgaagcatctatagctcaaagaagaacaaaaaagagaaaaaaaaaactcacattgctgcctttccaagtttggtaaacccttaaatcaccattggatccagaatcagatcgctgaggcggaggcactacatacatctctcaacctcaatttcttcttcttctacttcaatctctctctctctcacgacggcgtcaccaagagctgagctttaaaaacccgtttcgaagatgaagaaagagaagggtaagtagtctccggcaaaaggataattcagatttccggcgaagtaagccgacaagggcacgagtaagccagcgaaaaagaagggtttttttttttttgtgtgttagcctctcttctcttcttcccccaatttcaatggtgggttctcttcccccactttttttttttttgtcttctcaaacaaaaacattttaatataaccaaaaagaaagaaactgtgtgtgaccgtcgtttttttagtttatctttcttattttgacagaagctgacgtgtctttatttcattggtttgtcacttagtaaccgcggtcaaaaattttgtttcttaatagtgattatcttttgaaatctcgaggagaaaaaggtcgaaagaaaaatatgatgacaggcaacatatgggttatgatgatggactcaaccttctctaaaacaaaaatattcttttgagccttgaaaatctgaattcacacaagtgggcctaactatataaatatgttcattcaacttttaaatacatttttcataacacaaaaaagtttacgtgtacaacaattccgatgtaaaaatcacaaagtggttgtagaacgcttctggttccaataaggatggtagatatgttataatgctatctgactaaagtttcaagtttgcagaatgttaagcgttatatgaatatgatccatatgaatccagtggcagcgttatatggatgttggggagtcatgataccggtgttggaggctgtgaagaaggaatatctatatggaaaacaagtcgctatataaacaatcatgttttctacaactaaaaaaaatttgtatgatttgcgatgtaacagatggatcgcaactaataatttttgaagaacttattgtagtttcatcaaaaaggcgatagtaaaaaaaagaagatcaaagatgaaaacgaataaaaaaagtaacagaattatttctctggtagcatataagtcctacctatcgaaagaagcaacgtgcgattttactttttcgattattttgttttacctaaatattggttgtatgtgtatgtttattgataaccatgtaatttttgattcaatataataaaattaaatattaaaaaaaatgaaatgaaaaagtttacgtccaaaatattaatttttttgttatgaaacaaaatcttaatcgaattaaataaaccgaagttattgaagcagatgaaatttgtaagaaatcaatttgatgttagtacatatataaaaacaaacataaatctagtattaactaaattgccatgtttaaatgttttaacaaaatttggtttctaacaatagtctcaccaaacaaacttaaccaaatataacttgaaaaacaagttaataaaaatttacttcactttcatggagtcggagttggtggcgtagcccctctcctattcataccggcccaagtacgagcatcatccacgattaccctccttctctcaatagcttcttcactagttacgtattcttcttcttcttctaacatcctcatcattgtctcatccggtgacctcgatgtccccgccccatccttatttcctcctagtagtctacgcctagttctcctttccttcctaattgtgtgatcaatgatatacttaagacactccacgacttggctgatcgatggtctagcgtttgcttcttctgctaggcacagaaaggccacttcaatacctctataaagaagtatattcgaaaaaccgccttttcttgctaaccttggatctacaatctgccttattctgccattcaagaacaacggtcgtgcctgttaagaaaaaaaaaaagaaacacatgaacatgtcgtcatcaaaatcggaacattcattagtctaatacgtatccacacatcattaagggccataacacgaaactctttttcatcagcataaccaaaatcaaaacctatatatggttaaaggtcaatagtaaaaccactaccatttttacgaaaaatcaaaattgatagcatatggtttaatggttaattgattaatctaaaccctaaaccctaaatcgtaaacggtataattatgcaaaatcgaccaaaaggtcaccatcaaaacaatttttctcttaagcaaaattggaatttagatagatataatctggttatatagtctaaaagaagcaaagcctataaatggtcataaggaaaaaactaatccatccttaagcaaaataaggttgagaggattacccaatgcacaagatagcgactttgattaccaacgcattcggatgagggcataagagctttgcgtccactgataagctccagcagcacaactccaaagctataaatatcagatttcagcgtcaacttcccggtgttcgcgtactctggtgcacaatacccatgagttcccataactctagtagagacatgagacatatcatcacttggaccaaactttgcaagtccaaaatctgagagcttaggtttatagtcatgatccaacaatatgtttgaagttttcaaatctctgtatatcacaggaggttgtgcttcgttgtgaagaaacgctaaccctttagccgctcctagagctatcttcatccttgtcttccaatctaaagcctcttgaccctcgctaagatctgacaaaacaacacaagaatttaaaaaactttaatgaatctcgttcttgaaaatttcttggtttgagtgtagttttttttttaccgtagagatgatcttctacagatccaagaggcatgtattcatagacaacgagtctttgatcgccttcagcacaataaccgaacaaatgcactaggtttcggtggtgcaagagcgagagcattaggacttccacaagaaactctttgtctccttgaataccagactgatcaagcattttaacagctatgttcttgaattaagaccaacaacaaagcacaatgacaaacagttagagatttcacaacgacaagattattgatttgattagtccaaatgttaataatagattacctgtccagtgcttagccttcctttatacacagttccaaatccacctcttccgatcaaagattcattcctgaagctgttagtcgcgatggcgagttctctgtatgagaaaatctgacatctgtatctagaagaatcttgcactacggtttgtgaacttgacgaatctacttcttttgctgttccagctggttgggctacagaggaacaaaacaacacaatgagagactatatcacatatgttattggatcacaagtagattaaaaagacatttatcagccaaatacacaaatctttgaactataaaacacaaaccctaagccgggatttgtacgatccgtataaactaatcacaagacaaatactatatgtatcattaataaataagctatttaaaagaaaagggagattttatcatgatttactactaatgactggtattaaagatgactaatctcaagattaatctataaataataataaaaagatcaaagggaagtgagaggaaccagaagaggaggatgtctggttacgtatggatctcttatgagatttgtctttgagcttcgttttccgactgggacgaaaacacaagcaactaaccatgttttcttttaatcaatctcaaggaaaataatctttttgttgttggtgtcactcaataaacaaagatatacacacacatacactctctatatggtttatcaatagggctcaagagatgatcacacacgaggacaaagaactaacggttttgttatcaaaaagatgaaaactttgaaggaatcagacgaaccccaagaaacacacgatcaacagagattcgagttttgggaataattttccatcaaaaattgattacaaaaaaacacgagaaatttgtgaggtgataaggaaggagatttagattaaaatcgagagttttcgtaaaattttgggggatttagataagatttggttgaaggggttttgataggaaggaaagacacgtaatcaacaaaagagagcatgggggtgcaatatatatggtacgttactcaccaattgcttctatgagataaaatcatttattgttttattatgccattgagggtaataatctacaatgttaattgttttatagtaagtttctcctttatatccctggaatttataattgtgataaatgttggattctgaatttaaactaatttttaagacaaaaattagaaaataatcctcacgttaagtatttctaaattctaatagtgatatattagatgataactatgtttgttatgcattcaaaaaaggcccaaaactatagacgtaacgacaaaaaaattatcaacgtttttgaaattcattgaagaattttttttgttggttggttttggtgcaaaataatttttaagtgtattgcaaaaaccgcagagaataacaaaattttgataaacaaattcatgtaacgtgagctacaagtattaaagattcccagtctaaaactcaataatttttaacagacgatgaaaacggcaagatgcttttccctatgtttaacctcaaaattaaaaggaacgctgataatggtaaaatttaggccaatatatccatgcaatgtaagttaaaagattttatcaaagattctctgtctgagacataagacagttccgaaccaaatttggaaacacattcaacttctatttcacattattcaatatacgataatgataattatcggaactttttttttatggtttctatggattttatgactccattcttatcattttgtgcataaaagtctagtaattaacaaaactaaagaaagaggagagggaaacagtattaacaagtattaattatacgaacgtatacacatttgattcttggttgtgttcttctctagctccactatgaggttcaaattcaaaagttgtttttgatttagccaagactttaaagaagccttggccgagattttatgacgacagataacggtcaataatgatggttaacgttgttgatcggtttttacgatcggttaaggttctgacattagtacaatatgtaatgtaaatcatgtgatgtgagtcatggagccataccactcttaaaatttggagattgtatggtagtacgtagaataaaaagtatggtagacagtacatgattatgaatgaatcatgacgttctcaaatctttttgtaatcagattttatttccatcacaattatttatttttagtcattacaaaagtttacaccaaaatagcaattgttacctttaaaatgcatattttacaagaactacttacataattagttttgtccatcttaaactagctctcacctatacctgaacctacttgcaatgttagtagcaaatttctaacgacgagaataataataatgaaattaacaatctgcaagtggtagtaaattgaagtttcactaaccgagaatcaatttttgtattaggaaaagtttgattccacgagatgatgttccatctttaatgtctgacaccagctttattcctctcttaatcttactttgtttctaataaacaccagaagtcttctcttacttatagctggatatatttgacttcggtttaattagttagttcggtttgggtttagttatttagacctggtaagaaagccggttcaatttaagaagggagtagtaaaaccatatattgaaccaagaggccagctagttactcgtaggcctgggcgttcggtttgcttaattcggtttgggtccggttatttagaacaaaaagtttgatatggccggttcaattaaagaaggggaagtagatttgaagaataaaaccagtgagtccatttataaccaagagtccagaatctttttcaagaagtcattatatgattgttacagtgcttacgtactctttcttggcgctacaataggcgtggaaccggtcttcgttaaccgtaccaaacccggaaagctcaatgccgaaagctgcaagcctacgagtgtcccgtgggatgggcgattgccatataccgtcccaccaaccaggaggtgcaagcggcgtgaaggcgcattggtttggctgttttggacagcttaacggtccagcgtatcggttccagacatgtccccaacctacctggttcttcagaccatctgctaacaaattgctctggaaactactcaggaacgcaaagcttgagttgctcgaaccatcctctgtgaattaaccagtcaaggagtactgttaatgagacagatcagaaggaaagaaaaataagtgttgaggaaactaaaaaacgatcttaactgagactgtttgccgcggctaatgcagcaaccaactgagcataagtagtcccaactcgcctgttagcaccggagatcaccgcatgtttagcacggcacgcgaggaagaaatctacaaatgcaacccacctcggtgcaggaccccaatcctttattctgaaatctaacattggtaaaccgcggccacgttgagcgatatcacctcggaaaagcttatagtcaaaatgtagaacctgaaaaccattgcaacttacttagtccgccaatggaattgaataaatcattgggaagattagagaaagtgcaagtttaatagatcattgatacctctgcaatggtgctgatatttgttttgataattttcactacagatggagtgtcagacactataaccactctcgggttcggtatgccaagtctgttaattgctttccctagacagtttatcgctgcacgcataggtctaacagatctggagaaaaacatgaaaggaagacttagtcaacaagctcaacaactaaaaaaacaaacctagatgcacgttttaacatacttgctcatcaacattcgcatgtgcactgaaatatcaggatccccagtctcgtgtagaacccagtccactgcttctttaacatcttttgtgggagatatgagactcatcatcaactctccaaacacattacctcgtggtgccgagtttccttgctctccaaatagctcaaatgcagcagctctcatctcaggatgcacattcttgaggaaaaactgagctgccacagcgtctgtcgtgccttgaaacctgaaaaccaaatgctcgactcagtaatgattataactttcacaaaatgaattcaaagttgtatcttctgtactttcttttcttcaactgaccatataatagcttcttcccacttcttccaattactgcatagaacattactcttagccggtttctcgaaatcatccaatctcataacaagccgccttttgtatttcttcacgcagccattttgtcgccacagatgcttgacttcactcattgtaaacgtagcatttgagtaagcaatgtaatcaccaaaaggatacttccccctgaggatacccagagaaagaaagaaatataaacaagacaaataacacaaactacaacaagcatagtaacagttcagttaatatagagaaaaaggattgagaaagaaccaatatatgcctggtctggccaatgatcaaggatctgtttaacattatgctcaatgctgctgatgttaagatcttatacatttcgtttccaaatccagcttctgctgttttccctagaacataaccatgtctacaaaattgctccggaggcagctcacggatcgctgaagctcctataaaccacaataaccacatcgacattgattcatcgtaaacacctccgcttatataagagtcgattcaaaaacaaaatatctcaccattgatttgaaaatggcgatggataacatctcgaactctgagactttgatctacgaaaccaccatcgaattcgcttcccatttcttctaccgtcgcgcagagtttagctccatcgaccatagcctctccaatcgaagaagagttgctccatctcgaagcctcctcggattcggactcgtcatcgtcgtcgtcgatgaaagacgaattaggatctacggaacggagcgtgagcaacaacaaaccaaaaccgatgaagaaaaccacagatgataagagaatcgtcttcccgaacaaccgcttccgtcttgttccaccgcgtttcatctcttcctcatcgtttcttttctccgaaactcgaacaagtgtagagtttcttacatcagagctttggatgcgattgacacggtgccgttttggattcgttcgtgtcggtggccgttaaactacgtcaaacggtatcgtattaacactaaactgggcctaactaactatatctattaaaagcccatcaagttggtaggcgtcgttttctgtttttggtgcactggtggtggttcatccacatgaccacatctaaatataatcatcattttaataaaattacaaagaaaactaatcttttcgtataagaagatattcatttgaggaaatttaaaaccccccaaaccaataacacaatattttaataagaatgtaaaaatccgtaacccaagaatagttgaatctcaaaattatagttgtttcaacttagcctatttaacttcaaattatagttgtttcaactagactattttggtgaatcatgtacaagttatcttatatattattgtttgtaataatatacatccaatatattaaaaacttatagttgttttaatcattaaaatttttaaattttctagaattaaaaacttagggctaaatcactataatataattgagttactctctaatatacactttttgtatgtcaccattgacgtatccatgagtttatctaagtagtaagaagattgaatttcattttaagttttatttgttagttaaacaatgtttttttgtgtagtttaacataacatctcaacgaaaatttaactctaaaaatttgttttgttagtcaacttaactacgtgacatattgggtaaagtcaacaaaatgagcgattaaaaatgcgaagtcaattaaaaatatgattaaaataaaaagttaatgaaaattagcgcattattttactcgagataaagttaaaactttttatgctattttttacaattaaagatttttttgacattttctccaaatatacgtatgcgtaaacttatgacgacataactagatgcaactttatttatatattataaatcaataaaatatttacacagattgatatactaaatttgctgtagaaatatgaattatcagtctaacgaaaacaggtgacctggtaactcgtgctttaaaactagtaacagtcgtgcaatttttccggacgttttaggagaaattgtgtaaatttgttcgtaaaattttggtgtgttttctagcattcgccaaaattttcctctgttcattacgttgtgaaataaaaagtgattcattttccttatttttcatactaatagtttacagcatacgaaataaaaattcaaattttgtttttaaccaaagccaatggtcgagaacaagacgaaagacatatatatatatttgagtagaaagcaaacagagagtttcaataatagtgaatgataatttgtagttctaaaaaccttatttcttgccacacaaggcaagatccctcttgaacggtctgaaattcaaagcattgaatccataaacacaggaattagactgttgagacttaaacaagacctgatccgtagtggttctataaccaggaatgttgcaagaagaatcggagaagttttttcttccaatcaaactcgcttgacaagaactcgcgagactgtccacatcagcacaatctagagaagatatggctaccttgtacagtccaaactcgttggtggttctgtttgcagagaatgttatagtctctgtcgttgttgacgaagctgctttgaatcggcagactatcctcacttccacacctgtgtaaagaaacgttaagaaacagagtttttgcagggaattaattaaagagatctttttgttctgagttactaccggacatgaagtaactgtgtttagagaaactgtttttggagcaaacatcgcagtaaacaaaacccattatagtgatttctgcatctggttttggtttgggtgatgaatgctttgaagatagagagtttacgagcagaaattgcagaagtataaaaagaaacattgtcagtgatttcttcgtcatcttaagcacaacaagtttcaagtttggtttatttgatatttatgtaagaattggagaatatgtgtgtgaagaaagaagaaatatagggaactagttttcagacaagaatagaactctcttgaaagagcttcgtggttcctttctatatatagagagagttatacaaacgtgtcttttaaaaataggcttggatacgaaacggatatttttactattcattttgtttttcatagttacaatattcgaatcggattaaagtaaataccatatcgaagagaaagtgatgggagtacaaagaaaggtgcatttggagtgaagattataaatgagagccagaggagaggaatagaattaaaggcgaaacaagacaagatagtggagagacactaagtgaaagtgaaggttataaatgagagaattaagtgggagacagtgataagttaggtgaaaggacatttattgagatctcatgctctctgtttcttttggaggtttgtatctacctacatccccaaaacattggctttgtggaagtggaaaatgatgagaaaggtatggaccatatagtaacatatcaaagtgtttgccactcaagaaccaaactgcaaacgtttagtactcgttttcactgtaggtaatggactggataaagatgtttggatacagttttgggcggatcctgatagagaaaaaaaccaggtctaaaatgtactaaagattgacaaaaccatacaagatatgttacagagatacttgaattagttcgcggtaacaaaactcttatctttataaaggatgctccaaacaagagtttttccatcacagctcaagagaaacaactctaatagactagctttataacgccatagatgaaggtttctttgaacttgtgaagaaaatgtcgaatatgaagcggtagtttatgtttatatggtcttttagcaaataccacagagaatcaaaacttaactctttcagattttttgacttgggacttgttgttgttctcacattatggtacatgagcaaaagcttctctgtggggcttcttccttttcgatttttttctctgtaagagaaagaaaaaacaagatattaggctaaagaattcattccacaaacaagatttacggagataagaaagaacaagacctggtcttgcttttgttggagacagttgcacgacaacatgcattgtaatgacggatttagggagatcatcaaatggagctttacactgtgcaacagttttaccattctccaaaatcttaccagcatttatcaacttgatgtcactagctgattttggaacaatcttcttgtctacacacattcaaaacccccaaattcgattagtcaataagatacaataggaaacaaaatgagacaaattcaattttttgttgaatgcacaagactgaagagtaagatcaagaaattctactaaaaagaaccagaacagtattcgtccctatagtctctaaagacatgatttgtagtataagacaagtgattagtaatacaatcagaccaattcaaaagcctataccacaagtggagaaactgttaaaacatagatcacaagatcgagtaaccttttaaaagatcaatagtttaacttccttcttctgttcctactttaagacaaatgattagtaagtcaatcagatcctatgacttatgtctgaactttgtctatcaagccacaagtgaagaaactgaagaaaaaaaaaaatggctgaagcaaacgttctaaagccaaatctaaagcattaaagagcacttctatcgcatttttacttctttttcacggattagccgaaaaacaaaccaaaagattgtgctcggtgctaacctttaggccattcagagacaattctctccttaagcattgacactgtggcggttggagagtactgaaacgggccaacatctgaaccgtcatataaccggaatttcagttctaccaaatcttcctccggcatttgattatctctttctcccaatacaaaactctcacaagaaagatttcaccagaaagaatccacccaaatgagacctataataataagaggacagagagattctcaaattcaaagcatcaatgaaattgtcgaagcaaagaacaaaaatatttagagaagactagtaataagagcacagtcaaacttaaaggaatcaattaggaaattttcagttactgtccaaatcaagaacttggaccaaaggaacaagaagaacaataagcaaaagaaaaataaaaacttggaactcatctaagcaacctaagctcctaaaccgtcagataaagttaccacaacacacaaatcttacccggactagagacactcaatccaaatgtccaagtttgctaggttttgagtcttgggaatgaagagaatcaagaaagtaggagagaaacccttaaaagggtaaatgacctaatctcaaagtgaagctggtaaaatccagctaagagattgctgctatgtgattctatcaaagtttctgatatgtctttcgtcaggattgccgcgttacagggaatccctgacgagtaaggaaataagataaaaagacaagaaaattgtggaaaagtatgtttctttattagtcaaaagcaaagccttgtcggcgttttgaccagaagactttaaaagacgagcaacaaatcactttggtccaaatctgacttccatgtaaatttcaaagagaggaacaagaaaatttgaaaatctatagaatcttccaacaatagtaaaatctcagagcaaaacaaaggatttttatgatatgtttacagagttgaaaccttggattagacgcacaattagaaagcatacaaagcacattttaagaacataaaatcctaattatcaaaagcccattgaaactatatttaacaaaaaaaaaccaaaaaaaaaagtgaactttttgctatatgaacccctacgaacagatttacactactggcgagtgacaggtgtaataggcacagatgagttaatgccatagaaaccatcttgtccctgaaacttctggtatgaattctccgatggagcagaggttgttgaaagttgagtgagcccaggtacccaaggaccttgttcttgttgttgttgctgagtggttgcagtagaggttgctatggtgtagttgaatggtgtgtggtttactggcccgggaggctgtaacggctgcaaaaactgaggttgaagctggaatggtggtggtggtggaagcggttgtgggggtgtggaggatgatgttgttgcagtgttctgatggtgcggtgagagatacgactggtcatgattttgaagcttaggtcttttctctggtgggaaatcgacggatgatagagtttctgttacagcaggtgggttgttgtttccgatgatgccttcggaggctaaggaggagagaacataggagagcatctcggctgaggaagttgaagcagttagcttagctaccactgcagcagcagcagtttttcttgggtcttccagcgattgagttgggtttgaggcaaacataactggtgcagattgttccacatcgctgtgtgtgaagctttgtggtgctgctgcagtggatgaaactttgataacttcttttgactcttcttcttctgtagcaggaggctgtgaactaccaccatggtctagaagctgtctgcagagatcaccagttcggtctgattgaaaccgagcaatctgaaatcgtagcacaaatgaaatcaattcaactaaatagcataaagacaaggcaacattctgtttggaaaggcaaccaagaaccctaattagatttgggtctatcttccttgaacaaattcactaaacaagcttgaagctagaccagcatgtctcggaaagtactattgagaacgttatgatgtattgtgtaaattgaaatgtataaaatgtctgaggaacaaatatcacatttgttggtaagtattcaaacctgaaggtggttacggacttgctccagcttgagttcctggacacaaaaacaaaaacaaggtgaggtttctggccggtgcaatgaaagatgttgttttgaaagaaaatgtataaatgtaaacctgttcttgtaaagcttctctcaaatgtgagataagacttgttctggatgtctccattgcccctagctgttcgatgcagtctctcaatatgacatgttgtccctgcaactccttcaccaccgctggcccaggggcgtgtcctatttaaagcaatgctcaagaagtaagatagtgaaaacaacttcaaatggatgcttgaacaagaattggatcttctctatcctacaagtaaagaagtgtaatatatctacaagcagttaatataaagaccagtcccagtaatcagaaatgtagtgacaaaaattagggatccaaaattaaccaaaatgtgtagcactggttattctcgttgcggattgggggtaagtgctcttatcattaaatgatttgacacaaagatatgctgaatattcctatcaaatggtaagagccaccatgtttaaaagatgattttggcaaaaactatttggaaaaatgagagaggagcatcatggaagtaagaattggaagcgtggtagtggtttaagatcacacatagaccagatacgagattgttacgcaaattttaagatttcggttcagatacaaagggtgtgtggttaaagatagaccaaacagctgagttcttaaaacaaacgaatgtagaaaactgaagctatgtcgcttgtcacttgataagaaaaaagcatatcaatacatttgcagtaatgtagcagccaatggacggtgatacctgaactaagatctctttcaacctcttgtgttgctttctcaaggtaaccagcagcattagtagattttccaacaagagcatcctcatcaatctgaacgccgtgaagaacttcaacagcagacactactttctccagtgtggatccatttacctgtctctgaggaacagactgcagaaatgacagagttgattatgtggttagcatggaagaactcgaaagtagaaattatcacataacagtggaccgtactgagacatactggtacgaaattgcttgtacaacaaactctgacttacaagcttaagtggcacgagatttccgtttctggttccattttcaggctgtcttcccagaagttcttctttgagaatttgtccacgggatccaaaaactttcctttcttcccatatattaaccttgaagaaataattacgataattagcaatgcagttttcttgtcaaattctttaaatcacatcaataagtggcatttctatgttctctaaaatctcaaacaaagagaaattcagagagagtggtagataaaaagttaacttcacgtaccaatcggcgtgcggattttcttccaaagtcatcaccattttcaatcatatcacgaagagcatcagggagtactttccagaactcacctacaaactccgaaccctttcgcctgctattctgcaagatatcattcgcgaggtacaagtatgccaaacgttgctcacgtggggcacagtgaaactgcctaccccatgtttctacaacatgttttgctttgttcatgtgaaagatacaccaatgtgataaagctgtataacgtcaaggaaaacatacaccataatagtatacaaggcgagagaaaaacaacacatcacatgagactaatcaaagggaaactaatttacaataaaagcaagttgggagagttgagaaaattatccgtgtatatcagacaccaatatcactgaaactcaaaattggtataaactacagctcaagtaaaagaaaatcctgaggaatttagatatattctgcttgagaagagataccaatactttcatcttataccattgttactcattaacttagataccaattctgtatagtcttttccaagcacctatttaagtacttaaacaatgaaattacagagctttactacaaccaaattatgatatacagaagaggatactctctatgcttgcttgagaattgttgagcttggcaagcttctcaactaatatctgagcgttaaatgaactacccattgcttcaacaccagctcaaaaaccagtgtgccttcacaaaatctatagagaaacaaagaagatacaagtcaaaaaccctaagagtcatcaatcaaagcaatggaaaagaaaacaaaaagggtcaagctttctgacaaggaactcgtaagacgaagcgagaactagacaataggacaagtacgtgcataaacaaaactagttagtggctttagacatcaaagcttgtataaaccctaatctacgagagataaccagagaccaatttcagtagaaagcaaatacggaaaaaacaagcgcgaagaggaaattacagagagaatcaatcagaagaaggagattgttgcgatgatgctaacaattagcagtgaaggagccaacgaaaatcacggttaataaaatggcgccgttttccgataatgtctccaaaactcgccggagaagtttgagcagtttggaaataatcttcgtcgtggttagatttggatgaaccaccgggtgatttctctataactttatgggcctatatctctttattgggccaacgctcataatgttttatatgtcgttgaggtagtttaacagtcaccaacaccaacgtttctgacacggtgttgccgttattgggccaaagcccatattaagacctcaaaaagtttttacagttttttattttgggattgtaaatcagttttttttgtttctagttaatttaaaagttttcaaatccttttttactcatggcaggttaggtaatcattttgtctttgatctagcttgaagctgctgtacttagactagctgcagaacatgcagtagaaggaagctggttccatcaattcagagttgtggcaatcttttgggttttaacagaaaacaatagggatctaccttgtgtggcaagaaatagggttccttttcaaaattacaaataatctttcactgttttgactctgtttgcttactcaagaattaagatatatgcatttcgtctcttctcgaccttttggctttggttattacacaatatattagtctcaacattattagttaatacacgtttttctgtatatcccaccaatcacatgtcgaattttggatccctaactgcaaccaattgtactcaaactttgaaacctaaaatactgaattcacaaacggaattaaatcatcctgacggtagtaaaaaaaaggggtacaagtacaagtatgagttctgcgtttgaaagttattaagcttggctcattttattcaaacaattaattccttcttccatatagtcctctctattgatccagaactctggtgcgtcctgcaacatcgaatccaaattctcttaacatcataacacagactaaaatttcatgctttcgtgttaaaagagagaatagcattgaacttttctcttaccttcatgattcctgcaagaacagcacctccgaggtataccatgtgtttccttctcggtggatcttcgatccgcaatctgagtttctgattgataagaaaaacgaagataaatgttaaaaactgagctaatgactgacagtgatcatggcattatcagaatcatcttttttaccttcaagccatctttgtttccttttagaactgtgtcgagataccgatcctgtatttctttctcaagactgaaacaaacagagaataaaagacaatgaaacataaaacaatggaacttcttgctgggttatgatgaagaaaaaatatacgaaccggctaggtaatcctgggtacatggtgctacctccgcttaaaactatgtgttggtagagctgtgaaaaaagagcaaagggtttaagacagataaatgattagttttgttggatctttcttttgaaataccaagcaagcgtaagagtcacacgaaccatcatgcggttatcaatatccatttcttgaatacatcggaaaaccatgtctgccattccatcaccttcaacatcaatgagttcctgaaaaaatatttggttgtgatcagcctcgagattcttggagggttgaaactattccaaaagagaaattagcagaggacgcgatgaaggtttaccggagtaaaaagcgcttcaggtgcttggaatctttcagtgcctactttgataaccctcccatctggaagctgatcacagttcaaaaacacaacgggttagtactctggaaaaaaaataatttggtgataatatcagctttagaggctgcaactggcacaagtatgaaactttatcgactatcggatgaaaaatcccaaacacagcgcccaagaacagagaaacgatgtcatgaaaagaaaagatgataatatcattctttcattaccaaaaagaacaaaggaatgatggcacgaatctttaaagttctctacaggctcaagttcgccaagaatctgctatctatttagttctgatcatgagtttggattcctattagcttaacgtacactagtttctgtttcttgcctctatttgccatcgaaaccttgaaaattcacacacctgacaggttcataccaggagagagacttacagtataattcttaacaaggatagttgtctcaaggccaagctgagattctctcttgtaatcataactgcaaaaaaagacaaaacaaattgtgtttatttcctattctagtaatgcattactacacagatattagaggaaagctgagaagaggtctttgcatgccttatatagcagagcttctctttaatttccctaaccgtctcaaagtcagctgttttgttcatcgcatatctgttgaacaaacagtcttttagtttagctaatttaaaacatctcaacatcattaaaatgaatgtgagtctatgaatcagtttctcaccctcgtcgagatagtagatcaacgagatatgctgttatgtgtctgccagcaacattcattcttttagtaagatgagggaacgagtagccgtcaaccaccggaacctaagatgtgaggcgaagacggttaacttctctattataagcaatatatgatctaaaaaattacagaggtttatagcttaccacatgagtaacaccatcaccagaatcaataaccaaaccagttagcaaacctgaaaccaagagttcaacacatgaagaaaaatatcagggaagcacacataaatgctatttacaggtgactatctaaacacacgaaagaaaatctaaaccttcaatagtctccataagcaccttgagcatagagagtcaaaacggcttggatttgaatgaaaacgccagcgaaattgtatttctcaaacattgtctcaatctgttttataacataaaataaatcactgctccaacaaccatcaaagcaactcttaaccaaagacttgataatatcttaccattttttcacgattcttggacggattaagaggtggatccgtgagcaatatcttacagtcagatggattgatctgttaataacaaaaagggtttaagagtaagtcaagacacatggaaccgagacaaaaatggcaagaagaagcaggagaagaaacttactttcaattcgttatagaaagcatgatcccaaacatgttccatatcatcccaattctgcacaataccattgtggacaggataatttatatccaattgatgccggagctcagagcaagtctccccaacaactatatcctaaaatgaaacaaaaccaaaacgtatatgaatccgaattacgcatatcagctcagtcaaaactcaaaaggctaacaatgatctggttttgcttatttaaagtcacatatctacaaaccttgacttgttgctccatgagtgattcttcataccgaagcaatggccttcccacgacacaggggaaaacagacgttgggaaattctctccagcaaatccacattttacatactgaaaaatttaataagaggctcacaatttgttcccatcacaagaaactcaaaacttaagcaacccattatgagatttctcatgtattagttttgatttcaatagaaacacgatcttacactatgctaagacatgaaagttttcaaattttgcaactttaagacaactagatcctaaacaaactcaaaagtgagatttttaacgaaacccagataggaatggaatgattgatcagattcaactaaagttcggagtctgaaacaagagatatcagagagaagaagcttacaccggtgccgttgtcgcaaacgacgacgtttttgttgtccatcttctccgatttctatagagactacagatttttatcgaagtacaaaaatttcgatttcttcgattcgatctctcagggaacaaaagaaaaaacctgtctttgaatcgaagcgaagaatcactcttctctacttgtttggtcgcgatcgagaaaacatatttgctcttcgacaaacaaaaagcagctgtttcctcgtttctttataagaatgcgcgtcgtttactctacgtgaaaacgtcacgtagtgcaaacggtcaatacatagaaaaaattattaaatacgttaccccttttctcgaattattgagatggagttaacttggttgtgggtattgatgggctatctcaggcccatattaggtcaaacagataattctgtttacttgtataacaatcttctagatgatctaaactaagaattagtaaatgatcatcatgcaatcccttgatcagagatttcaatcactattagggttatgttacgagaaagatgttactagggttttggtacgaagttgggatatcaatcttcttctaggtttttttgttgtctctatgttgtctcaatactaaaatttattctacataacatgttgtaaattaagttcctgtcacaacatgttatgtatcagtcaccaatatagtaaaaataagataagacttttacagtttcacacacacaagtccaatgacttgttcgatgtaaaatcagctttcatgttttcacttttatataggttaattaggacacacactgtctctcatgcttactggaacattgctaagctgctttatttagttctggtaagaacaaaactgcatgtcttagacctcaaagtaaccacgcgtttcatcttcacttctgtatattgaaatggaagaattcgtagacaagtcaagctccttgcccaatgtgtcgaagagaatggaaattaaaagagtaagcaacttaagtcacgctctcatcatgagggaggctttggaatggatctattggagttgtatttggaccatagtgttgagttagatcattgctcaaaagggaaagagagagctttgtgaatgtttttgaattttcttcacttgttttgattggttggacaaatcatagagatcaagcaactttttgactcgttaacctctctctctctctctctcttagtctctttccttagttccgtcaaattcaagtcaaaatgagtaaaatgatataaactttttgactcgttgaacaatttatacttatctttgaaaaagcttgcaaggcaaagagtaaatgcaataccagcttatttggttcccaactgcgaagggtttgtacctagttcaaaaccttcccacagttaacggcacactcagggcaataacatgaatgtaagtaagagttaaagaatacaacgttaccatcattgtgaaatccattgcagctcaaagccactgaatcagaacatgcagcgaagtgttttacactcgactctaaacgaaagtctttaactcattcagagagatcgaacgaaagagaacaatctttggagatgcaatagaagaatactgagcaaaagagagctataaatcttcattctacaaatatgtgatggaagacaagtatacattaccattgttgtactatctgaaaaaagccggtttcttgatattcaaaagcaacaaaactcagaacaagtaaaaacaagcctctctgcaacttaaagactccaaacaaaaaaatctctggctgtgtgtattcaacaaactccacctgcaagttcaaacaacaactgccaaaaaattgtcacaaacactcggaaaaaaaggtttgaagattccactctcttgtatcatcatcctcaaattgaactcaccttgtgtttttgcagaggtttcaataagtatagattatcactctcactcagtatataaccttttctttttcttctccatggtggtacaaattacaacaatattatcacaaaacaaaagccaaaagctttttcaaatccagaagatacaaaaaaaaacccaatccttttaacgacctgagccttgagaatcatctttctcaccactctcttgctgatgttcttcatggttatgatgcatatggtgaagaaccctaccttgagcttgagcctgagcctgacccatctgttgataaatctgagtaaaagactgaggattcaaaacaccaacattcccttcttgagacaagcctaactcaagtccaggcatctgattatgattcccacccaaaatagatgcaaaactcatatgaccaacaccaggaaaatcaaaaccaggaaacccaattctataaccagctccttcactcattaaaccagtggttggcacaccagaaccaaacccagctacatttggccataacccagttggtaaacttgacctagaaactccttcaccgccaccaatcccccaatttaatggtctaccactactactagacccaccatctaagtcatgactgatcattaaaccagcagtaagagacccaccttgatgatggttagaggttgcagctgaagaagctaaagcagaggccggtatagttcctgaaccagtagctgcaataatcgatggctcagcttgttgaagcagccactggatagtttcaccatcagatttatgacccaattctctagtcaattgaaaaatcctagcagcacaaagagcaggcatccgaattcgtcgacctctaccttcgactttagtgtgtctgtctttgttagagcttctcttaggaccaagctggttctgattctgactcttcttgtttggttctttgtcggaagcagagaccacgatctggaaatctttaatctcagttgttggtttgcgattctcgtcggaaacaacagcagaagcagcatcatcatctaccaaaccctgatttcgcggtggtggtggtgggttcaagaaatttggtacttggtgacgatttaggttcttgggatccatcgaagcttgcttgtgtggggacttcagggtccagagacttaatttaatcaaaaattctcttggattcaattaagggtttcagaattgtgacgactttgtaaaacaaaaggtatcgagtttttttttttttctttgggaatttacgaatttaatgtttaaaaaaaaacccagtaagatcccgatgtagaatttgaggagaataaagaaaaaatgtttcttttgatctcgaaattggtcaaaaaagaaatgagaaaacactttaaaagtatgagactttagttttgtctttttcttttttattcttgtttactttttggtttggtactttaaataacagagagagatagcgagtgagtgagtctcataggtttctcaccaaacaatgcaatttttaagaccataaacagcaaagtaacaaaacgacacataaaagaaaaagtagtgtgaccgtttcactttcacatttaatccaaaggtaattgagagtctaacaactgccacttcatttcccactagatacacagtgacggatctaaaatctatttttacatggggcataattatatgtggaaatcaggtttcaagttagatttacctgaattttatggtactttacaaacagaagagttcctagattggattagcacgacggaagagttgttaacattcaaaaatgtccctcatgagatgagagttcctcttgctgcaacacattttaaagatcgtgctttagcctgatggtaacaatccaataacagttgatatattcaaaaaaatctcaataattactttttaaagtttgtaaattattattattaaataattacaatgtgtagaaaattaatccctttagaacataattttttttcagaaaatcaatattttagaaaaagagtaagtactattgaatacattgttgcttcgtatatatctctcattctgtcctaaacgaaaaaaaaaaaaaaaactacaacagtagtcaaagtcaacgtcttccctaagaaggaagtacttttagctagtccatcaagtggaccaatgacatgttgacaattagccggtccacacagggtttggttcgcttgtagggcaagatctaaaggtattgaatgagtttgagagtttcatcatttatggaccgacaacattataccatctctcttttttttttactcatttcatcataactactcataagtcttagacttcaattaatcttaatgagttaactactctctagctttacttaaaggcattagtcttatattaatgacgcccataatcacgtttaaatatcatacactaacacatgtccagtcgtcgtcgattgatttcctgctttagtaattgtgtgtcaacatttacagttcatttgttcaaaagaaataaaaaaaagtttatagaattataatagttaaaacattcagtttttgcaactttgcaaaaataaaagaataaaaaacaaagtaacaatattgaagacatcacataagtgtgatcatctaattcaaagttgcattatacgtttcaaaaatgatttacttgtcatcgtgaagagattgtgttgcggatctcacaatcaatgaacttgaaagtggtgaggtgaggtagagtcgtagagacatttagttttgaaggatattgttcattcgcgatctaaatgtgataaagtgtagcttgagctaccaacttccttaatagagacgtcgttaaaaaagttagtttgcttccaaaactcaaaactgtccttccatttgctttcatctcttggttggcaatcaaggatagactctcaatggaaactagaacgcgtcaatagggttgtgttcagtcaagcagaaaagctgcgtgaccacctattttttgcttgcccatatttgtttatggtttggttaaatattgtggacgatcttctgcaaacattttgtaaaacttgaatacaatcaatgcatttaattttcaatttcaaaatcacagtattctatttgtttaattatatagaaatgatgttttcatctaacaaaatgaataaaatggacacacattgttacaagataatctgtatccatttaattcaacctgtccatatccttcatttatgtttaccctcaccattattttcatttaaaattgtttttttctcaatgatttttaagagtttgtgccacgattatctccaccaatcgtgccccaattatggtaaattgtgattggagtgtcatcattacaaatttacagttgcttagcagtttttaagattaataattccactacgccaacctttcaatgtatttaacacattgagataaccttatttaacttctttaatgaaattgttcttcatatcttcttattttagtctaacaactatataaaaccagaatttcacatatatcaactttaccatacatttgatgatcacatcattggacttaacttattttacgagagtggcatgcatcatagtatatattaaatttaaaacatttacttgcatgataagttgtagtagttttaaacttggtaattttaaactatcaatatgaggctaattggaatcgtttcagtacattatttcatctgcattcactccttatgatgattgaacaaggcaaatgttcgtaaaactctttgagcttgtgaatgaaagcattcaaggagacaacatcccggggacatacaacaacattgactaaaacatttgaagagatttgcaacaacattttgttcttgcgagctgagatactaaacatatctacacaacatatgaagacaactgtttcgattctgacggccacaagactctcggataagtttccttttgtatgactcacagttgcggttgcgattatgaccacagtggcatctctatcttgctgaggacggtccaaagtacatacaaatgggagggttgatccttaagattgaaaggattgcggatggtatagtccagatcccatcaccacagatcagtcctgatgctactgcacctgcaaagtcctctgcatctttcctgttgatccgttcccatacgaacaatatcacagtcccaacaaacatgtcaatggcgaagtaagctccaatgtagaatgggacagccattgccattgggatcgggatgaactgagagatcttaggcggtgtaatatctcttaagagattcacaatcaaagctgctatgaaaaacccgtaacaaagagccaaacagtgcttaggcaattcagcaaagccctcaattccgagaatcgccatttcacggaaaatcactgcgtaaggtgctttgtacggaccattgggatctccaatgtcaaaggcagtccagaacagccagaatgtgagtggagcgattacacagcccattgcggttcccacgagctggcttacaaacatggactttgcagatgataaagtgaggtaacctgttttgaagtcttgcatgagatcagctgcggtggagacgattgacatcataacaccacaggcagctaaacccgcaatgacaccaccatcacttcctacaacggaagcgattatgaaaagaccgatctttccataggttgatgctaggctccagtctgtgagccccgttccataagagttgcagaaggcgagagcgggtgcaatgaaataagaacacaggacaaagtaccatttcagtggtggaaatattattgggattgtggcagttgagatagctgcaagacccacataaccagcaatcgcaaattcaaggggtatacggtccttcagaaacacttcatctcttttcttcttcaccagcagtatctcagaagcttcactgtcatctgaattacggcattggaaaacatacagttaacagtctgtggaaagtgcccatgagaggatccaagttattggttaatacaaaagcatgtaagagatgagtcaggatctaatattctctcacctacaccgtcggtaacaatgggtagattgagtcgtctagacctgctgctgcataattccttcacagtgacagcgatgatcttgacaagattgtaaagaccatcaccaaggataatggcaatggcgataaagaccttaagaagtcaggcataacataaaagcatcagtacttggaatcatttgtttttctcccttttgacatgaatatgtggtgttatgaaaaggtttcttattaagctgcttactgtaccttatacccgtagagacctttgaaatcgttggacccaaggtcagcaggataccaatccccagcatgctgtgatacaaatggccatagaatcccccaagaaatgatcgcaccgagaagaaccgagcagttcactatatgggggcatataaggccgcatccaatataagtaggactgaagtcaaagtaaaacctgtgtggcaaaaaatccggactagttaaaaattgcacacaccaaaataccttcaaaaagtagcagaaaaacacattttgcagctaaatccaacatcacttctcacaaatgattactgatataataatcttgggacattaaagctgaacaaaacttgttaagagatagtatgaacttacgtgttcttgaataacgtcaaaccaagggtggggaagttatcaaatccacatgcatctccaataccactgaagaaccatttgaaacaactccaaattaagctaaggctcaggtattttccaagacatttaacctggttcctgtagtgaacaacattgcagacacaagttcaataaactaaagataaggttttgcagaaagtaaaattgaatgacttgacaaaaaaattaccctgcaagctcagctccagtgttggtgtggaagctattaatcaacattgctgtggcggttccactaggataagtaagtttgtagtccaaaaccatcacctgagatcaaacttatgagtacggagaagaatcaaacaacagtgaaagcacagtatacattatccatgctatcgaaacgctaccttgcgtaacggaacgagactaaagagtcccaagaagctgactacaaataaaaacccaatcatccaccacaatcctggatttataacatcttctgcatggtttccaggataatcagcaccaatgagcttatatgtcttctcatccatagcaatcaaatatgaaccaaatcctcctgaagcaaaaatcaaagaccaatccatatcaaatccttatactagtaatcacaatcaatcaaatctcacaaacagctacagatttcaagtcctctaaatcaaatcacagttactattggacaatcgccaaaacaacaactgtttccagaattcgaaaactaagaatccgattccagcacaatgatacacagatcttaagtaagaaaggttttataccgctaaaggcgaggccatagcaagcgacaacacaagtctgaataacggtgttctcttgcttagtgaaaggcttcactgtaaaccctagcttcgataagaaaccagtccacgacttaacgaagaagaaaccgagtaatcccgcagcgacgttcaacgacgggatgattccaaccgtcagatttagtttatgagtaatgatacagaacaaagtcccgagcaacgcactcacggttaatcctcgaatcgttatctgctctttccactcaggtacatgctcctccgtcgccgtcacggttttctcagattccggtggtaacaatgcctctgatatctccgccgatctagggatctccgtccccatgttttagctaattcaatgaatgagtttcttttcaccggcggatttcgaattttcccgagaaaaatggatccgtggatctagagaaaattggttatggcggaagagaaaatgttgagtttgacggattttggaggttagttatggaaaagcttaagattagacgcaatgtattttgagtaggtcgaataagaaagtgacacgtgtaattttagtctgttacgttaatcttgttacatcaaagcgataaatatttctgttggattgataaccataaatgtgttttttgttcttttctttgttagtgtttcagacttcagagtatttatccttttgctatttttttcaactaaaattttgtaacggtcgtttaatactatttttgtttgttgggctcatgtttagtattgggctgggccttgctattaatatacattggatgaaattgttgaattccttacaagttgtgaatgttgttacctaaaataatgttcatgaggtttaaatctagtaataaattatgaatatagtggtccatgatattgtcaaactttaattttgttgatatcatttttgtgagatctctaaggcaatgtcaattgttaattgcacttatgtatactagagtccaaataattcgaatgatgctatattggttaattctggtttagctttagactcggtttagtagtaacttataaaactctcatataattatatatatatatatatatatatatatatataaattatgataaaatttcaaaacttagacctatagaaagagacatttaataataaacaaaatttattatgattgtaaataaaactaattaaatcataaaacataccatacaatagataaatagatagcataattttcagcaacaaattttgaattagttgtgacacttaagtacaaaaaatgtttgcgcacattaatattgcatgatggctaagtttactttagagacaactaatatgcaaaacgcatttattaaaaaacaagacataacaaaaaatcagacactcacttatagcactaagcattagttcttacttaggaggtaaaaaactgaattgctcttgtgcagaacgggctccattgttggctatcctcatattctcagtttcagttatctcaacagcgtcgtgtatggtggacgcaatttatgagacaaacctctaaacatccggttcggttgtccctcctttgtaaaaagtgtcgttgagacacttgtccctcgcagaattgtaactcttgtaataaatataaagttctgggtcatcaattggggtgattggatcacacttgtcgtcgtgcggatctaggtcgcttcccgtaggattaactggagccagatccaaggtgcttctcgcagctacaactggaggaggaactttcctactcgtgcacagtaacctacgaagactcatgattctcacgatgtggtttcgttttctttagattcttttgtgatgaagatgatacagaatgatagagttaggaacctctactatatatagtgccacatttcttttgtaattttatagtatgattcattctatttttttcttagttacattgtttaaaacttatttacaattatttacctttaagaaaaaaattgttattttttaaataaacgaaaaagtagtattgatttgatatatttaccttaaaataaactgtaaattcaactaatattcattgtcactaatcctatatactatataaaaacatgaaataaattcttatatcatattatttaattcttatactgtaataaaatttaaaatctcattaaaattctattgattttatgtttatgcataagtttatatgatttatataagtaaatttaaataagttaattcatatatgagtttgaaatactttgtaccttattaaattgaaattctttgattaataaattaaaacaagtcaaatttttatataagtaaattatgcatgattttaaattcgtaaataaataataaatttataaatataattaatagattgatgtgacatgtatcactctctccagtgttgacgtgtcagaaggatggagagagttggacaacttttatatatatgattcgtccatgatattgtcaaaactaggatattggatatcgatttggtatgatatacatattatttttatagaaagttgttaacacttatctattatgatgaaatatagaattaaaatccaatctattatgatgaaataggtagctaaattgtattacaaaaatagaatatgtaagattgaaatttggtttaagaaatatactaaattaaatatataaaaaagtgtgtggttattatttaaaattcaaatattatccgtaaaatgaagtatgtacaattaaagttcagtttattttgataaaatagatagttaaaagtatatagtaaatagaatgtgtaagattgaaaaacaatttaaaacaaaacttacaaaattaactattaagaaaagtgtgtgcattactatttactattcaaatttctaatttctaatttcattggtaaatttttctatttatatctatacccgcctatttaggcgggacttatctagattaataataaagatatttagaagatttggttctgatttaaatttatgattctcctttcatctttgtttgattattttttaaaatgctttgaataatcatatgatacataagtttaaaaatatctcaattttgttttctgcatatatggtgattcaaaaatttttaaaacagacatatattacctaactaatgaaaaaatatatgtttaacgttccatatcggctaaaatgtttagacaatgatttagagtcctattataaataagatcaaaatgaatcaaaattcgaatgaatatgaactttaacttaacaaacatccaaattttaaaaatatataagaggtaattctgttttttattaaactatttctttttaccacaaatattataattaatatatttgaaagcattagaaagtttataatattatgaacattagaacatataaaaataaaaagtaatatgggaatgattatattgaagaacaaggttttatggtgccacggcggaacgagttttgagtcaacattaataaaaaatataaatatcattaactcgctgctttaatacgggacggattaaaatcaataactattttgaaattttatgaacatttgagcatatttaaagaaaatagcatgggacgggttatatggcgggatggactatattaaaattgtattgaggatttaatgtcaatacaattgaatttatgtatactagagtctacataattctgttttatgctattttggttaattttggtttagctttagacttggtttagttaaagaactcttgtacagtccattcaattttgaaagaagatattttacgtttttgtttctctttcgacctcaatcttgagagaagctataattgtatcggcccaaatttcaaaattcataaaataagatacataccgacaagaaataaaacgtttatatatatctagtccaataaagaatgaaaattccaaaatgttgcataaattgtagcctcgggaaattagttaagatcatagctcgagtgaccggttattaaaaacaaagaatacttaagtcgaactccgatgactcaagatccataagagtttaaagatggcggagatagattcaatagcatcactattacttaggtagaaaaagaagatttagctagattcttatatgttgtctgcgttgatcgttttataaatacgttatgtagtgtcatatttgaaactcaattcgtatttgaatataccaatttgtggtttgatatatgagcattatgcatgacgttttaagttattaccaatatatcttcgatatcatccaaacatagatatgtttgggttaatgctatactttcgatttgtggacgtcaattcatttacggaataaccgaagagattgaaaacttatacgtagcacattcagcgatcacaagtcttggactcttggtggcacctaaaatttgcaaacctacaagaaatacacgatatatacaagaaaaatgggaccaagaaagaaaatgtgaggaacgttttacacttcatttgtcagtttttgcatgtgaaacagtgcgacgataatttagtgtacgatacaaaacagtcctcacgtgtatcgatccatcattataagatatataagaagaagaaaaattataaaccttacgcatgaaatagcactttcttcttttgtttactttgggtcacatgaagtacaatatttataatgttgcctcttgttactttgttcaataataaagatgccttacaacatttcaatggcaacattgcacaacatatcgattaattaatctctttttaaccaagaaatttcggatcaaagctcataatctcttcgacaagagaccagaccattttttcaagtcttcttctcgttgccgatcctcggattcaagacttcaagtactctaccctcttgtttgccaactagatactctggtttgttcatatctttccagtttttcaatggtcatatctataattgttccttataattcaacactttctaactaatgtcggtgacgtggcaaaggaggacaaaatagtgggattcactctgtgaactagaggcttccaccattgcttgcacgccttttatttttagagattgaaaacaacatttccttcgaagatgtatcactttccttttggaggaaaaaagcatgcaagaagaaacagtacacaaacaataatacgattgtgttatgttgtgtcatttcatagaatatcatgtcatggcgtacgattatacacgtgtcggttgtgaaagaaggttcacaaaacatgtcccaacaaattaaaaaagttgaaaaagttggagacccttctctagtctctacctcggccagagacttccgtatagccacacacaccttttagcttgagaacaacctttccttaattttgtaacgtcccatcttacgtacttattactatttcagacaccacacgtaaataaacttcgataaatgcatatctaacaacacattacgacagaagacggagaatgccaacaaaactgatcatgtactattctaaatactcaatcataagaatagatccttctagctcaaacttgacctagctactttatatctacaactatttatatagttataaaccacaaagagaattgaaaagaaaaaatagaagctgagagaagacaacatgaaggtgagtactattactatacatcccaatttccaagtctaatcaaaatattcttttctttttgatgattaatgagctaaaattgtacttagtctctcataaactaatcattcatgttaacgaactctctctctatctgtgtcttgcagctgctaagttggatgcgaacgataaagcctaatggcttagactcatcaaagaagttcaaaggtataagtattgtatattgatcccttaaataacctatcttcgtcttcatacaatgtcatacatatatgttagtattggtgtgcattgaataatgagcatacactctctaaactttgatcatcataattcaaaaatcaatctatctttcaggtggtttatgtagtctaagagctcaggttttctctgatgtccaagacatccgcacaaactccttttccttctacggacacactcatgacccgaatccatccaaagttgaacaggatcttcggtttgatgaagacgaattttgcggatttctggccatcgggacgcttggtacagaccctgagacaccaaagttctcagctatggttgcagaagaagatgcaaccggagaaatcaaggagatggccaagctcattgctaagaaactagaccagtttcttaaggaatatcctgaggatactagaagtaagcgggtaaaaatatcgaatgaatgtcctctacaagattatgatctctttcgatcatccattgagcttaccaagggaagcaatggaagagtaaagaagaaaaagagtttacttacgagtctcttcaagaggagacaaacagtacaaggagaaccttacatagagaaacatagcacaagagatgcgattaaaagggtatttaaaaagcttcatggagcttcttcaaagacaagaaatgatgatgaagatgattctatgtccaagaagaagaaagatctcaaaaaggtttagtcttctttagcttaaagcattttcaaatcttacccaaagagattggtctgaagaattctgaatgttaatatggtttctgttttggctatagaatgttcaaacctgccgacgtaaagtccaccctgttctctgtacaactgcaattccacaagacgataacgagatagatgacagaagaaaagtggatctcaaggtccctagtcttactggagggttcctcggtgcaagttccatctccgaagcgaacaggaaacgagaaaactggatcaagaccgacacagagtgtaagtcaagatacacaaagaacactttgtttttacacaaagaaaactggatcaagagttttcttatcatttgcttgctttctgcagatcttgttctggagctgtgaagatatattctcactgcaacaaacctctattgatgttccaagcaaagctctctcctatcaaatccatatataatacacaaaaatcagtatctattaatgtgtagtcaaagggttatgtactctagtttaaggcaatgtaaaagaagctcatgtatgaaaagtattgtacccaaatttaaatagcattcgaagtagcacctattcatgatttggccacaagtgttaaccgctaataaccgtcatatctctgctccaaaccaatcactgatgacactaaaaagattagaacattttgaaaagatgcatagagaaataggtactatatactgaatgcttattcgaccggattcaatcggataacaaaaaaccgaaaccaaaccttcattgggtccactattattcaaggctctacagtaacaaacaaaaaggcaaaccaaactactaagaaaacaattagggagtgggcacatttcttgatatatcatctttatgcagtaatctactttatatcaaatcctttaacaaaaagcaaacaacaccaaggagcatagaagcaattgattgaacaatcataaaagagaaagaagaagataagttcacaaaagcaaagccaataaagaaacacaaatgcctttcctcgtaatctatcactaaacttagtatcttaacttcatataccttctccttagccaccaagaaaagccaaaaagactcgtcactcacattcttctacataactcttcacttgtctccatcttcttctgcaaaagaacaacactcacacaaccatacttaatacaaaacaataagaagaaaggagatcaaaaccattatatatgagcacggattggggacctgtgattgtagcggtgtctctattcatcctactctcaccaggactactattccagcttcccgcaagaacgagagtggttgaattcggaaacatgaccacaagcggtatagccattttggttcacgcatttatatacttctgtatactaacaatcttggtgattgctatacaaattcacatccatttctaatctctgctctttatatcatgtaaggataatgtaaccaacaaaagaaggcatttttatgtacaaatctctataaatctttctaaatgtctcctcttctttagcttcattgttcgctattgctaataaagttttgatctttaactaaattcaagcaaataaagacatatactaaaggaagcaaaattgatacatttgagtaacaatacatcacaatacaacacagccgtttagaccaaatctgtttgttacaacacatgagaacaaaagctctaattttacagagtttcttctagttgtagacccattttcaaaaagggtacctttatttataacgacaacgaaagagagagagagaagagatacagaggagatcagattcagccagtgtagatgtggagattgagggcgaggattaaaatggtgtaaatggcgaagaagatgagagtgtgaacagcgatggctttgccgttggttttgaggccaccgaaatctacggtgcggttgttaccaggtaatgagaagagaagtcccggtgagagaatcacgaacaggaccacgccgacgagaactggagcccaatccgccattgaagtagaaaaaaggttacaactttagaaagcggtggagacgagaagaaactagaaaaaaaaaaaaagaggaaagtttttggtaatggctctgttttttctttgatatacatatatttggtgcttaaggaaaaattaaactaatattgtgtgataattaattaatgggttccttaattattctcgtgaatgattattaaagaacataggagggcacgaaaatataatttgtctgctagtcaagtggtctgcagactctgaataacccttaaaataggattaatcgtaattaaaccaaattttttgttgtaaatagatcgattattattgtgaaaattaagaattgtaagttacacttaaaaaaaacattttttgaatcgaaataataataaaaaaatataatatattttaaatttatataataaaaagcagatattacagaaatgatattgattaaattatttgtgttttatatatttttggttgtttttataagcaaaaaataaatataatttagttcaatttacaaatcaaatcgaaagtaacaaaatcatgtgtaattataatacagtggatagtgttgtgtgatgaatttcaatttggtttgtagtttacaaattattttgtttaagttcagtttctataaatgtaataaaaaaactgaatgtatagaactaaatcaaattgaaaattatcttgtacacagtcataactaaatcgtaatcaagtcactttgacccaaaaagaaagaaagaaagttatgttaatttagtttgatcatttttttacgtaaaggacagattcaaggaaagttttgtgttctttcttcttacaacttttgactacatacatttgcttacaaaattatcatttttacaattaatatcgtacccttctagcagaataaattagctctgttcgctggtggtactccacaaaattaataaatcaaattagctttctaatttctaagttacttcttacttaagtttataatagggccctcaagtcaatcaaattttacatattcttattcttccaatgtgttacacttttcatgtgaacttcttagtgttaataatttcaagtttgcaactaactaattcaataccatcaagaggactaaacagacaatactgttgtttacgatatgtctacgtaagaaaacctctttgtttcttaaaccaaacaaaacagtgaattacacacaattcaagtgaaataaaaactgacttaaaaatctaatttacattaatacaaaagaaaaataagaggagagatttaatatttgtttcatattagccgatgtacatgtgaatttggagagcaagcaagagaatacaaacaagagtgaagtaaataagagtatgaacaataaccgagagaccacttgtctgaaacgttccaaactcaaccactcgacctctcccaggaacttgaatcagcagtcccggagtcagcaacacaaaaagcgtcaccgcgacaaaaaccggtccccaatcaggcatctctcgatcgatccactcctctttctaggtatcttaagagggatatagttgatcaatgaaaatgcacaagtgtgtgtatatatatgtagggaaatttgtagtggagaatagaagattgggttcttttctttaagggaatagagtaatccattggttaatgtcggaagaaagaatgctttgggaggaaaggacaaagaattgtgacatggaaggattaaagttataagaaaaagaagagattatgatccatcaagttgtgtgaggattcacattaatttcattggaatgtgatgtcacatgggattggctttggatcaaaggaaacaaatatacaaagtagtcggtccattttttattggtttactttaccaacaattatttaagcctttatgagaaaaatataaacaatatttcctctatttgggaattactttggcatctttaaagctaaaatgaataagcctttaccagtagacactcttatactggatccaagtttgaaggtaaaatgctacatttctgattacttgaccatcaagaaacaaagtgcaatacataaaaataaaacatagcaaaaacctcaacaactaaacaagttctcttgattttcccaatgacgacaaaaacaaacagaccaaaacacaaattagatccaaactcttaacatccttaatcatcaaaaaacatcatcgtaagaaatcaagcaaagcatccatgtctgcacacttcaccttcaagtcctttaaatcttcctcaatttcttgcagtcgactcttaccagtctctttcagtttcttctccaaccaatccaacttaaaccctgcttttgtaacaaatcgtagtgcagaatatgcctctgccagatcaccactggaaagttcttccggaaacttgcacagaatctcagtcatacttagtacaacatccagaaatgtttttctcagatgttggttcttgggaaagatttttgatgcaaagcctcgatacttttcaaacagactgttcatagattctacctgcaagtaaacaaacggacagttcagataaaaaccatatcgaatagcgattcttggagacctgaaaacaacccaacaaaacatacatgcagcatgcatctatatttgtaaataactatatatcagccaaatgaactctagtaagaaactcttacaattcgtttcattttttcttttgttttctatgaatttaaaagtatatttcttacctgtgaagcagggacttgaaacccattgatatcaattctttctggttcctctggtacatctaattcaccaataacttcaagaacatctacttctgcaacaatcttgacttctccgtttacgagaaaccctttatcactgctttgaatctccgaaaggagaaacatagattcaaaaccatgggttgtgtccttttcatcaaaccagtatactgcttctgaaaacaaaaccacaaaaacaaacttgatattatcatcaactacaattccaaagaaagtatgacaagagctatactgcaacatagaggttgtgttctttatgttgtccgccttatcataaagtggagagagtagaaacaatcacctcgctgttgggagagtcctcccggaatttgatttaccatagtaaaagaaactttagcgcgtcttctccatccggaaggcaaagactcagaattaggaacacatatatacagaaagaaataatcatagatattgtttcccttgggaaaggcgagtagacgcctacaagcaaaaaccacagaaagtcatttgcagctatcgaacatgaatatatatcagttgcaacaagttatgttctttaccacttgcaacgaccggccttgaatgtatcagaataaacactaccggaacccaaagagttgtaattcttgatcacccaagtgaacttcttatcagcttgatgattccccattgttcttgatgatgaatactctaaacaaccaaattagtaactcgaacaagtcaaacaaccatatcaagaaacaaaaccaaaatatagaactaagatagatagtatgactacactatggaacaacattgtaaaaaaaaaacttctttatttcacatgttaccaagtttgacaagaggaagtgaggaacgaacagtcaaggaaaaagagtaatagacaatgaactaaatatattggagccacagcttttaaaggcatgcatgtatgtagacgagaggaatatgaatcgtttcgactcctcataggtcatagtgtcatagggttgattttacaatattaaataaactaataataataattattatactagtagttattgcaagacgaaaatttaactttccaataagtaaatttaaaagcagtggaaaaaagacattcccgagaccaagtgctctcgattctaaatctctctgtctatatatctttgaaattatagataagtgttcaaaatctaagtcctaattgatattttttactaccaatatacagagagaaaaataattttgcataccttgtcaaaaatactggaaaatgcagttgaaagtacaatgatgcaagtttttttttttttttttttttttttttttttttttttttacgtttaaagagtatatgggaataacaagagagacatgattatagaaattgtagtagtttgtgagaactaaatgcatgtgtaaatgtaagagcatctgcatcgggaagattctcttcctagtttctcaaacaaaaaaaaatttattattttaattatataatatattttatttaaattgtaatagttaagccaatatttgattgacatgtggcgatcctgtcagagaaacgattctcttagagcatctccatcggttacaattttgagagtttctcttgactaatataatataaacaattcataaaggaggagagagaataacataattacagaaacgtttctgtgcagagaaattttgaagtaatcattgagaaactgtgtgtataggtggctgtttataattggacaactgaaaaaaagaaaaaaatatattaattacaaaattaagtcataataaaatattagtaatttttttttttgagaaactttgaaggtttctcactaatggaaatggccttagtttcttaagcgatgtacttttcttcctctctctcctactttttcacttttttgtttttattttattattaagtttctcattcagaaacgctgatggagattgcctaatggtagagactctcaaagtctctcaactgtattactttaatacatataatttaattattttttttactattcaaaaaaaaccatccataaccaatcatattatgacatatgtttatagtcggttctcaagagagccgattcttatcccactctcctaatttttaatacttttgttataaccaataagtttagcgcgtcttctccatccggaaggcaaagattccgaatcaggaacacatagaaacagagagaaagaagtagtatacctatcacgtctcttgggataagcgactagacgcctgcaagcaaaaaccatatgtgtcacttgcagcgaccaaccataaagcacttgcaaacaagttatgttctttaccacttgcaacgaccggccttgaatgtatcagagtaaactctagtggtatccaaagagttgaaattcttaatcacccaagcgaacttcttatcagcttgatgattccccattgctcttgatgataatggatactaactaaatacacaaatttttaactcaaacttctaaattcaagagattgctatgaactgtgttatctaactcttctaaaatcatgtcaagattacactatggaacaaaattgtactaaattgttttttgttttcctttttttattaactatatagtttactaccaatatacattaaaaaaaaatggcttcacatgaaaatgcagttgagagtcaaatgaggcaaggtttttttcttgtacatttacgtttaaagagttaagtatatggagatgacatgagaatagagagagcgacttgagtattagaaattgaagtagcttgtgagaactgaaaagctatctgcttccaaaaacaggtgaaactcttcttcttccagcttcctccatttcctctcctgacaaaagagacgcctccggctcaaaacccgcattttctaattgcttctgaagctgttttggtacaagaacaacgaatattagaccaatctaatatgaatcagtcctcactagactcagacagtttctcatttaccggtaagcaagatggaccaaaagccataataaaacactttttctgttcatgctaatggaaaatattatcatggtagttaaaaagtgtaaaaacagttttttttttgtttttgtttaccttttgaaggatagcagattgatcatccagagagaatttacgcatatacttaagcatctctagttgctgcagtaagcacattcgaatagttagacattgaccttggagagatagttttcttatagtaaccaaagctaacattacctgttcttgtaattgttgtagtgctttcattttctgttcaaatccatcttgtccaagctcagcttcttcacatgccatctcctccctattaaactgtgaaatcagcccctcatatatatgaatcgaatttctgataacaccgtgaagagaagagcttactttgcgagaaacttgtagaaaccaatcatcaactctttatcgttttcgtatgcagagttcagctttcccaagcagccaataccaaatcccgggtctgcttttatcgaatatacctcatagtaagaaacatgtaatggtgtggtgtggtgtgtataactcaaaagcaaccaataaaaggttaaagagaactttaccaatccccatctccaagaatatctcctcttgaatagcagttgttaccgctacagcttcctgcattcaatcacaatgtagtacatgtaactaaacacaatcccattttatctccaactggaactagtctcttcaaatttatcaatcttttctaaagtgttgtacttttgtgttcacaaaattaagaaacaataagtactccattatacaatctcatccaacttgaaaacgacattactctaccaacaacaacactcttaattaactacaaagcaagcattaatcactaataaacgcataatcgaaacaattatacaaaattctcagtttctaacctgtttgtcatccacagcgtcggagattcgtttcttcacatctgagaaaccaaacatttgcaatgaatcaatcaataaaaatgaattcaaaaaccttaacaaagaacacacaattaccagattgtgaagtcaagtaatcgaatcgatcaaagagataaaccatttgctctttcgtcaacatccccgagctttgcagcgacgacgccattgccccaaaaaaaaaactctttggagccacaaagtgggaaattgggaatgccacaaataatatgaaaatgacggaagtgcccttaaccttaatttcttctgtccaattttattccttgtcgcttttcatattaatttttaatatcctttgtcttggtcgctttttgaaactttatcattggattcattaatcgaataagccctaattcatggagattaagctgaagaaagagaggataaaagcaactaattattcattaattcaaaaaccaaggataatacacggtaataatacaagagtagaatcgtaattatagcatcaaaacaaacgctctttaaaaatcttcgtcgagagagaagacatggttatcaaacgcgccgttaccattaacgctagacataacggaagccttttggtaatcaccaacacgtttctcgaagaaattcgttttcccttgaagtgaaataagttccatccaatcgaacggattagtaacaccgtacaccttcccgtacccaagcgcacccaaaagcctatccgcaacaaactcaatatactgactcatcaaatcacggttcatcccaaccaacgcgcacggaagcgcgtcgcacacaaactctctctcgatttcgaccgcgtcgcagacgattgatttcacgcgttcttcgctaagctttgttttgagtagcgtgtagagtagacaagcgaaatcacagtgtaaaccttcgtcacgtgagatcaattcgtttgagaatgttaatccaggcatgagtcctcgtttcttcagccagaagattgaacaaaagcttccggagaagaagataccttcaacacaaaggacataatcgtcaattcaagtaacaataaggaagacccacaaaaaataaagggtaaaatagtaaatataaggtaccttcgacgcaagcgaaagcgatgattcgttcggcgaaagtctgagaaccgtcgatccatttcatagcccattgagctttcttggcgacgcaagggattgtttcaatggcacgaaagagatgatctctctctttgttatctttgatataagtatcgagaaggagactatacatctccgagtggatgttttcaatcgcgatctggaaaccgtagaaagcacgcgcctcagagacttgaacatcggacatgaagcgagaagcgagattctctagtacgattccgtcagatgcagcgaagaaagcgaggacgtgtttgatgaagtgacgttcaccgtcgttgagactgttttcccagtcgcggttgtcttgtgatagatctacttcttcggcggtccagaatgatgcttcggcttttttgtacatttcccagatctgtgggtagtgaattgggaacatacagaatctgtctggggttggtgttaggagcggctcttctggcattgaaggcatctttgaagggatttgaagatttgattgaagaagagatttgattgaagagattgtttgattgatgaattataagatctagggctgaatatttatataggagattatagggttttggggtttttgaatttttgacgtgaagagggaaaatagaggagggaaatattaaaaatgtttgaaatttgtttggtttcgagaagcttgttcgggaatttttatccaaagaaaaaagcttgttgaggaagatgaagggtattatcgtcaatacccactgagatttagccttggaagcgagggaagtgataaagtttggcggcaacatgcgataaatttgccgggtaagtataagggtataaacgacattttgttaaaactcgaaactcttggtggggacgcgtacgtatgtggttctcgtgtgttttcatgtgaggtacacgcacctacgtttgatgtgttgcgatgttacacgcgccaaaatgtgttttagagagttaaagcccattaataagcccaatggatttatcggaccagaatataatcatataagtattgtaattggacttgggggcacaagaatcaagtttgatgtttaaattaaaccgaaacgaaccaagttttataagaacctgaccgatagaattctaataccgaattaaccaaattgtactctcaaatttgatgcgatcgaaccgaataaacttgatatactgaaattcatatttttgactgaaaatatacaaaagaagaaacatttactatgggttataaacttataatgtatcacattatagccttttcctcttacagtaatttagttacatatttctatttatttcaacttatgcataagaatccttgtaaaaacatttaggttaggccctgttcttttggtagtcgcgagatctctccagcgacacttttttaaagaagcgagcgactcattaatccaagggggaagacaccggcgatagtcgctgattttaataaagctttagtgggggtcgctgttattttcagcgactccaaaatcatgaaattgcagtcgcagcgacaagataaagagaagatgcaggagagatgaaagggatgagaaagagaaataaagccttttttccagtcgccggactctgtcgcagcgtctctggaaacgaacagggccttattcaaataatgaaatcatagattattaaatagaaaacctaacaacatttgagtgaccataattttgtttttcaatcttacttaattcagaaaaccaaaatatatatgtgaatctatgatatatagacccaaaaaaaactataaaagcaaatgtctctcatttagtatcaaaaaaaacttttaaaaaaatcaatcaatatcttttaaaaaataaaactacacaaagagaaaatggtaaaattcgtgttcggtgttattgtgggtggagctggattatggaagttaataggcacttttagtggcgaaacttcgtctgaacctaatagtgaaatagaacaaagtaatagtactataactataagcaagggatggattatgctaatattgataggacttgtggggttagtgttgttgaacatgaacgctgaaaaaattcaacataaagccgaagaacaagctcctgtgtttgtgattgcaggaatactcttattttttattcccatccttcatcttaaaggtgtattttaattactctatgtttaatttgttattatacggaattatttagatatatggtggtagtatatatatcattcataatcatgtttttcaaatccaacagaaaaaatttctatcaactgattttttgtcacttatattgggtgacatgcatttaccctgtttattaaaaactggattatgagacaacatgaaataattattgtttttcagtgacaatctatgatttatttattttaccaaaaaaaagaagtataaaaaatgtttttataacttggaattgtatggtaccacttttgttttaaactcacaaaaagctcttaaaaaacatcaaacataagagagagaccctaggctctaggggtcttacgcttgaaacctttttctcctttgcccatatcttctgtgtggatattctcacaacaagctcattcaccttagctttcgaaaactaatacaagcaacaacgccaatggctagaatcacccatcccataacaatatacttctcatcactacttttcttattcttcactacctgtttggaaaaaagtacataagaaaaataaacatggtttcaaactcatatatcttcttatattatctaattttttgaatgtattcatcaaaatattgaaaattgaaatgcccataatgagaatgaacgtacctttgggctcggtattgctaaagtttcaacgccacccaatagtgagagtaagcggtttttatgaaaccccgtgtgtagttgtggagcctatgaaattaaataaacaacaaaactttgagtttgagtttctatgagtaatggacattttgagatgcaatgttcccttcatgatatgccttaacttagtagaaaggtaacaaatccagctagagaacaaaactaaaagcacatgaacttaatttgcttatttatcagctactttgttttgttgatcagtgagtgacatgtttctaatggaataaaacatattggtttgagaaacatataaagccattcatgcataaaccgctataagtaccttgtccgccatttcgagtgatttatggtagacttgattatccggttgcttcaaagatgaaaaatatatttaaaatcaacatcacacatcgagaaaccacaacacaagagagtgatccagatcaacaatgattctgaatggaaagaaaataacctgagctacagctattccgaagaacagataagctaagccaaagtttaatctagcttgagtgtcgtcaggagtcaaacgcgcgtatgaagtgtatgcattccccaagcaccaaaccgcatcatgtttcattgggtcaatcaatattgcatcttcgagttttgagatggcatctacgcaaagaaaataaaattgtaactaaagcagtttttcatcacaattaatttacataagcatgaagcatcatcatacctacaagagcttgaaacattaataaaacaagttcaagtttttaaagaagacataagtgatattacaatactaaaaacatttgattcctataatggttagggaatccaaaatgtgcaatattcaattatgttaagttattaacacataaagcaaacatttaccaccaaaaaaaaaaaaaaaaatacaccttgaatcattttcagtgaatctataacgttttgaaactgagataactctagtaaagcttctccccatctcatcaaattctgcaaaaaaaacatacaaggttaaggagagtgctagaaaatttttcaattcccgccattgattacaaaaacagaaatcaaaccaaggaagagtcattcctctaaaaatggaacaaagaacaaaactaaaactagcaaaacaatatctgaaaatcaagaaccgaagataaaaactaacatctgcatcttctggatttaacttgtaggtctcttcagcgtcttttcgaatttcttcgaaaaaattcagcttatccatggattctcaatggattctcaaaatttcagcctatcttttggttaacgacttcaccatccatctaaagtaggccatgaataatattggtgaaactcataattctgcaggaaaatatattacaatgacttctaatcgaagtctttctttatgttatcataattaaataagacttttgaataccaccatgtattaagttattaaactcacaaacctttagtgggtgctggtggattgtggaagtttatgagcacttttaatggcgaaactttgtcaaaaactaatagtcaaattgaacaaactaatagtacttactacaagcatgagatggattatactaatattcataggactagtggagttagtgttgtttaacatgaacgctgaagaacaagctctagtaaaaagacatttatcttctttcaataataaagtactcgtagtacaactaaaaatcttacacaacaagctccaactgtcaaaacctcaaaaattgaaaaacttcatcaaagtctcctaacgagtctacttaacgaggaggagagacaggcacattagctttcgcgaaactgatccaagcaacaacaccaatggctagaatcacccaacccatagcatcatacttggcatcactacttttcttattcttcactgcctgtgtttggaacaatacatcaaaatatgatcatgaggttcaaacacatcttcttatattatctacaagtcgattacatcaagcaatgaaaatgaaatgtgatgatgagaatgaacataaataaaaaagagagaacctttgagctcggcggtgctggagcttcaacgcgacccattggttgtgagcctaagccttgtttgtaagcttctgcgtgcagctgtggagcctgtactcagcacaaaggagaagaaatttgatcaaagaataaaactttgagattgggtttagaggcaaaatgaatatgaacacaaattggttgatggtttatagaaagaagtaccttggccgtcatttcgagtgatttcaggtagtgtgtattatctggttgctgcaaagatcaaaaacacgtttttcacatcacagatttaaaatcacaacacaaaaagatgagtatcaacattgattctgaatggaaagcaaaataacctcatccacagcttgttgaaagaactgagtagctaagtcaaagttatgtttagcttcagtctcgtcaggagtcagaaacgcaaatgaagtgtatgcattcccaatacaccaaaccgcttcatctttctttgggtcaatcaacaatgcctcttcaaactttgtgatggcctctacacacacaaacatcaaactttcagagcatgttgccatcaaccatagttagatccccaagtatcataaactaaatgctctatacaaaaacctatctttagcaagtgtgaagaatgctgaatcataatactaagcctaaggactaatgattatgattacaaggatgcttgaaacattaacaaccaagttcatatgggagtaaagagatctaaagatgaataagattcttataccaaattcaatcatattaaaacagagtatagctttaaagaaccttgaatcatttgctttgcatctgagatgctatgaaactgagataactcgagtaaaactcctccccatctagtcagattctgcaacaacaagaacaaaaaatcaaaaagattcgtttttttctttctgccatcgaatcacaaagcagagatcagatcgaactgaatctgaaatcatgaaatgaagagaaaactaacatcggcatctaaaggatttgacttgtaggtattttcggcgtcttgacgaatttgttcgaacaatagtatcctatcgaactcagtttccgtatccatggcttctcaaagcttttcttctttcgtacaaaacttttggcttttcttctctcagacctcggcacagataaaaatcagataccggcgcaatgaaacgcagcgtttttttagtgggcttacaatgggcctattatgttacttgtattagtttgtaaaaagcccaacgtcttaatttcatgatggtaagtccattcaaatggcttgtttccattaatagattgacatataacttggagttccatacccaaatgacaaaattatattccatatatttatcagattttattctaaaaatcactatagttttgaatatatattaatgaatgttagtcacaagtgatatgtgagcttgcaatgtgactaatctcacctgccacatgtaaaatcacagatatgaaacaataatttattattaaatatttgtaaagaagataagaggtttgcaaaaaggtagcatcacatgaaagaggattaagatgttcccttttattgttgttctttttgttttgtgtgtgttattctttgaagaaacaattaaacaaaagccaaattgtatagtttataataaagatgtcgaatcaaactgatatttttaacataaacgcatgtagttggatttttaaaaaagttagagaattagatacgaaagcaaatcttattttaaatatatatgtcttcttttattattacataaaaaaaattgtacatgttatgtatgttcagaattaatgatggttgatcaactataaacagattttgctacacaactctttcaattttgtatctcagtcggcaccataatcttcatagacatttcaatttcataaattgtcttactttttttttttccggatcttgattttgtttctaaatttatttatttcttatttataagaaagccttttttataaaaaagtgatataatttaattttgttataacgattatcacatgtgatccatgatttctaaaaagtaatgatcatgacatatctcaacaaagttaatttggttagtaaatcttatattgtgggatcatttctataacatcccttcgtaattttaaggatttattttctaatattttcactaaaattaagaaaaataattaatgatgcagtaatcaatttacttttgtactacgaattatgttgctttccaataattctaattacaccacatattaaatgcatcatttttgagatctttcacatttcctctaaaactaaaaccatactctttaaatttacaaatttagttatatgagtcacttatttttgttaaaagttcaaattaagagccaaaactacgtttttcaaaaactaaaattttagaatggaaccaagaccagtaaaattaagttccattaatttttttatatatattgacatagatttacaccatttacttaaaatcatatattgttttcataattttaatttaaatttaccgcctcaaaaacaaaagaagtagttagagtactatacactagagtatgacttttgaccttctcattctaaatgcctacaattaattatgtattgtaaagttaaaatgcattaatgatttagaaaataaaaatactagaatatcaatcttttgatacaatactaaaattctagaaaatcaatctttgaatttgggaggggtataaaactaaattcagtgataactacgtacactaattcatagtccaatttgatgcgatctggaaaaaataaaagactatacctagatcaataataactcaatccttccatccaatgataattacagttgggactggtagaataaaaaatttcaacctatgaaataagggatttgagccttaacatacatccaaatagtaacatatgataaatttcttatcattgtttgattgaatgatcaaaactattatgtagatctataaatgtgtgtttataaatttttcaagtgaaactggataaacaattctgtctgacacttttttttcttctgaaatgtgaagaaacaattccactattttagtttgttattttgggatataactagttcaaattttaaaatattattaaaattctattaataattttgtcattaaactcttttaaattaattgagttatctttcctaaataaatatctacataaaataaatatacggtcaaaaaaaccaaaaaatctattttgtccgaagaaaaatatcttcaacaaacaaaccatcaaaaaatggttgtcacaaaaacaaatatattcaaaaatggtaaagataaaatctaattggtcaactatatcagacggtgaagaataagtcagcaatcgtagaaaactggatccaaagttgagctttcaggaccgattcgtaacgactgttatttatggttgtagaggttttgggagttacgactttgactgtaaaagctttgactgcagagactttgtttttaaagactttaactgttaaaacatgattggtaacaataaaattgtaactatataattatgattataaataattaccaaatatataagaaactgaatcttaaaagaacaaattttaaaaataattctaaatcaattgaatttttttaaaaagcaattaataagtatatgttatggaattttagaatcatataagaaagaagaaaagaaaaaataaaaacttttattttgtttatttctaaagtcactaatacgggacttaaaaaaaatttgaaaacaaagagtaaataaaaaaaggatgggaaagctttaaaaatttttaaagtaaaaaaatcttgattcacaaaaaaaactttgaagacttctaaaatcattttaaaatcttaaaaacctcaaccaatcatccccttcaattttcaaaattgaaagctactgtctactgaggcaatgacgcgtgtttgctacggcaatggcagaacaacgtaaataattcaaaagatgagggggtatttgggtaaaagagtttctgataaaatctcacagatccaaccaaccattgaggaccatttcttctctctcattctctcttctgacgtgtttcccttcttcggtttctcatcctcacgtccgccggatttcgaggaaacgaagaagaagaagaacaacaacaacaaaaggtctctctcgagtttctatgtttatctttttctataatcccttagtctagtgttgtttagactttcaattctgctccaaaatctctggatttttgaatctaccgttcattttctagagattttggtttctctcagtctaagagtcgtcttttgaaatcttgaatgatgaatctgagagtttctatgaaatttgatggaattttgtgtgttcagttgttgattagggtttgggattcaataactttcaaatttggtttcgattaggttcgatttggttatttttacctgtgaattgatctcgattcgttgtattaacgtctctttgtgtttttttattctgtttatgctagccttttgagatatggacagcttctggcaattaggtgatgagctacgaggtcagacgagagcatcagaggatcacaaatggtctactgttgcaacgaagctagctgagcaaactagaatgaaaggggagaggatgaacaatcttgatctctccaaaggttacactgagtttagaccaagtgagaaattcagtttccaggagaacaatcttaacttcaacatgttgaatttggatggtaaatttggtgaaagcatcatggggaagacttcgatgcagagcaatgtttataatatgaatactgttttccagaagaatgactttaagagtggaggcaacatgaaagttaacaagtataatggtaatgttgttgctaacaaggagatgagcaacaacaaacataacaacaactgcaatgataatgggaatatgaatttggctgttgacaagaggtttaaaaccttgcctgcttcggagactcttccgaggaatgaagttcttggtggttacatctttgtttgcaacaatgatactatgcaggaggatatgaaacgtcacctctttggtaatttcccaatacccttttctagtgttttactgatattcaaactgcaagtaaataactttttgactttcatcattgttcaggtttacctccaagatacagagactctgttcgagctataacacctggattgcctctgtttctttacaactacaccactcaccagcttcatggtatctttgaggtttgttctcgtgctttttttttgtcataacaatggttttgatgctaccatttactgaaaatttgatgttcgaattattccgtgaatgattccttgtttaggcaacaacttttggaggtactaatattgatgctactgcttgggaagacaaaaagtgcaaaggagagtcaaggtttccggctcaggtgaaacttaaatcacaatgactttcattgttttaagtctttattttgatatcttgtactaatataacttctttctcttaaattgtaacaggtaaggatcagagtgaggaaaatctgcaaagccttggaagaggactccttcaggccagtacttcaccactatgatggtccaaaattccgccttgagctctctgttcctgaggtgcgtgtccatatacgttttgtgaatgtcagtaataagataattaagtgaacggaaaataatctgtattgtgtgtcatcatgtgaaaattggaacttggaagtaattactctataagctaatgtggaaacatcatatgattatccatggatttagagttaggattgagtaatgaacactttattgagactgattatgtgttaactatggtgtttgttgtagacattggatctgctagatctttgcgaacaagctggttctgcataagccgaaacgatcaaccttgcaatgccacgttgcaaagagggggatgttttgtatgaaatctatctatatatgtaagacctaccgtaagagcgtaagcttttgggatttagttaagagtcggattcaaatgtatgtttactaagaagggatgagagtatgtgtggtcttaaggcaagcaaaagagcgaagaggctctgccgaataagcgactactcttgttctgtgtcgtgtctgatgtgtgagtgtgtgtctgtgtttgtgagagattcgatactctttgaaacaaagatttatgtagaagaatatagagaaagaaagactactataaacagagccaaaaaatgatgtgagctactgtttgtgcttgcttgtgtaaggataaaacaaattgtcctaaatgacaagtttaacttttaagtaccggagtcattttttgacaggttcgttatgctgctagtaccctgaaattattcgttttcaattacccattatatcgaaaaacttcttgtaatgtgttctatgtagtctgttattaatggtatttgattctgcgtttaaaaaaaaagtcaaaacaaccaattcaagctcataccaaaaaaacaaaaagagaacaaaaaaaacattatagcaacatcaatatttaaaactcgaacaatcaataaacacctcatcaagtattaggttctaatgcccacggtgggcacatgttcccgcggcgtcgtctggcaaggaggacgaaacaataataagaacaaaaatataggacgtcgctatcatctcgacttatgaatccatgatagttatatggatcatgaagaatgaagggacctgggcaacgacaattgcacgtgttgcaaagtggccgtgaagagctattgttagacagaagtctataatggcggtcgatcattcctcttggtttggcgtacctgatatccccaaccacgcaaaatatatgcgaagtgaccccgcaatctttacaagtgtagaaccaaatctttggatttgtttctctttcgcaaatatcacaccaatatctgccacttgccttttcatcaccataacaaagagtgagtggatgatcatcatacctagaaagacttaccgttaatggtagagtggcacatcgaaaatccagaaaataattgcatttgatacaacctagaacgacttctgcatgatcgatgccacagttcttgcaagtcttcacttgaccgtattctagtttgatatagagtaaatgatgatcatggcctccatggataaaaggcacagtaatcgaactgcatagtaagtcaaaattctcattttgatatgtagagtagatgaacccttggcaacagatttgatgacaagctccacatttttcttcttttcgttttgttacgaagtcgagagtgagaggttgtgggctcagaaaatgtcgtttcttcttccgaagattagcacacgtttcatggagaatgaaactacaatctgattctgaacacttgtagaacgtgcaagaaccgatgggacgaacacatgctccacagaagttgctttcttcactgtctttgctgaagctcatgaggttatgttgatgagcgaaatgtttgattgtgttgtcagcattcctcttgaatggctcgacatcttcaacttcttcaggtaccccatcaagctctttgccatcccacacatctttccttgttgcacatcttgaatgaatagcataacttggacaaaaggaacaagaatatgctccatatgaccaatcaatctcttcccaacaaactccacatcgccattctccaggaccaagaggatacttgaaagaaacacggtggtcatggtgattgacgtgaataacacgaggtaaatgagtacactcttgatggaaggtcatgaaatcacattgtacgcagacataaggagccctgtcgcctttcatgccacaagcatcgcaaacaaaggaaatcaatcttggtatgctcatggaccttcatatttgaaagagcaattggtaggagggttttaatcgcacaacgcagatccaagttgaacttacacatatcacaatgataaattaagctcccagtctcgtctccacatgtatgacaacttcggtcttttgtgtaatctggagccccactagtgagaagcttaagagggtgtctgacatgagaagggtgagtgatctccggtgagtcaaatacagagaaacaactctcatgaatcaccaacctgcaacgaggacaaaaatagccttgtttgccacgcatatcacaaacgtcgcatggcattttatccacaaaatcaaacataagtagaggatgtttgtgccacggaacattcagataggcttgggcagtcttggtattagccatgcaatcgacatccaaattgagtttacaatcagagcaatgatacagaaggcgctcgtgtttctaccgcaaagatggcatttgggatcggtgtgatcgggagctcccgttgtgagtagcttaaggcaatgtccaacatgagaaggatgatcgaatatctcttgtatgttgaacacgaatatacatttcatgtgaatagtaaacttacattcactgcaagagaagccaacaccatatgatcgatcgcaagcatcgcattcaataccatcacgatggtaaattagggatacacgatgctcgtgtccttgtaacgtgagactcatagctgttgcggttagagaggatcaaattaatgttttggggtaatagcactttggtttcgtgtaataatagatcaatatagttgttcatctatatactctaatgttggcgttgacaaatatgtagtaataaacctagtgggaacgtcgttagtcttagtttaatttaaactctaatattaattgtcctattcaggttgtgtctgccatgttagtttgatttctttgttgtcttatcttagctcttctagttctcaacagacaatcatttctctgaaaattgtattgatccaggaataagtcaaattgatgacagttcaaattgtatttgtttagtcctcctctcttgttttatttttattataatatttttaaactatgaagtatgaactaaatttcgttagtgctttcaatgtatttgatcaatccacaattgagacaacatattcttgaggatggcaacgctttgatttggtacaaaaaggagttgaaacctgaaggaggaggaaaaaagctaattctacaacagcaaagatgatacatttgataaaaaaaatttggctgctatctggttagtgtttggatacaactaaaaaccacaacatagagacaacgacaccatgttcgtagtaaaattgtcaaaacaccatcaaagagcagctgatacaatgaagttttgaattctgttcaacagctctgccttcacagaatctggtactgaagctgcagacatacacgacaaacatccatagaaacaaagtcaaggttactaacaacgaattaacggatacagaaacggattgttcgttatatattttacctctgcctttaggagtgatcactcggatcagttcatcgactgtaacatcttttctccctttcttctttacatgctccctgcattccaaaaagaagagcttcaaatgtatccaagcaaaaccaacttctcaaacaaagatagttcacttgttaatccaattcagttaacagaacaaaagaaaaaaaatgaaaatctttgctttgcatcatcaacaacaacaactaaccaatttcaaaactcttatgcctcccaacaaaccaaacataagcaacaaatatcttatagtaagatctttagcttcacatgtaacaacaatcaaccacaatttccaaagtaaaccaacttctcagataaacatagctcacttgttaacaaaactatataaaagtttaaatcttttggtttccactcacatcaacaacaactaaccaatttcaaaactcttaatcctaccaacaaaccaaccataagcaataatcgatgatgcatttgcctggacaaagtatgctaaactctatacttaagaagctgtaaccaaaccctaattagtcaccagaaactgctaccaacttcagaagattgctctgaaccaaaacttgttctcaaaacgaatgctaaattaggttaaaaggtataaagaacctgcaagcaattctcatctcatctttccaaccacactccaccaatctatctctcacaagctccattagattctccttctctccactctccaccaactatgacgatttcaaatttccaaaaacctttcaatcaaaagtccacaacagtaactgaaatcgatttcgcattacaaaatctgaaaccttgacgttgatgatttctcgaagcgtgaccttgtctttctcgaaaccatccgccacatcgtcttcatctggtgtcggaggccgattcaccgaatgtttcctgatcagaaaaaagcgagaaatcgaaagatgaaattgaagagtaacgattcagaagaagggaataagattgtctaatacatacatgtgtttgaatcgatagattcgtttcaagaacacgaatcaattgtgatggatgaacttttttccagagtcttcttcagcaaacccagaactgtatcgcacgacgaaggagaaagcacacaacgagtcgagatcattaaatttcaatattataaactacgtgccgtttgttaaaatttgccgaaacaaacaggctgttttgtttaagtccactggatagaaactacgtgccgttttaaatggactctacaagtagggaaaaaaccttaaaaaaatccccatcgattttctattttgccgtttaatacccaattatttttggttggaaaaaaatacacaaagtagttaaactgtgtgatttaatactcaaaaaataacatattattattgtcatactcacaatttcataacaaaagttaaatttcaattatacccgtattgttgaattaactattaatttgtaaatgacatgacaatcatttttattttttcaataaaaagatttatattttgttttactttttcttatttatattctatgaataaaatgacatggtaactactttatttataaatttcaaaataaaaaattatagaaaatctggagaaaaatagaatttttagtaaaattagtatacattaatatgattctcatttttaaaaattagtatatattattgataactgttttatgatcttttaaggtacgcattcaagaaacaatcacaaaaaagagttatcgattctttctcacctcctctagcattctcacatcctcctagccttcttctttgtttccaccatcttctccgtttccaccatcttcatttcctcagcctttttcttgtcttccaccattgtctcatggatctacttacctctcagtctcataatagatcaaaaccatgtattctcatagagagttatcacaaatggcgctgtatgggatgatcttctcgtttgttattgccttcaactcgtggagcaacactttaaacctaagcatcattataatacatatgataatgattttcttcaagtatagttgaaaatgatttatgaagttcaaagtacataatttggcttgaattttacattttaagttagaaattttatggttattagttttaagttagcaaatcagagttctgactgatatggcgtaaacaatataattttatatttatgtcgcaaaatagtaagtataagatttgtttttaaggagaaaggggtagatagatatgtagataatataatacttttatatattaagtatgttttaataaaaaacatttaaaagattataaataccaattagagtagaacaaatatgaaaatattaattaaaaacaaatttgaactaatccactatcaaatttcaaagttattgactaaactttgaactaatccatatatgataaaccacttatgtcatgtgggaaaataataatatttggcaactaatggttcagaaaaaaatattttctcgcataacaaataattcacttaaacgtcaatttcctaaattttgagtttttaaatcaccagagtgttaggtgaataagaatacttaaaaatgttgtgctatgaaataatcaatcaaacaaataatccaaatttttagaattttttcgtcgaatagtgtataagtgtacgaaatttgcaaaaacccaaatgttattttcaagaatagtaagctcttatgttaaacttaaatgttttcattgtgagaacgaacgtcttttaaacataccatttaatagtaatatgtactaatgttattgaaaacttactttctgctaatattggaagcccattaaactaaggcccatgaaagaaaacacccacaccgacgtcgtataggaaagatgtagtcatgtgaagaaaaaaaattaacggtcaacgggaaaaggaaaacgatggcgcgtcaaatgctaaaccattaaactacggttgtggacggcaaacgcttgtcgtctccgaaacgcaaccgcagagaacccaaatttatatcattctatatcttctcttcttcaccggcgtacaatagcactcaactcttaacttacgcacctctcttctctcatggcggtttcagtctcagctccggttttgtccctctgttacaatcagagcggcgaattgtctcgtagtttgggatatagactaccgaagaaagtgggatttagctctggtcgtcgttcagtgagttatatcggtttcggtgcggagaaagttggaagatttagggttagggttccgatttgcagagctgtacctcctctcttgttcaaagatctcgatgctgatgatttccgacatccttttgataagcaggtccgtaaaaattctccaaatggtcgtaattggaaactatatatcaaactttgatgatgtgatttgaaatatttggttactcttttgtgtgtgtcactgtgttctttgtgtttgttcgtcgcaatcatcatttgctttttcaagaatctggttgatgaaatatccaaagtttgaatgcactgtcttttgatgcagaacacgttgttactaagggctataccggggttgaacgaattcggcaaagctcttttaggtgtggctctttctagttacttggcacaaagagagattttgaaacagattatgtgatttaacgactttggggatgttgcagggtcaatgacggagcagattatgcttcttgagaacattgggacttctgttcttgtttccaagaatcaggttagttgtggatcagtgtctttgtggacattatgtatttgtctatcaatagtgatgtgtaatgtttcttttatttgctgtctcagctctctgatcttcacggtttgttggttgaggctgctgagattttgaatatagaggctcctgatctatatgtgcgacagagtcctgttcctaatgcgtatacgctggcaataagcggtaagaagccgtttattgttgtccacaccagcttgatcgagcttcttactagcgcggagctacaggtaagatatttttttctgcattacaagttcaatgctttttgattgaacccacttttgaacctaaccatagatactacatattggctaattttaccaaaatctgacagttttatacctcaaaactaggctgtcttagcccatgaactaggccatctgaagtgtgatcacggcgtgtggctcacatttgcaaatattcttactcttggggcttatacagttcctggtagataccacactcttctacatgtccaagtcacttgtatctactgttctgtgtcagtctgacaaaattatagtgacttcatcccggaaatctatttatcgactcacataagtttcagtttgcagccggcgtgaaactctgttattgttactaaactggattctgttgtttgtagcttttgggcaaatgatagctcgaaccttggaagaacagttacttcgttggctacgttcagcagagctgacttgtgatcgcgcagcactactcgtcgcccaagatccaaaggtaccaattctaaaaaacaagaagaaatcaaacagaatgcgaaaatacctagtgatgtttatgttattgttcttataatctctcttatgtcgcttccaagaggttgttgtatctgttctgatgaaattagccggaggatgtccatcaatcgctgatcagctaaatgttgacgcatttctagaacaagcccgttcatatgacaaagcttcttcaagccccttgggatggtacataaggtgagaaaattaaaactatacaaaatttagattattcttccttcagattcacttctttgtttgtttacatattttccttttctacagaaatgctcagactagtcaactttcgcatccattgccggttcttcgtgcacgtgagattgatgagtggtccaggagtctcgagtacaaaagtctcctgaaacgggcaaatcgaaaaagcacagtacagaaggtttagtgacgttgttaaagatttaaaaggaaggaagcgaaataaacatgtataggtaagtttcatataagcacacatttgtatatgaacctgagtttttacttttgtgggtcgttttaaggtttgtcttgaattcttggacaggaacaatacagaaggagcaaagaagaaatgagagattggactctaggtctaaataggtactgtaaaactcttgtatttatttagtggcatactggcattgttgtatatcttataactgtaatagataaattcaaatgtatattccggaaaacaaaagggccttagctcaaagataatatatgataaagattgtttgtataactcacctgtctcagtcttagaggcttaaactaccaaactgattgttccaattttcatagattccaagttcgttctgagaaacagaaggccttacttcttgcaatgcgtctttaaagtcctgcataatgaccaaatatatgaaacaatgacagaaacaaaaagaattcgtttagctttacatgtttgtattcacagagttcgcatatcatcaatttaagtttgacccgaaacatgatgataccacaaaaaatcttcattttgattttatgtacctgaagagttactagacgcatgtcatctttagtcaggttagttatatctatgcctcgtttgagagcttctcttaatggacccatagttgcatctttcaccaggttcttcatatctgatcccgagtaccctgcagtgaaatttaatgaaaagctagcttggttatggccgcaaatgtgtatttgcatttttgggttgtgttctttggactttaaagatcaaaaatccagagatttattgtgtttctgaagttcctatgatgaatttaccttccgttaggttgcatatgatgttcatatcatcatccgacagagtaaacaacccatctttctttaggagattctgtattatccatgctcttgcttcttcaattcgaaaacagagaatcgtgtcaagagagtatattagacgaaaaccagagaatgacatgaaaaagtttgtttatcattctttaccagatgaaggaagaggaatgtagagtctcttggttagtcgtcttcttgctgcttcatcgagctcttgcggtctatttgttgctcctaacaaacaaaaaaaattagcagaataaagttactaaaccccatataacccacaaaactcaaaccttactgttcccagttttttacctattaggagaatttgctcgctgccactgtcgaaaccttccatttcaatcaggaattgtgtcttgagtcttctactcgattcatgttcaccatctgacttacgctgtggcaaagggtgaaagttcgtttctttaatagaatgttacataaggaaaccaatacatgccagaaaattgtctttactgaaccaccctttgtaattttttccagcccttgttctacgctgataggtttgagggtttatgaacatgtaatattttgagagattacaacaaacctgagatagtagagaatctatttcatcgacaaatattactgcaggctggcggcaactcgcaactccaaaaagggccctcactagcttttcaccttcgccaatctgcatttacatttgtgatcgttaaatttgcaggtgaccgtaaagcaaatgaataagcatgctatagacatcttgagcaggaacaaaatcactgacatacagaaaatggtacgggtttccctgctatgtagaagttctgacatagtggaacataattactgtcgtaattttacgaatatccatgtgaaagtaagcaaagaagtggaactaacccacttgcttgtcaatgaactggctgatatatagaaaaaggttgctttcgcttctccagctatagcttttccaatcattgttttaccagttccctggtatgcagtagatacagatctaagaaaaaacagacacgagtgtcatttcatcttaaatatcaaaatggacaagggtacctactggtgggccaaagagaagaagtccttttccaggtgaacgacaacctttgaaaatgtcaggacgcaacaatggccaaatgaccatctcagttacacactttttagcatgctccagaccagctgcacatcaataacttatgatgagaaactccaggtgcaacagggataataatatacactgcactgaaacatcttactgtaccaatatcatcccagcggacattggggtctcgatccataatctcgttgctgacatgctctataagacgaggttccaaatttctcaacttctcgggaagctcaccatcaggaccacagagcatctccaaactagaacaggatagtaagtaaatgggcatgcatgttatctcataatataaaattaatcttttcaggcttacaggcgtagaaggctactggataattagaaacttatgtgaagtagcattctaaataagaacgagggcctaactggctaaccaccagatgagtgtagacgcttaaattgctagtcctattgacatgcatatactattttttatttacttttcatagtgtttcaatgtgaaataaattcaaaaaatgtttaatatagaaacttagttagagaagggcagagacaggcatagcctatctaggtgaaaatcaagaaatattgacaagaaaaacagattacataagcttatttattgtcgaaggtgaggatataaaaagggtgcatgtgctttccagtttgctaaggatcttgaatcaaaataagaaattacgcaactaaccatgttctggttgagtcatccagtgcatcgtcagtctttccaccaatacgagacgtcaagtttccaacattattcccattagttttaacaggagggacaaaattactacggtatccacgtcttaatccacccgaccttgaaccatagcccctacctaaagcatttttgtcactctgtggagaaagacatgaacttggtgactcagttgatcctcgtttttgtcttacatccatttcctaaagcaacagatatagtagtcaacattagcaaagggtaataaagcacagttcgaaagaaaagactctgcaaagtcaagatgactctaagagaagtaattgtcatgaataaatctaccagttttattttggcggatacaaatccattaggagctccatcttcctttacttccccatcatttgcaaggctactggtttctgcatgaggtcgctttgttccaaaaccaaatccatgacttctctcaacaatgacacattcatcagaggcacggtcttgattgttcactgaagttttgcgctgattatctggtttaccaatactgtttccatacaatgatgtcagtttggcttgcatcattgactttggtgctttgggaatcaacttatccgtatcatgccgttcttcctgaaacaagaaaacatctatgaaatcatagtagaaacaggaagcaagacatataacatggctgtgtttccaaaactcatcaccaatactaagatcattgaagaaatgaagcagtttacaagagcattaccatctctttaacaccctttccgttagattgactgacatgaaaaccaaagtacttagactgcttaatcttttccacatcaaatccacctttgctgccaaaaattgcccctggagctgtatttgcaagctcaaacgccttcctggatacaacaagaagcacaccataaaagggtactctaaaaatctcaagtgtagctaatattgacgataattcaaaaagatctttagatttcagctagtaactaagtgaacgaagtccaaagattagagaatatcactcagttatacatttccctgattccaatacccaacaattcaagccacactcataagactctactaagctaagcaagtaaaattcgaaccctctcttcttcgaaattaaacaggctcaaaggggaaaagctcaggtaccgatccgaatctgaaacgaggccttccaaagctaaatcaatcttagaggcaacttcacgacgaatgggaccaatgaaatcacgatcggcgtcagtgacagaacgagaatcgaggaaacctagaagacgaagcccaaggatctgagcagaagagaaatcagatttctccaggaatttgtcggcgccgaagagcagcgattggagacgcttcaagttctcatccacttcctttctccaacacggcgtctccgtttctccttcctccttcacattcagaaactccggtggtggtctcagtaacggagaagaaaacggcgacgaacgctttcccgccattatcctctcttcctctttccccaaatgcccaaaaccccagaaatgaaattcaaattcgcgctcagaatctgaaaccaccgacccacacattcctttactctctcaccagcttgacgcgtagaacgtcatgcagtgtaatagtgtagatagaaacggcgtgtagtttccttagaaatcagttgcttatcgggcccagtttcttcatgggcaatagtaagcccgttattgtctgtattttgggttttactgtgtttcggatatgcttcctctaaactttcgtctttattttttatatttttacatagagaatattaggcacttaaaaatcattaggcactttgactaattgcaattacttgtttaccctcaaatcgtcggttatatataaccaaacaaatcaaacccattttcattaaaccaattccggttacgaaacccacgattttgattttgcagttaccataatctcttgttttattttttccggaactgtaaaaaaaaacaaatccagaaaaaacctaaactacagtttcagaaaaggtgactccgacgacgggatatcaatctcctccgttactgtctaccaccactacggtttacactactttctttcttcttctctccaccgtaaaactccaataatcgatttcgtaatctcaaccactttatacccttgtgacttcggcgaggggatatcaatctcctctttaatggatttggatttcgttactctaattcaacttcaattgagtagatttcgagaaaaagttcttgaattactaaggtaaagttatgtgatgttgggttctatattctttggtttatccaatttgatatggcgtccgcaaatattcctcgattcgaatcttcggcgatcataaatcttgcactgaatactatggaagagaagctaccaagatcgctcaagaatctcgacttgaatacgaaccttgtaccaaagattaagattcttctttcagcttatctatcttcctcacgtaagtctcactttcaacaattttttttctcgagctgggctaaatttggtgttaagcatggctggtgatatttaggagttggaatttgacaaagttttctactagtttgcttcaatcgctggaatgtctccattgaaatcgaaacctccatctcttgtgagattatgttattaggaaacatttagaggaaatgattccttgtttagctgaaatctatgttatatttccataaagcgacgtttatgtgaacaaatttatgtggacttgttatcatggatatgttatggacaaattagtatttgaaattgtaattgacggttgtgtaacggattgtgttatggactcaccattctcgtaacatgattaaagataatgaaacgagattgactattgataattgtgtgtttattaaactttcgcaccggtgaagagattagtcccttgaacttgtgattgtttatgttatatcttgagatgtttggtatttaaaatcaaactttgacttgtatttaaaacttaaaatccaatcgagaagatctagcagtgttaaatgaacagagctttgtggacaacgatatttggacacgtttctttttaccttcctctcgtactttacttgaacttgtctctaagtttgctgtcaaattatatggctttttgagtatttaacgtctcgtcaatgccaaagtattcatatcaaatgaaccatttcaagtgtatgatccaatatagattaattgaacaccaaaaaattcattatatgcttctatttccaatgttgtggtatccattttgtattgtccatatgaacaatgtacttttgcaggttcggtgaccatttttgtatgttggtttcctcttttgtacccaaaatagtttccatcgactattaactcaaaaaactattttttcaatctctttttttcaataattttgggttttggttatccttataaatcataactattcttcaatttgtaattgatccgtacaagtataactatatatggtcaacacgaaatggtcgcttgtggatggctacttgtaaagtgttagagtatactttgagacctgagatgcacatcaagaaacttggttacatatcattgttacttaactgtctatacacatgtggataaatggtcataatggataatgtactttggattgacgtttattgttcctcgtataaacttatgtattagtatgaaactaccatgtgagttattagatgaccatatggactagactgcttggatagtttcttgttcatgtataaacttatgtattagtatgaaactaccatgtgagtcactagataaccatatggactggacttcttggacattcattaatggacaagtatgtctttgatttgctgcgaatgtgtttatagctcgataaaattaacacttttttgtttgctcattcaacattaacattggagtccaactcgatcaaattcttagcaccatcataaagctcaatgtttataccagacaagatcaacataagccacattgagtttagctttgttcactcaattttttttttgccgtctggtataatattaattgaaaagtcaaaacagagtatagagcatacatccataaaaaaacagagcatgaaaactccaaacaataaccaaaggtaaagaaaaaaaaaatccaaaggtaaagaaaagaaaatttcacaaagtcatcatcgcttgtcttcttcaattctggaaagtaaccatccagggcctcctctagctaaataagatc

SEQ ID NO: 471 - DNA, 63604 bp, Arabidopsis thaliana
aagctttttgcagaatttgtctgatttgactatagacttgtgtgaagaaaagctcggtagaatgatctaccatggaagacattgcattatacacaaaagggcagagttaacatgtaatcactaatcaaaaagaagagaaccgaagagctgagaacaatcgagaaagaacccacaaatgtcaatgtttaatcttactgactggttcgagaacaatcgagtttcgagcatcacaaaaccatgtcaaccccaagcggggttaggaggaggactccaatctaccgtccatggttcctccataaactataaccatttaataatcaaaaccgattcagaggtcatcaaatttaaaaagcctaataaattaaggagataaccagaataaacaagtgcctaggaatcagaagaggactctttcctgcaagttacacatcaattcgtggaatgtgaagttttttgttcctattgttgagttttactgtttgtgttagaatttttctgtgattgagcgtgaattttgtttttttcttcttctttcttttgaatatgcatgcgtttggaagtgtgtttgtgttatgttttcgtgtgtttgtgttatgttttcgtgtgtttaaatttcgtttgaacgtgaatttgtgttttttgccatctttgatctatatctgggataaagcaacatggaaaaaatacatgatgaacaagccacaggccagaggactagtctgtgaccagtttgtggtaagagagagagatacttacctcaacccttgtatgctgaaacttttggtctttgcagcttaaagattttttttttgaacgtgaagtacctgatcaataaagtctgcaacaaccacagagattataaaactaactagaccaacaaaaataacagaaccttctttatggaatattgtggctatctaactatgttcacgagatactccaagaatataattaaaattttctaatccaactctttcgaataataaagtgttgctaacaattgaaatggagatatgaaaaacatcaattagagaatcaggtaattaacatcttatggacactaaacatcttatgagtattgtagttatctctaagcattggtactatcaagtctaagaactaccgtgtttctgatattagcttctagaccttaccttggaagcttttttgaacaagtatccttatcttctctgctgatcagcgagctttattatgttttcctgcaagtttacaaataaagtaacagttattggaaaataatcagtaataactttgtcttttctacacaattcttattcaagtatatatacacgaaattgagccacaaaacagctttcaaagttttgaattagcaaaagtgattatgagattgatagacaaaactgaaccaggaaacgtttacaattgcatcggttgtggcacatgatgatagttgaaacaaacagagacaaatcatgtgattttccataatcaaagaaacaatgatcaaatcaaaacacatgtaactaatgttattcaaaaccctaaaacgttgattatatatatttaatctctcaaaaactagcaataaacaagattaacagagatgatacgaagatcatcatcacactgattcttctagatcgctaagactagggtttatacctgagagatttctgcgtttgtgttcaacgatcgaagcaacggacccagattcaaacagagatgatacgaagatcatcatcacactgattcttctagatcgctaagaatagggtttatacctgaaagatttatgcgtttgtcttcaacgatcgaagcaacggacttagattcaaacagagatgatacgaagatcatcatcacactgattcttctaaatcgctaagaatagggtttatacctgagagatttgtgcgtttgtcttcaacgatcaaagcaatggacccagattcaatcaaacgcttctgttcttgaataatcggaagagaattttgaaggaaatgaaatgatcgatgaatcaaaaacaaaattaaaatcttggagagaaatgaaatgaatagtttgcggagagaaatagaaaaagctttgtatttgtagtggttaagccagttaatatgtaactacgaaaatgcccttgtttattccgttaaaccgtttggattcaaaattgaaaatgagatttttcccccctggatattttttccgttaaaacgtaaaattcgacacaaaattcaaacgtacatttcgaatcacatgggctgctaataattggtttatgaataccgtgttgtttagtgtggtttccggtttgttttagtaaaccgcaatttcaaataaaaagtaatatgcccttccccaaaacctctgttgtttcgtaaaccgcgggactctatctttcggaaaaaaacaaaattaatttgtttaatagattaactatatatataacttacttatacatatttttaaaatatgcaatccttagatatatatattatttagtgtataattactatatttgaggtttgtaggaacgataacataaagttcattcagttttgatttattagaaaaataaactgtttttcttttttgcatttagaggtcagaaacggtataccactgatcaattctgttataaatataaataaataaattttaagttgtatttgttttgttttgtattaaaaattgtattattgtattttgattgttaaaatctagaatttcacctgtggtatacggcctcgtattaatatcgacacatgcccgttccactatataaccacgtctcgtaaaattaaacaacattttgttatttttctttttaataatacttttatttaaaaacatataattcaagtaaaattaaaagtttgcttttcaatggttcccataatatatatatatatatatatatatatatatatatttacttttataaagctcaaatataaatttatttaattatatagttaattttaattatatattcactgacacgtatcatgatctcgtgagttactaactttcaaaaccgtactttatataataagattcatggaccgattgttagcccatggtataattgttactaaacaaaagactttaataagtgtaaaattaaaaatttatgaaatctatcaaagttcttaaaagttgtcatgaataagggatgcttaaaagtgttgttgacgaaaaagtcgtcggatatgaactgcttaagccaagaatcttgaaatgagttttcaattctagtaattagtaagcgagaagcttccaagcagagggaactaaaaaaaaacaaagcccgtgaagattctttagacaaagtaaaacacttccattcacacacaagcacaataaccattgacaaacactttggtacttcttctactcgtcggtaccaaagtagcgatcaccaaactcacccaagcctggtataaccctgaactcttcgttcagacactgatcgatttctgacgtcacaatcttcaactttgggaaccgtttgcagacgcaatggattccttctggcgcctgcacgatgcagaatcgattgtaagtttttgactgagagatagagagagaacattggttgatttaacactcactgagataagattgaggaatataatgtgggcttcaggtactcctttctgtatgagtagttctatcgcctgatttgcagagttaccttcaagatatcatccaaagtggaaagattcagaaaaaaatatacttcaaagcagaagaaaaagaaatagaaataactgaaattacctgtgcctaaaacaggatctaatagcaggacatgacgctcggagatatcacttggaagcttctcgtatataagctgattcatatgcgaggaagtttctgagttttagaaaggagacgtgaaccttgtaaactgttaagagtacaaaacattaacagacctgcattccattgtctccgtcacgatggatgagaatcttccctatcttaatccctttgcaacatgcgcgcaatgcgttttccatgctttcaccactaacaaagcgtacaaaacagaaaactttaggcaagagaaaagaattaaaaaaggaactcactcaacacatgagcaaacaatcaatgtatgcttccacatgcgcaaacaatcaatgtattcttccaatgttactatctattataaacaaaatggaaaactgaacagctccagtctctatctattaagaactataaaacacgtaataccttttaacgctcaccttcgaatgactgagaccccacagagtttcttgcagaaatcaacaccgctatacacagatcctgatttgtagaagataagaaattatgatcgtgtggatgcatgcaatatatcagcaaatgccaaagcatgatacgttaatggatctcaagaacaagttggtctagattttcagacacaatgactaccactattttattttaataaagtatagtcacagctcaagccatctatctcctcttctacctgtcggagtaactacttgtttctcagtgaaaggcaaatggccaagaccatgctccacaacctgaaataaaggcatcaacaattgaaatgacaaggcgtggaagctgagtaacatttaaagggatgacacgagtaaaaagagtaccaaacgaatgaggcgatctgagtaaaacacgaagtcatgttttgatatgtccttctctcgaatgagagtgtgcatgcctcttatctgcagttatgatcttaaagtgagaatatggttttaagccttaccatctgaatcaagcatcaaacagcaggaaaaggcagaaattacctgaaatgttgtttcaataacaaaaacatttgggtagattttgcagagatcatgttgcccaagttttgtgtggatatgttgcacaatcaaatcaactgcaacgtgattgtcacctcctcgtggaatgatcacatcagcatatttctttgaggggagcacaaaatcatcaaacgcaggcttcacaaactttgcatactgcagatgaacataacactctcaaaacaagataaggtggaaaataaaggaatctcagaaagaaacactgttataaagaagaatagttcaaagggcggaattaagctagagtcactcgaacaacaagagagacattgaattgttcagtatttcacaaaaacccataggctgctataattctttgtcttgtattcacacattagagcactaactaagataggtgaaccttggtgacaaattttaccccaaaacctgaaacaaagactaacctgttcaagcacagagtcaacatccctacccctctcaaccgtgtcacgcctgattctgcgagcaagcctcacatcagcatctggaaccaataaatggctaagatgagaactttttaacttcaaagaggattattgacatttcagaaagattcaaagtttgctaagtatatagctccaaagggaattcattcagtccttaatggtcaacaagtgatgaaatggcgaaagtgggactagtgagttaatccatcaaaggccccatcaggcatcagccagaacagaaagtggacagtttccatcaaactataaaattgtcactatatcatttatagttgtgcagaacaaataaggtcatattataaaggagaaccaaaaagaaggagagacaagatactgcagctagttaacctgtgtcaacgaagatcttcatattcattaggtcccgaactcgtgagtcatgaaaaactagaatcccttccaaaatgatgacatcacaagcattgacctgaccaaagcgacaactgattggttttaagaaacgataatccgaagattcagccacatgacattacaagctaaacccataaaaccgcagaaaagaaccatataaggaggtcaaacaaaagaagatccatgcacctggcgaaaagcatctactttacgttgatgggtcttgaagtcataaattggaatttgatagggttgcccactcttgagtatgtcaacgcaatgcaaaagctgctcagtgtcaaaggcatctgcagaaaatgaaaaacaagagacgttaaaaaatttcaccaaaacatcaatgttcacaaatcaaaagaacaactcaccaggatgatcaaaattgtattcttgtacatgctcaagttcttcagatgtcaaaccacggtaaaacgaatcctaatcaacaaaacagcatcagagtaccacacacaaaaatactgagaacagggacgggtacagaatctaacctggttaactaaaacaatgcgatgatcatgaagttgctggattatcatgtcacataccgtcgtcttaccagaagctgtaccaccagtaactcctacacaagtcaaaggaaaacatgttcaagtaaatcaaaggattaaaccctagaaactgattttgatccagatttctctaatcttggaagcacaaatgctaccggaaaattcgtacagctaaaaccctaagataaaaccctataaaatgcagtagaagcaccaatttcaagaaactgagagatgatacacgatgatcggaataagagaaagttcgattgttgactaaagcaagaatcaaagagcgagaatcgaaaaataaccgataacgaagggctgatgaggagcggcgggatcgtcggtagccgaaaaagaagaattactcaaacggaagtgagaaggagaagagacggaggatttcgacggagaagaaagaagaccgtcaaggcgaagaccggagaagtgaggccccgatgccttctccatgacatagtcaatcgccgttgaatcttctggcattgagtttctcggcgaaggtaaaggagagtgaaaattgcgatttaaggagaaaaaaaaggaatcggaagtgatcagtgacgacgatttctgcacaattcagcaacccacttgtcctctctctctctcgctccctccgtcttttttaaaatgttttttttgggagaagaaactcgaacgaattaaatactccttaaattaaaataatattttctgtttcaaaataaaaataagatcatgacaaaaaaaaatattaaaagtagatttatatcaatcaaaaccgctaaatctaaatccaaaatttcaacatttattgtctgcttaatttctatggacaattttgtttttaataaaatttacgatgacaaaaaaaaagtattaacagaaactatccaagtcttatttagattagaaatgttttatttaataaataaaaatgtttatttgatgtgctgaagctgaaatgttattttttatatacgacgctaaaattgtgtacaatggaatgaaacaaattaataatgttttttatatagataaagaaaataacaaactaattcaaattaataatgttgatgacaattaaaaaaaatgattggtcatatgagaaagtataaaaaaagaatattccaactcaaccaatcaagtggagtagcggttgagaaaacatgaaaaacaagatatatatagaaaattagatcagaaatgcaaatatccgaactatataaaatacaacaacaagtacgaattaataattccaaaaatatttattctctccccaccaaatatattcgatacattacaaaaaagccctaaacaattattagtaagcccaaataagaccaataaccaacgatccaacaacgaacatgtatccagtggaagcacgtaacccatgacctgaactagatccagaacccgaccctgaatccgaacccgaacctgaacctgaaggagaggaagcggatttggagtcagaagagacaacgttgactttaatcttcatgccttgttcgcaatgcccaacggttccacaagcgaagtaacgagtaccggttttagaaagcttaacgacgtcgtttccagagcttaaggaattaactgatgttcccaggtcacaactcttgtatgctgtttcacttcctagctccacaacgctgtgtagttctgaatacttaaaaactaacaagaaacaaaaaagattggttagtattaaaccggtcgatttgattatgaaattgagggtagagagaaacgtaccgatttggtcgccgactttgaaagattgatcagaagaccaagaatcaaaatcaacggattgttcccagccttggctcccgccgatcacatgtcgtgctgctaacgctgtcttaaccgaaagtaaaccggagaaaaccaagataacaagaactgcttgcattttcattggtttagtgaattgaactcggttttgatatattcaagttaaacttctgctagctcgtgtatatatagggggaatgcatggacattagttgcgtaagagatctaggaagaagaaaaaaaagacgaagcttggagttgaatggaagctaagatctttagtggttgtagaatctttaaaaattagtgttatggttatttttgttagtttatgtgtgttcaagtagaatgtatgcatcagaattgccaaataagttaagaagacaagaagcatacaacaagcaagattctttattacctaactttcacctaaagcttctacttcctattttgtttttctttaatccttccattccatcgaggcttttgaatggtaactgcggaatcggggaaaataaaataaaacctagacaaaaaaatgacagagctttacagttcggaaccggtgtttcctcttgagacctttgttagttgcttcgttttgttttcttatcgtgttatctcgtattcgtagttcttttagtcgtagtttttcttgtttttctactttcattgtttactctttattttctctctcaaacttaaaaacggtagaaaatatttaatattaataaataaataaaaacgggcagaatggacataaaaaaaaatttgtgtggttggataaatttttgggaattctataatatactacattcttcaatatttataaattttatcatgaaattgtttccctaatacatgatttaatatgataaaaggaataataaattgtacagtattaagtattgagttaactattgagagtttgagacctaagaataaaattctttagtgcacgaattaattatcagctattttaatgcttgattaaactattaaatacatatgtttagtggtgacaaatttcataagccaagtcccaaaatttatcaaaacacaagcatctcattttcttcctttttacattatctcttcacctattgattcaatctcttatcatcaaagataatagagtgccctgtaaaattcagcagagcttttttactctgagagctctgtatctctccctctctttctttcatatacaaaacatttccaaatttcataatctctacatctcatttcacagcaacaactggagtttcagaactcatcttcttcctcctctccatgaaacttccaccacatgaagagaaaccaggaagacaacgatgatgatgccagttagacttcttcttctcttccttttcgatggcggtgtcattgaattcgcgtgagttagcacctgatagataaggagtgcttatagctgacgatgaaccgctttcttctcgttcttctcttatactgtctctgaaaagctcaccaagcttcttcctccttggaagtggcgctggagaagacgagcctcgggaaggcttcttctcgtggaatataaggttgtggaaacgtggtggcctatctgagaagctgctcttaggagtgtttccgagtgatggagtgaaatctgaagtagaacaataaaaagatcaagattttgaatcttgaaaatagtacagagtctaccgccattagaaagagagatcaaaacttttaccgccatttacgctgtggaaatcatcgtcggagtcagattgtagccatggctgcgaatcgaaaaaggtttcatctttgcttcctgtgacagtggaaacaaattagaatatgcattgcaaaacattagaccaagagtgatagataaacacacacacaaaacacacaatgatatactaaaccttttgatttagtcaccatcattagatagaatagactcaaaaggtccaaaactgactagacctcgaaaaaacagaggagattgaatccgaggaaatgacaaagcaatgagtaaaaagagatttaaattcaattctgtaaagttcccgggtaaaaaattcgaattcttgcctaaacccttcaaattaatacgtgaaaaacaatggaacccagatcaagaagactgattagcaacactttttcatatttttgtcagatctgggtcacagttaaagtagacaacttttcaaatcataattcaccaaaatagctcacttttacttttttctttctgctgtgagaaaaatctctatgatcacgggaaagtttttgtcttttacggcataaaaatctattaatggaagaaatcaaatttgatatatgatcttatcagataagaaaaaaataacctatctacgttaacaggaatcaaatcaaattgatgtagaagaaccatttatatggaataacatttttgccggtcaccgaatctccacatgccaatattcatagacacaaaaaaaaatcaggaattgttttatgaatatttatgcaataagagagtatgtaaattaaaagggaccaataatccaaaagaggtgaaacagtaaaagaacccaaatcaagaattaaattcaaaaaagagattatttttgttttggaataaataccgaaacttttcttggatgaagagaaagaccaccgagatttgaccggagtgagattattattcgccggaatcgaagtactcttccttggcgattctgagaattcattgagaacatacataatcaattataaaacaaaaagagtaatattttatgagaatattttatagactaatctgagaaatattgaaagatcattcaaaacacagagattatgaatgatctctctcgattataagaagaagttggaaaaaaaattaccaaagcttttcttgacagaaggagacaagatcgaaacgttgtcgtttttgttatcgttcacagtcatctgagattctggagttaccatactatcagctctaatcggagagttattaagcgacgacgacgaagacgaacccattcatagattaatataagtaatcaaaataaatttataaagagcaaaacctttttagagaaagaaatttgattgagaaattatgatcaaacgagatcgatagcgagaaagagactaatcttattgcttctcttttgttttttgtttttatgtttcgtcggagaaagagaagtaggtcccacacgtacacggtgcccactcagttttcgtgttggaggagtgagacggtgtcgtattggggctctctctatccacgtagttatcgtgcgacatatcatgatgggaccaggtgcgtgacttttttggtgtcacgtggcactaattatgtaaatatcctttagtttagtctttagtgattacgtattaaaagataaccgaaaattcaaatcaaaacttggtaatatccggttcaaccaaccaaatatccggttttaattggattttgatctgaacaagttataccgggtaaacgatattggaaactttttttttggtccaaataattggaaactattattcaaactataatgcgaaatcccgtatccaaatagttgtattactatataaacttccacaaatttagaaaaatatcaaatatttcggattgttacagaataattataaagtataatggatatgagaatttagatctgatcaggaaaggtctaagtagttaatatgttattatcagtattcaataattcatacgtattttctttaatgcgattcgtatcgtaactttgaccgtcatgttttttagtttttggtaaaatatatactacaattattgaccgttatattctatcgaggtcgtaaccactataacaaattaaagaaagtgatgtatatgaaaggatatcgaaatcaatcttgaggtttaagaaaattttgttgccacaaaatctcaatgtttagtgggctgattcgaaagaactaaataaaatcatcccaaatcattaatttaatttgttttctatgagtctaataacagataacaccaccgagaaatagatttttgtttgcatgtgtaatgaatacttatgaaatatctttgcttgcttaagaatttatcatatagttatcgtataagtgtatattaagataatgtttgatcctgaatgcgtatagtgacatgttatgatttttttatttttatttttatatcagttttcaatttttctatctttcaaatgaaataaagattggtatatgattaggtgactgaaattgagctactctttgactattcacagcttatacttcgaaacgttaatcacaactactaattaaaacttttagtctccaaaaggcatatgcctctttagaatatctattggatagccataaaagcgggctccatatgatttagatattttactccatatgattaagtcatttgtgaattccattggttagttgatgttagatatgccaatactatgtaataaaaaatgaagtttaaaatctcgtatcaacttcattgtaatttcaaacttatgaagttaaaaaatatttgatggtcgggtataatttttggtaattgtcaatatacatatttattaggaatataacctaacttaacacaaaaactagtttaataattaaggattgccacatcctttatataatattcaaagatcttaatttcaagcaatgtgggacattctaataaaattgattttttttttcaatgtactaggtgatcatccgcgctacgccgcggttttttcgaattttttcgtattgtttaatttaaatataatttttatttatctaattattcacttatacaataagcaattacttttagttttaaaaatattttttctaacaacattatcaacaatgcatcatacacataattcataaacaacgtttgtattaaaccaacttaacagagagtagttttggattctaaaaccctaagaatttgatgatggagctccttacgtattcttcaccctcaatgatttattgtataaatatcaatttaaatgaatataaatatcaatttaagagaataacttactcaaatcattaagtaatccacgactattatatattcatagttactttgagtttggattacaaaataaaattttcgagtatgagaaaactattaaaatagttttattgaaaaatcatataatattaaaataaatttagtaatactataattaaatatataaaattaaataataaatatatcattaatctataaattagaagttgaaaagcttatattaattacttaatagacacatgacaaatgctaaagtgataatgtgtcaatcattttggagagagttggccaactttcatatatatataatttacacattgatttcagtttaagagaaccatcaaagtgtattggagtttgtattgtcactggatgccaaattttgttccaaattttcaagtttagaacataaaataataattcccgacgattgacaatacatagattgattgatacatatgccatctgttttgttctgccgactcttgcgttaagcaaacttgtaattattgatttttatattgataaagcatgtatgaagctagtaatgaatccagtaatatagtcatcagatttctctttccgtgaccactaacacaattaagtgataatgagtaattgacgcattatataatagtcttttcaggattggtcatctttatggaattctcaactttctattacacacgaacactaaacacctaattttctaaggtttgtattttctttaattgtatttcctttttgggataatttttttttctttatttatttggtgacaagtttgtacttattgggaaaatatctcaagaaggatatgccattgaaatgttgtaacaatattatctagaatactaactgtctaatattattgtgatagttttttctttttgtttagtagtataattatttatgatatagttagatggatcaattatgggattggcacaattaagtctatacctttgtgaaaacaggcatatctcatatgccttgtagatttaggtacttctattcagttgtaaagactgtttaatcctcttttttagaaaagctacaatacaatcattcaaaccagttaaccatatcagataaatccatgtatcacccacacaaacaaatggaaatccaaacctcataattcgaaacacacagaaaccaataaagaagaacactcgtaatacctattattcaatgaacaccttaaacattcatctctttgtctctttgaatctatcagtttttcttcccccaaaatccagccataaaagttccatgtatccgatttccaaactccaatttaagattagaaaaaattgcagattgaaggcctaatcgaccagcctttgaaaatcctctttcaagatctaatgttactaacctcatgtgaagcttcgtcaacaataacaattaaatttgatttagaatgaattgatttaaagcctatctaaaattagaatccgtgggttccctaatcattatctccatagggtttagatttccttgcatgaacaatcttttaattaaatctatcggattcatcgaaggaggttggtgaagaaaatgttgtgtgcgttgttggaggcgaagaaacgatctgatttcgatggagtgttttgttgttggtcggaaaaatcactgtgatgattttgatggagtgttgatgacagtgagaagtagaaggttgttgcccagaaaaatcaatcgcacgatggagaagacgaaatggattttcattaatagaattgaggacagtattgtcatttcacaaatctaaatgttcctaagcttataaacccaaatgaattatgtctcttttctagtttatgggccaaaatgtacctatatttataaaaaccccatagttagataatatgatacaaagtctagaaaaaaaaatcaaaatctaataacaataacaaatggaatctttagagaatacaatgatggcatgggttatgtgtttttcggttcaatagtccaagacaatacacaatgatccaaagaatggactcaaaaaacaagaaaaaagaagaagagaaatagtaaaagtggaagttgtgtgatatgtgatgtgtgataccgcttgtaatggttcgcaaaacaatttgttatagtcatcgaggtatctaattttgtttggctaaacaaagctgttttagattgtgcccgattttcattctttatgtacaacaactaccttagtttgactaagataacaacaaccctaacacatgtttgggctcatctccacttatggctcagtgactaactaataccaaaacgcaattcataagtggccttaactccaatagctttcttgagtgtgacaaataaacacaactcttcgttgacttctcactcttcttccttcaatcacgagcctttgcttcttgttctcattgaagatttctctttgaagaactaatcaaaagttcagattcaacagtttgtctaaaaaaaaatgatttttctatattaaaaagtacacactaagactcaaaacttcaacttggttctccacatttctccaataactttcccaggctgtggattatctggtcctctatccctctgtcccgacgtgaagtacaaataaccgttccagaatccggccatcgctgttttgacacggtatggtaaccgtccaatcacagaccaagtctgcaaaatatttcatattcagtttaagaaacaaaagaacagaactatgattgagatgatgctgatatcatagtaatactgaccaacgtatctaactgaaaccggaatatctctccaacaagaacaagccttttcgtcactggatgccaatctgtggtaccaccaacgataacaattgagttattgacaatgatccacgcagattcaatgtgggaattgttttttggcattggtggcaacattttccacttcatctcctcgtccatcatgtacacctcaccattaaagatctgaaatgcgaccaaacattagaaactagaggcgtttttttttttttttcagttttgactaaagaggaaggtaaacctcgcgtctacgtgagcacttgaagatgggtgagttaggtttggccatgaagtcaccttcttggccaccgattacaagtagtttatcgttagcaactacacaagccctacacaccgtaaaaccgcaatgttagcaccctaagggactcaaaacaaaaggcaaaacaggcagtgactaaagacaatataaaacctgtgtggtccacctcgaggaatagggacctcttcccgccattcgtcgagtgctttgccatcttttacagctatgctccaatggtcaaaagcaacggcattgcgattctctttgcttccacccatcacatgaagcctccctctccatatctgagtcgcaggagcatacctgagtccaacaaaacagagctcggcaatcgcagtccactatactttaacatgatatatcttctgacttaaagtctttaccttggagctggtagtgaaggaaattcgagccaagtctttgtgaatgagtctaaaacaaaggaacgagaagtaggtcctctacattgtggaccaagctgccctgaaaccacatatacataccgtccatccgtcacaatcccgaggtgcgaattcgccatttctttaggagtgtggaatctgtcacaccacttattgtctgtgaaattgaacacatccacatgagaatgaacctgaggcaaaataatcaagtgatcattaacaccatttttaaaactaatcaagtgatgatcattctcaagttccttacatagtcgagactgccgtaaccggagaagacatacaaaaggttattgatttgaactgagtatccatcaagacgaggaactggagctgattccatttcctcccattttaactccggcgccggtatatcggcaaatattgccgataagaatcggacatgatcttttgtatcattcgattgtttgcttctctgcaagcaaacacaaaatggtgaaacttagaatgaaattcacaaatagctaaaaccctaaaagcacaatcaattgaaacgtagaaaggaagataaagcaaaaagtaagaatagctgataaaccctacaaactaagaatatgatcaattgaaaagattaggcaaagggaccttttgaacaattttggaatcgatgatcggaatctgtatctccggccggttaacgggaacccagattgaaaaaacagcggatactgagggaattgaagaagagagacaaagaaaagctgcgatgaatccaatcccaagaacactggtgaagtacaacacaagcatcaatctccttgaagattggtgatgatgatgatgatgatcaggtttattcgccatttgtgtttatgcagagctattgaaagagacatctcattcatatagaccgcaacgagaaacagtgatgatttgatttcacgtcgctgaagaatctctcattaccgaaaaaatatgtgcgccggtggtttttccccaaccagaaatcacgccggtggtttccaattttgtattattatttttttttttggtaatttcccctaatttgaaccttcttaacgagacaaaaggtttgtttgtaattatatgggcttgattaaaaactaagcccaattaaaaataaaaaagcccatgaaaaatagaatcatatagtcactcacgtgttgactctcgagtcatgtcggcgatttctttcactctccagtaaacttcaccaagtctcttctgctgaaatcacggtaatgcaattctcatgaaccttgattttgtttctgttcttcgcaatttctattgttgaatctttctgctagatctgaatgattcttcaaatcgaagtactcttagtttttttttgttaaatcaagctggaatctgaaatttcttgcagatccaatgaagaagatccaagttatatagtgagacctcaaaccttagcttgagctctgcttcttctctctttcactgcattgaagatgggatctgtatctttaaagatcggcgatggaacagccagattccgacgaacatcaatttgttcatccgccgtgaacctcctcatgctcttctccgtcgtcaccacaaatctcttcgccttatacgcgttctcctctcattcccaagcaaactcgccacttctccacagctccaacaatatctcactcgtttctcaacatctctctttgattctccgagaaatcgattcgtctcaacgcaagcttgctcagatggagaaacagatgcttggttacgaatctattgatatctctcgacctaacattgttcctgagctcaaattgttcctccagcgtcatcagcttcctttagggaaagattcgcgtaccgggatcactgaaatggtgtcttccgttggacattcttgtgggaaatctacggatttgctttctcagtatatgtcatataaggtgtttgatagatgtcctgatgattggagtcttggccagaagttgattcttcgtgcttgtgagccgttgccgcggagacggtgtttggcgaaaacggtgcagaagcaagatttgagtaagtctcctgattcgttatggagatctgttagtaacaagagtgttaattggagtggacttggttgcaagagttttgattgcttgaaaggtaagaaacttagcaaggaatgtgttggttgtttcgatttaggggttgagaaagataggtttgtgaaggttaaggggaagaatgatttcttgattgatgatgtgttgggtttaggaagtgggaaaattcgaatcgggttcgatattagcggtggatcagggactttcgcagcgagaatggctgagaagaacgtgactgtaatcactaacactttgaataatggtgctccgtttagtgagtttatagctgcgagagggctctttccgttgttcttgagcttagaccatagatttccttttcttgacaatgtgtttgatcttattcatgcttctagcggattagatgttgagggtaaagcggagaagctagagttcttgatgttcgatcttgatcgggttttgaaaccccgtggattgttctggttggataacttctattgtgctaatgatgagaagaagaaagaacttacacgtatgattgagaggtttgggtataagaagcttaaatgggttattggagagaaggctgatgcacaagtttatctctcagctgttctgcaaaagccagtgagagcttgatcgggaatgcaaaaggaagttcgtaatggtaagaccgaccataagagtaaaactctctatttatagttacatttgatcataggttataaatttggaggtcattaggtgatatttattccagagaagaagaataagcaattatatatttaccagggcaattggagaaaatcatttgtaaaagtttttcagtataatgtgttgaaattttgtcgattattattactacttttctgttataatatccatatataccatacaaataaaaatgagtaccattaattgtgtttttgttatacctgaaataaattctcctcatgcaaccaaagccagatgcaagaaatgccgaaaatagacaacaaaatcagagtacaaagttattttttattgagacaagaggaaaaacataacaaatgatataatctcaaaatcatgtgtgattattatgaggcgaaaaaaacaagttttcgtgattatcctcataaaactctctagtaataatcgaaggaaaaagaagaacgatgaggtcttttcaccttcaggtgagaactggtctcatcaaagatttttatgacacataaaaatgatgatacgttattacccagagaaaggctcttctctatttaacatcctttgttgaaaatacgactgtgtgtggccaggccaatgcaaaagcttttcagcggcgctttagttaaccacgtcaagaaccagcttgcgggacttgagaaccgaccattttagtcgcctgtagtaagcagcttggagaagagcgagagagagtaggaatatccatttgaaacccatctgcaaatagtgaaaccaacattaaccgccatgtaaaatgtaacctcaaaaaaaagtcaattctttgtatcggtctggaagctgaggtttgtgtctgcaaaacgagtcaaactgtgttcacagcatatctaaatgttattatcttagtagcagaccaagaactagtagcacttcacacttggtacaacaattggttctctaagtcaacttgatcgatcataaactaaatctagtattaattgcatagtctagggagaaaatacaatgttcaccagcgaacagagaaagataaacctaccagtttcctctcttccatttctggttcagctgcccaggccaagaatgatacaatatctttacccatctgcaccgtaaagtaaagtttatatcatgacactgagaaaggacagtaccataaggcataaagatttatgttcttatattttaagtggaggaaaaataacctgtgcctctgtggcggggacaccatcttcatactcaacagcttcatcattgagcattttcggcatagcaattgctcccccagggaaataaggattgtagtgtaacccctctctaatctgtacagttatcatcggatttttcataaccagcactttgaattcgaagaagttcaatgtggaaaatgagagaaacttaccgatatgccagcagggggatcacggtaaccagtcagaagcgcaaagacatagtttggaccattgtgacgtgcctggaaggcagaacattaaaactatttaaaacacaaaacacaagtttgctacagatgttcagttaaagtaaagtagcagcagcagaccttagttataagacttagatcaggaggatacgctccaccattagcaaaccttgcagctgattcatttgcatatggctgaggaaaccggtcactgagtttaccagggcgggtgaacatctcaccctcatcattaggtccatctactacctcgatttcagctgccattgcctttgcctcttcctctgtgtaggcgacacccaccaagtctcggtatgagatcagagacattgaatggcatgatgcacagacttgctgataaacttgatgcccacgacggatcctgctcatacaacatcaacctttcaataattcatacagtacaaaaatttcactgaagtttcacagtctaatattagggtagcaggatagtcactttctttaggtttagacatgacttcggtgatcttgaatcgttttattaaaaaaaggcagcaacaagccccttattttatgtatgatttcttttccttctatacaaagactcatacaaacgcttgattcacgcatgatagactttttgattcaaagaaatttacaattctaagaaaatttcctttttcattgaaaaattgcttgaaaggacgttaacttataaaagcaaaaaaaaatctataagaaaatgataaaatgatgctattaaccagacaagaagatgagagagtggtgacaatactcacgaagcatggtcatatgagctaagaatgccatcatgaggccaagggtactctggactctccaatccatgttcagcctcatcagcagatgctactgtagaaaaactcaacagtcctgtaacaccagcacccaacaaggcaagtgctcttacaccagaagaaccagcatcctcatgagctttcttcgaagaaaaccaagacaaaaccggagttgcctgcaggataacacaaaaccaatgctcagtcaaaacttcgccgcaaaccaactcagttatatgctaaccaaatggactttcaaaagattgctgcattctactattctactaggatttgacattgaagcagaagctatacataaatcattgtctcctgtcttatgttccaaaaaatgaaaaatttcacaaagaaatcattagctaatgagcatcagtgtcacaaaacacaaatctttaaccacagaaccgaaaaaaatgtcttaaaaacagatcccaagctgaaatcgtaaatcaaaatagaaatgaagagaatgtaaaattaagactggaaaaaatctcacaagtgattgggagtgaagcttcctcctaagaatttgctggataactcctcctccaaccatttgattaaacctttgtaccaatcaacacgctgaagaaacaaagaaattgaatcagaatactgattcagtgaaaatgcgatttcacaacacgtatacgaataaacaaaagcgaacaagccctagaaaatttgagtctacacagatccgacgaatatagataactctgatcaatcaaatgtcaaagaagaaaacgaaggtttcgaatacgagatatacagagaaatagagagagaatctcaccggaaaatgaagaaacgagatcggcgacggagacgatcgagggagaagagtttgggaacgaacaagtaaaagagagaaaatgggagttccacgatgacacagcggctgctagacacacgaccacagttttacttatttgggccttaatgggccaacaacgtactgcttgagcccagaaaatgtcgaagtagataacacttgaaaagtttaaaagcttggtggatctttattatctttgagaagaaaaatcttccgaatgcaacgtaaaacatatgactttaggatcatacatcaccagaagtagacttggttggattttaaaaaatcaatatggagataattaaaaaaatgtttgaattatcatactagtgacaatgtttgtacttcaaactggcttaatggtctaatcatttcatattatatatataaacaaacagtgaaaatttgaaaacacgattttgctttaaaaaaagttttggcaatcacaacttttgaaacttcttaggaggaagcttcacttctaatcacttgtgctattaatatatgatcttgataatgagatgttaattacaactgtggataatttttgatctaaggaccattaatcattctgatgtgatatgcgtgattagctggaataatcacattttactatcaagtggaatcatacttaagttaagtaacttaaccatcgaccgagtcagaaactatgcttcatctactaaacatatgtctcgcatatccgacaaaaagtcagagagaaattttaaaaagaacaaacaagcaatctaccacaatcacaaaggaaaataatactaagactcacggtcaaatggcccttaactgcgggaaccaagctttgtactctctttttcccaaaacatcgaacttcagcgagaaaaaatccctggaacactttatgtaccacaagacctagaaatacttgttttaaactatgttttcaacaatatttcaacaatttggaataaattaaagcatcaccagcagcctccaaaggtttggatatttttacggtttatatatttttacttgaagtacccaaaaagaaaccaaaatactcaaagaaccgaaccttaccttcatccttggtcccccattcttctcttcatatgacaacaacacaagttagtaagttacataccaaaaagtgacaacaaagagagattataaactggagagctaacttgctcgcttaatttgtaacacaaaacaaagaaagaagactaactgaactgaaaaacattcggtttccttatggatgctaaaaagctaaaaacgaataacccaaaacccgaagaattgaaccgaaccgaatgtgtatcagtgtatgcctagttactaatcctgttttgttactagaaaaaaaccttttgttatgtggcatccatctggactatattaacaaaagttgttgtgaaaatatagattaaaaaaaactattcaaaacacctaaacaaaattataattcaacgcagtattaattactccatgcagacgcagtcttttttttttgataaaatctattaaaaaataaaaactctactcgtttcagtttttgcttgttttatttaacaattaattaatacattagtctttttcttttttttaacaactatattatgtctgcaaatatcattagatcgctaacatttcttattcgtttactcacatatatcggcatgctaatgatgcgcataattccttcttcttttttcgtgctcaacgtagacatgcatatgtaagtatgaatgtttgatgagtcatgacataacagcttttcaagtgagaaatggaggacacatagtgcaatttgattggtcggagattacgaggaccaataagagccttcgaataaggtgaaacagcatattgtgtgtttacgtaggacccatgcgttcatataatataaaaatctcaactaaaaataaaagaaaattggggaaataaacataccatttaacttatcatatggacctatgtgtatgcatctatgtgggtaaagatatattcacattgcttctattcaacaacgtgtgtgtttcttcgcctatagttgccggccgtcaaaatttaatactgtatattatgtgttggaccatacattttgctaatcaacaaaaaatatttttaaagttaattaagtgaccataattttatatttactcttgttgagtccatccatgctcttgctaatctaatagttcctggtcatcgtattataaacttataatccggattatccgtaatttttgtatggcatatgcaaggtaaaaaaaacaattaatgctttcgttgtttaaattaaatgtacgtggatgttgatttaaattcaaaacgattgttctatcccttccattctatatttttttttgtttgtagtcataatagttttgtgtatggtattaaaaacaatgcaatgcaacatacatacaatcgatggatgtggttatataaaatccttagaaaatattcttctatagatctcacatatgtacatatatgtgtcatgtatatagactgactgactgacatatatattgacgtaccatcagccccccacgcgtaccatagacatagatgtatatggcgatacgtcgtaagacatggtatgattgatcaacatgatctgtatcggggatcggcggatcggagttgttaaaaactttttacaaaatgaatcgttcaatatacattttaaaaaaataaaattgttacccttatcttaaatctacaaaaaaaaaaaacataactattaaaaaaagagacactaatatggtgcaaaagatgacataggagatgcacagaaaccatccaatgatttaactgtatcttacgctaaccctaaagccacgtggcgaattaccattcctcctcatttgccccgaatgataatcttttcggctcaccggagagagacacacagaaagactatagagaaagagagagaaagaaagaaagaaaaagagtgagagtgtttgatgataagagagaaagataaaaaatggatcaagatgactggttgggaacgctaagatacgccggtaaggcgcaggataaagtttccgttgacgctctcatgctccggtaccgtccgatcgctccaaagccgacgactggtcagccatgtggtgtggcagataacaacaacaatagctcatacggtatgagcaaacgaaccaaacgaaagtacgttagggtttcgaagaataataaaggcacgtgtcgaggtaagagcagatctgacttgtctgatgatcgggaacaaactgatgtcgtgacgttgcaactcttgccggaaaaatcagatatttccggtgagtactcgccgttggatcaagatagtctcgatccgtcggtgaaatcgataatcggagaggaaacacaagaaaccaacacgtggggtatgtttaacggcagcgtcacggcggagatggagacgtgggtgacggtggagtccgtcacaagcgtgtgtgagggtagtttgagttcccatgcggtggggattacggacgttgagatcgttgataatcttggtaaggacacgtgtccagcgttcgtatcggatggctcgaaccgtgtggtgtgggtcaacgaggcttaccggagaaatgtttccggtgatgattcaacggcgtcagtatcgccggaagttgtggtgtggttggtggcggaggaggcaacggcggcgatgcattgtaactaccaagctttcacgtgtagggtgaggatgcaatacacgtggaaggaaacaaagtataccaaaacggtgccgtgtgatgtgtggaaaatggagtttggtggttttgcatggaggctagacacaacagctgctctgactctctggctttgatggtgattgctgcaagtaacatgcgggtaagattgttaagatatgtgattttagtgtgtgactaatcacaaaattagtaatcgcttcaagcgcaactttgtttagacgagtaagaaggaagcaaatgatgctaatgttgaaagaagtgtggaggagccggaaagcttaaatatatagaacatatagtaataatgtcatatttttattggcaaagactaaacaaaaatatgccattgtatggtttcataccaatcttggtttctactattatctcagatcgataaatttgttaaacatataacagatctgtgttttaagatatcgctaaaattaaatttcatagttattatatatctcgaaaaatagtcaaatatgttgataaaaatgcatatatcaaagagttgaaagtgaaatgcaaacaaattagattttaaatattatgttataaatttagatctgatatatagataaacgaatatatattgattgagagacaaaaacacatgaactctcaatggggaccctattgagtgtcatacttcgtattaatttcttcacactaagcttttgcacccacattatatacacacattctcaaacacttgcatacacttgtacatacacacattgaaatatacatatcctttgttggatacataaatgatggatgtattattatgtatgaatgcatcttgcaagaaaatcattaattatatccaacaaaggatatgaacacattatatgttatatatacaaataacagcatccggttctccatattgaatatctataatttgagcttcattaatttatttgtactagtatgccataatattgcaattcatattttatatccatttattctatatgtacgaactaggaaagttagaagttgttggttcttggccgagtagttcacattcaccatccatatgacgaccatatatatgtgtgtgtaaatacactgtatacaagctcccatatatgtgcagatttatacatgttattcaaaatgtattttaactatatgtaatggtgattattcaaaaaaaaaacatataactatatcttatatagccgatgtataaagcgatatcttcgtgggttctacttatttcagcatgtggagaagcctcattggttgagaaaaaggttgacaaataaagaaagaaaaagccaaaagttctaatgagggaggagaataaataaagttgtaacactcacacaagattagtcatgtacgtggcacttgataagagaacaacaacaaccaatcagggtctccacatttctaacttcgattttctttccgacaagcttatgtcatcactatctaggctccgtttgattggttcggtcgttcacgtgtcttattgaggttaaaatctggccgtacgttcaatgtcaagtcatttggtcgcgtgtagtatagtctcttgagtgcgatggaatttttggtaacagactaacagagaaaacgaatgagagcctttcacgtttctgttcttctgatctgagaccactcaattttattttctttcttaccaataaattcaagttttagtcttgtattaatgcatgtttcacaaaaaagtaaaaatacataaagtcctgtattaatgcgtaattgaagtcttaactttgaattatgttttttttagagaacaaatacactagataatgtaattaaattgtcaatgtttaacgtacgtaggatagttaaagagatccgaatatatgacgtattttcaaaaatttagacataagcattgacaaaatattaaggattgaatagaagcataattctgattagtattaagtattattttagtttttcatatttttggaaattttctttgtatttttccagtaacaaatataagttgatagaattgtcgtctaatgtagaatcgatcttaaaccgttcttttgttatgtaatagacaaaatataatataataagttggagcctttttccccatatataatatgatgtgttttctcttattccaacctatttacttatttagcatatggctttacaatttgcctttgcagcatttgaaatttcaggtaaacgattacacattgaacttgaaggaaataaaaagaagctaataaattatacactatcatgtacgggagataaaaaaagatagcataccaataaacgaaaacgaatgatagcatctatacggtctacggattagagtagagacgaatcaaagatagtatcggatacaatatttatttagatacaatctataatattgattgataaacttgtagtactattttgtgtggttgaagtagggttctattggcgttaagaggctccacgtgtactgtcgctttcgttagtggtataatagatggaggtcttttattggtacaacacttggttggaccaaaatctcgacgtccccatcaccatagatacgctaaacatagcatatttttagtctttgttttgttttatgtttaatttagggacaattgttttaagtttttgaagtctttctatgattcagctttatcatttgcttcttctatagtggagacctaaaatggttgttataatgataatgaataattcaatcaagtctggcttataataaattttttttgtatcgagttaagtgacttgtgcactgaagactaagtctgataaatattggataggtatagaagaaaacaataagatattttatagtggcgggtatatactatattgacattaatctcaaaataatctttatagagtttttgaatatataatgaaaaaggtaatccgaagtgtggtaaaatgtttttttagagactagtttaggtatataatgattaatgcccaacacactagtttaagttatggttgcgaaaaaggctagtttactatctgaaagacgatagatttgttgaagttgtacattttaggtaaagagctcacacctatctctactctatagtgttatatagtgtcaaaatttaacgaaggcattaaaaaaataaaaacttatataccatacttaattccaaatcgaacaaaacacaaattgtacccgaatcaaacatattgaattgaaaccaaatcaaactgaaaccgaactgaactagtttagaaagttttactaaaacctaatcaacaaataccaaaccaaacgggaaattatgagaaaagtagaaaaaggcccaccaaaagagcgtccaccattacttgattgtgtatgatacatatataaattggtcttatttgtaatacaatcaagtgggcttagcccatccttttggtttgtttacttgtgtgtattgggtcgaattcttctagaaggcctctttttaaaaacggtttgtgtaaaattgtcaacaccattttggacttttgtgttatttccattactaatctctatagtttaggaatttctcgtgttataaaactcaagtacaaaacacaggaatcatatatatatatatatgaaagttggttaatataaatgacacattatcacacaacaaaatgacatatgtcattcgatgtttttttttaaattaataaaactaataaaattaaataaacaaattaaatgtattattaattctatttttaattgaattttccaaaataaaaataaaaaataaaattatgtaaacaaattaaatactactttcattatactctttttattatattaatttttttattatcaataatcatgactaatttttttattgtgttgtagttgtttgctacctaacctcttattagtttattagtttaattttgagtttttgataacattgacattcaagttttttcaaataataaaccttcaaaatattagacttaccaaataatataatacacaatcatttctcttatattgatatatgcaatgacagaagatctaaaagtattgactttaatgatactttaatttttgctttctttttattattttcatatgaatactcttgaaatcttatttagtttatatcaattctatatatttaatcataaacctataacaatgttgttggagtattatatcgggggaataaataaaaccataaatagtttatttataatcaagttgaagaattttcaaattatccaagacgcaatcatttctctaatattgatatatgcagtgacaaaagatccaaaagtgttgacttcaataacattcaatttttgctatcttttttatttttttgtatgaatactctttagatccttttcagttgatatcaatccaaactttaatcatgagtcgatcacaatgttgttgaagtacataaaacaagaaattgatttattaataatcgagttaggaaaattttaaaccacaaaagtaacatagttacacagaattgtatcaaaatattattattgttgttatatgtattcatgaagtgaaaaaatattaaaatcttataaataatcagctttatacacaaaatatataaattaatatatagagtcacaaatgaatctaaccataaaaattgtaactacatattatggatctaatttcattaacaatacaaaaataaataaatagtaaatataattagcataaataacaatcaatgtaattttttctttaacaattttcacaacaaatccacgcgtagcgtgggtacccatctagtttctagtaaaaaaagaaatagataacactcttgcccaacacaatcaataacagttcaactgaacaacatatgaggaaacaaatcatacttgccgttttgctatcgactacaaacttcatgtcgtttttcatttagctagtgaactaaccaagattctagagtgtaataaaatattaaaatctataggcaaactcacatgaccaattaaacaagttaacgattactgtccaattaaacgtcacaagttaattttctaccgttaaaatattgccacgtaggacgcgtacgttaattaactcgtaaaatccgcgcagacaaaatcacattgaccgttagatatagatttggcggctagttcttcaatcaatataaaccgtccgtcaaaaatcagaggtaggcttttgacggtgtagttttattttaaaaacataaaataaattagtgtaagaaacttttttctctctctctgagtcttcgacttcgtttttatctccagctttttttttctcacgcgaaaagctcctgttctttaaaggatttgatcacgagagtttcaggtttggatttcgtagtcaatttccagattctagggttttggttggtcaaaatcttctacttcgtcccgtgtttgtggattggttcacggatctttggagattccgaaattggaggcgatttttattctagggtttcggtgaaatttgtaccgttttttggattaattcttacgttgatcgcttctctcctggcgagctcgcgtttaaaggtttagatttcaagctccgtgttgtctattttgaagctaatttatctggtggaggttgaattttggtttgtgaagaatttgtgtggattcagctgttggagattcaaatggtaagattcgatctatttttgatttgtgggtttttcttaattcgaatgattagaaaaaatagagattcatttgaatttggcatcaagctagggtttgagttttggggtccaaaaacgaaattggacagctaaaggtttaatttttacggtcatatctctcacgtttttgagaatcggaaattcttatttcacattgtttagatctggggttcttgtgtcacaacaagtttcttggcccaatgttatctatcgaaatagggaaaagaatcgtcttagtggttttgaatgggactgtattagtttttgttgatttaagtgaaattatatatgattcaggtgtcttgcaaatgagttgtagaagctagtgagaattatatatattgtggtaagtcttgccaaaacaatggttgaaagtgctgcgttcccaggagggtattatcggaatacttttgaagcgcctgaggaatcagagggctctgggagctctgcacagattgatactgaggtcactgcgtctgagaattcaagtactcctgcacggaagtgtattatgttgaattcgaatgatgaagatccttatggtgttcagagacaagtcatttccttgtataacatgtcacaatctgagaggaaggatttgatttatcggcttaagctggagttggagcagacaaagatagttcttaaaaatgctgagttgcagagaatgaaccctgctgctgtgtcgtctactagtgatagggtgggttttagcactggtcaaaagatatcatctcgagtcagcaattcgaagaaaccatctgattttgctgtgggttcggggaagaaagttcggcatcagaatgggacttctcgtggatggaatcgtggtacctcagggaagtttgagtcttcgaaagagactatgactagcactcctaacattacactgatgaagcaatgtgacacgctactgagaaaactgtggtctcatccgcattcttgggtgtttcaggcgccagttgatgtagtgaaactgaacatacctgactatctcactactatcaagcatcccatggacttagggacagtaaagaagaacttagcgtctggtgtatactcaagcccacatgagtttgctgctgatgtgaggcttacatttaccaatgcgatgacatataaccctccaggacatgatgttcacattatgggggatatccttagtaaattatttgaagcgcggtggaaaactatcaaaaagaaattaccaccttgtagcatgcaaacgttgcctgcagtaacattggagcccaatgatgaaaggaaagctgctatatctgtacctccggcgaagaagagaaagatggcttcacccgttagagagagtgttccagaaccggtgaagccacttatgacagaagtggagaggcatagattgggcagacaactcgaatcactactcgacgaacttcctgcacatatcattgacttcttgaagaaacacaattcaaatggcggagaaattgcagaagacgaaattgagatagacattgatgttctcagtgatgaagtactggtcactcttcgaaaccttctagatgaatatatacaaaacaaagaagcaaagcagacgaatgttgaaccatgtgaaatagaggtaatcatcatctcacctgctggaatgcattttaatagaacactttactgagaagaagtgaatttctttggttgcagcttattaatggatcacgaccgagcaattcgtcgctgcaaagaggtgaacctcaaattcagttcctggtttattactggtcagtagtctctgtgttcaccaattgtcttacttttactcttctatgttcttttttctaggaaatgaaatggctgatgagtatgtcgatgggaatgaaccgcctatctcaaggagctccagtggttagttgcaattcttcaactccttcataacattttcttgtcgtaggtctctatggatcttatcatatgtcactgactcgtgtatatatcagaaagctatatatatacatatgcctctgctatgtttatatcatgatttttgtatgctttttatttgcccaaatatccttctgtaggatcatgttatggtaacagattatgtgttactgaataaagtgttgcttttcagattcggattctggtagctcggaagatcaatctgatgacgctaaacccatggttcaaggggattcttccaaggtataaatctaataatgtcagcttttcaaggcatgtaatttttaaagaatctaaaccacgcagttggttaaccttcagatgcctgaaactgcaaactctgaggcgcaaagagatgaaaatacaagaattgatgatctttttgttgggagtcgtgagtactttatctcctttaaattcattattatggtcttaagattattcatatgcttgcggatttgtttttacttctctaccttagttcctctttactactcccagtttcctggatagatttgtccaagatttactctgttgtaatatctatagttggccacaatagggaaatgtaatagatgttggttatcactgctggaggcaagatactgttaaagaattttctcgggatacgtattttcagtttgtatcactggtgtattcattacagaatctactggtgcgcttgagcagatggatatttgttctcagcaaaagcttagttctgatgaatcagatggccaacatgagggtgagatgtagtgaaaaagagttttattttttttctctatttgagccttgaattgagtgatctcatactttgtcaacttaatgcttcaggaaatatattagagactccagcttcatctgagaagcgctatagagctgcgctgttgaagaaccggtttgcagatatcattctaaaagcacgagagaaaccacttccacaggtctgtacttatcttcaatttagcccatctttaattgccttaagtggtcactggataatgcttctggctagaactcctgttaaagttgtttggctttaatagttattaaacataggagggtaggaagagtagaagtaattttaaacaatcacagaaacttggagatgtagattaggaaataagaatttttatttaaaaattatcagaattgttacccgagcatagttgtggaatggacctagaaatccacaattgcattagtcgatcttgaattaaatgcatggatcacatactctacaatatccttgaagcagtcttctttgtcctttgggaattaatatggcttaaatttgatctctcatgggagcagaatggtattaagggcgatccagaaaggctgcgtaaagaaagagaagaactcgtactgcagaagaagaaaggttggtgtacttgtttagttgtttatatattagaacaagccaatatattaaaattttgttgtttctctggatcattcttacaagaacaatttttttttacttatatgttcttttaattgacaaccctctacttatgttgccagagaaagcgcgtctacaagctgaagcagaggctgctgaagatgctcgtcgccaagctgaagcagaagccgctgcagaagctgctgctgaggctaagcggaagagagaactcgaaagagaagccgctcgccaagctttattgaaggtaaatagcaaacacatgacttacataacaggatcacaaaccctaaaaacagtcattaaagataaacatgttaaaatatggagcacgttctctgatgattttaaatgttccacccatgaaagttatgtgttgtttgtttcttggcttcaaatgatggagattcttatattttttgtatgactttgatttccttgcagatggagaaaactgtagagattaatgagaactcacggtttctcgaggacctagagatgctgagttcgagtgcacctgagcaattaccaagctcagccgaagaaaccagccccgagagacctttagacgcacttggaagtttcaacctcagaggaagcaacccacttgagcaactcggactgtacatgaaacaagatgatgatgaagaagagcccgaagctcctgctgttccaaaacctgatgaaaccagcaccgagagacctttagacgcacttggaagtttcaaactcggagaatgtaatccgctggagcaacttggactgtacatgaaacaagacgacggtgaagaagaagaacccgaggctcctgtggttccaaaacccaatgaaaccagcctcgagagacctgtagacgcatttggaagtttcaacctcaaaggaagtaaccctcttgagcaactcggactgtacatgaaacaagacgatgatgaagaagaacccgaggctcccgctgttccaaacctagccaacgacgtggaagaaggtgaaatcgattgaacaaaagaagtgtataaaatatatacatgtattatatataaaacaatagccagggcaggtacaaacagacgcaagaaatgaaggtcttagcccttcttaagagaagatccaatatgtggctcattgtttaatgagttttggaatggatctctcttaagccagtgtggtgtttaattatgtaaaacacaaagcaaacgcttagaagctttttgccacgagacttcatgaagagtcccttagtgtatgattattaaaaaaaaatagaaaaaagagtcaaagaccattgtttgtgtaagaatctatttttacatttgttcttgataataattctcttccgtgcagaatcttacctttaacatttcgaaccgattttggacacagccatcgaatgacaataataatgaactacattgaggtttcttttttcattactaccaaatgaaaaaaaaaatgagtactattgaacattgaagaagtgttgtcataacaaaagctgactagtgacttaaataagtacaattgaattcgacaagtgttaagtactaaaataagtacaatacaaatacaataattatcaccttttttttactaatttttgtaagcagtttgaatgatagattttctttcttctaaatatacatttaagattttgatgaaatatatagaaaaatatattgtgttacttttaacagtatcattttttattataatcttggtcctaagcaaaactaaatttagttctatagtgtacttggaaccgaactaaaccgaaaacgctgtcgctttaggttttgtttccctcaccaaaccctttcatcgtttatctaaacaaacctcaaccatctccatcaaccatcgtctctatatatgtatcgacgacttcaaaagcttcaagttattctttatcagtaatggaaccaattacttattccaaagatcttccattattcttctcaatcttcatcttcgtttatcttctcggttacttattcattttcaaaaaatggactccggagactcgtcctttagcttccagctgtttaatctccctcctccacggcgtctccgccgtcgtcctcgccacgaacgccttactctccgatcctaaccgtggattctcctccgtcaacacccaatctcaaaactcaattctcgatttcagctccgcttatttcctcgctgatctcgtccaccttgccgtgtttccttctcccgccggcggagactcgcttttcgccgctcatcacctcgccgtgcttttcgttttcctcacctgccgttacatggttgctcacggcgcctgcgctctgctcgcgctgctagtcgtcgcggaggccacgagcgcgtgtcagaacacgtggacgctcgcggatgcgcgtgggaaagacgcgcctctagcggtgagtttgcaccggttcgttacggtgccgttttacgcgtcctatagcgtctgcaggtgcgttctagcgccgttgcttatcgttaagatgacgtggttttacgtcagcggaggcgctgatgacgtcatacccagatgggtttgggtttcgtggaccgttgttattgttactgccgttaccgttagtatcctttggatttggaatttgtgggtactgttttttcaggaaagatattccaaatttaccaaaaaggttaggtaaaaatatatttacagtttccatattcgagattttgttatctaatttgagcgtaaattaatatctccgaataaattatgttcatggatttggttgcatatatataaaaattgtccgggacaaatttttaaaaaaattatatcttagattccaaaataaagtctcaaaataattaacatatagtcaatcaaagtttttatatgctattagagttgtttaatagtaaaaaaacaaaaaaactttggttgactctgtcaagaataaaatgagatttgttctctaattttagcgtaaaataataaatctgaattaatcatatcccattatctctggacttggagctatatgatcagtactatcattgaatttagacacaaattggttataagggtgttcgtttaatatagtttggtattcggtttttacaaaataaatttgaaaatccgagacaaattggatattcaaaataattgacagatcgtaaggtttatttttattgaagatagaatacttttaattattattgtgagtcggtcttaggttgttgagacgaaagttaattataagaatgtttgtcacaacccattactaagtctaaagcatagaaaacttgggatgactaaacttggggtgacttgtacaatatcaaaaatcgagatcattgcctcggacaataataaattccacaaaagtacgagtgactagtgtccacgagactagtggttgaaaattaggacttgaattcattccctctagaagtttatacaaatttcagaccaactttttaattaacactttttttcatttattttttcttgagcaaaataagagaggaagtaagatagattaaaatttaaacaaccacaagataaacatgctttaagattctagttaagagatggataattgaacgaatccaaaccaattggaggggaatggtctgttagatttcacatgttagaggttcctccatgaagtctagagttagactctttcgaaatctcacaaaatgtagcttgaaggatgagtttgacatcaacaatctgttggtccaatagtaaatctcccagatggaggtgttgagttcaaagcatgttgggagggattttttctcctaaaaagatgaatttaacttggtgtaggtctcgccaggctgacctcgcccatatttacaaattacaatatcatcaaaacccgaaggagtaaacaaagagtggtgattaaagaatgaagtgtcattttaaatagctcccacttgtttttctctcgatctcaatctgacagaaactgatatattccactgatcttcatcgattcatcaaagttttagattttaattcagatttcatcttaagggagggtattacgagtataggaatgtgattatcatattaatgaaagttgaggttttaaaaatagcttaaccaaacaaatgtaatcttgccaaaaagatataaaatgagtccatcaacaaaatttatcggagttacaagatcatcagattccgaaaagcttttctgtttatgcgagcggtaatagtgttttttgatgtctccgtcgatttctttgaaggtggccaaaggcgaaacggagacactattgtgcaacaagttgttcatttgtttccaaacatggtaagctgtagcatgagcaactcctactaatttccaaagaattgtgggagcagtctctgtttttagcttagtccaagccagaattgaaatccaagtaataaagatataaggcgatatcgttaatcctcttctggtgttttctgtatgtaaaacggcgtctttcttttgattcgaaacggaggagtttgtgaagggtaacaagacggaatggttctttatatctgggaggaccaagatggggaaatgtggaaaaagaatgaatcgtagagacaatggaggatactggagggtagtatcatctctgccaagaagattcatgctggagaagcaggccttgtcggctacaaatactcactagagtactacattggaaaacaaccaaaatggcgtaaaagagggttggttgatgcatgaacactggcttaagtcttctgatgatattaataactacgagctggtaagagtatatatgtacgtttacttacttggtttccaagttattgagactcttgagttttggtttttattgtgacgacttctgttgttttgtttgagtagggcaattatgctatgtgcaagatctatctgagtccacacgcagcaaagaagaagaaaacacacgatgaagagatcgacgatttagttcaatttgtggaagcagccttagatgtttctttttatctacttttgctgtccaaagtcagaggtctcattgtctttatatagaatttcttgtatataacattttccactggttgtatagaaaaatcaattttagtcttttgtgcttattcactctaatcaaaatctctaatcaaggtgaaggaggaggtggaggaagaacattttcatcttgctctctaagaagatccaaaatctctgcagggttgttatcaacacgctcttcgtctctgtcttcctctccggatttagtttcgtttatgggcaaataatcaaattcgggtttaatcttccaaaccgttgtttccttttatattacatcatttccttttccttttttattattgggccgaagtagtttatattattaatgggctttaaacaagcccatattcaataattgtcggccaaaaaaaaccctctcttccaagttccaaaatcatttcataaaccctaacaaacccctaaatctttcctttctcaattctctccttcgaagcttttttcttgtgaggtcagaaaagaaaatgggaagtcaacaagtagcgatttcgtttctgacgaacttggcgaaggcggcgtttgggttaggtgtggcggcgacggcactaaactcgtcgctctacactgttgatggtggcgagagagctgttttgttcgatcgattcaggggagtgttggatcagaccgtcggcgaagggactcatttcttgatcccgtatctccagacgccgcacatatacgatattcgtacgaaacctcacactttctcctccaaatctggtactaaggatcttcagatggttaatctcacccttcgtgttctctttcgccctgaggtaatttcgattttagcaacaatcaatttctcgattctgtgtttgattttgtatacattggttgtttacaagatcgagggtttaggatgatcgtgttcgttcgatttagcaatcatttatcgattctgtgtttgatttcgtggaatttgaagtttgtgtacaagatctagagttgaagataatccttatgtgtaatttggtttcttcgatgaatgttactcttattatagaagcttttggtgcatatctatgctggcttcgattgtttgagggattgaataagttgttgtggttattttactgtgaaggtttcgcgtctcccgtacattttccaaacattgggtcttgaatacgatgagaaggttcttccatcgattggaaatgaggtcttgaaagctgtggttgctaatttcaatgctgatcagctcctcactgagcgtcctcaagtatcagcacttgttcgtgatgctcttatcaagcgtgccagggaatttaacattgagctcgacgacatagccattactcacttatcgtacggtgctgagttctcgagggcagtggaggcgaagcaagtggctcagcaggaagctgaaaggtcaaagtttgtggtgatgaaggctgatcaagagaggagagctgcggttataagagcagaaggtgagagtgaagctgctcagttgatatcagatgcaacagctaaagcaggaatgggactaattgagcttaggaggattgaagcttcaagggaggttgcggctactctggctaggtctccgaacgtggcttacttacctggtggacaaagcatgctctttaatctgaaccctggtcgttgagctataacattggtatgctcttttacttctttgaataatgaatgaaaaatggatttggacttaagattcccatttaaaggcattaaggttattcggtttggttgaactaagagtggttatggtttggtataaactgtttggtttgatagtagagtatggtttaggtttgtggaatggtgtggtttacttgtttggccttgttgtatttgcaggtgggaagaggagcttcagtggagacaaaacgacggagctgtgaagtttattaacgttgatgctcttttatttctgatgaacacgatgtgaaaaaagataattgttttgagccgttctatcttttctgactctagaagtaaagactatgccattgttgtcgaaacccgatcattccaatgaaaggcttcaccaaaaaatctaccataacaatagtcgaaatttgtattgtcaaaaacaatttccaacaccaaggttgttgtacttgtattatttaaaatataaattaaaacatggtaaataaattaaataaaacttttttatgtggtcactttggtggcttcggtacatgcggtggcctcttgtggtggggtagacaaactctaagtatagtgcattcacaaactttaacttttcccttcaaattacaatttgctccaccataaccttcgttgttacaactcgttcggcacctcctagcaccgtctaccttattacacgtctctggcggtgctttgcttggataatcatcacacaattcccaattcattgcttttcctaatacaataattcgatcaattacaagtatttatatcgtattgattatatatgcatatttttgttttttttcaatgaaaatatatttggtagaagatttaatattatttacgattttatctccttgtagtgatttattttacagctaaattacaattttgacaaatttccttaattttttttttaaatgagtataagaagttccattttttcaatatttgtatatcttgtaatttataaaccaaaagtttaaccgcaaataacaccttttttttttgttgcattaagcatctatcattataaatcaaacttttagacattttgtttttccttttataagtttttatttttctttgttaatagagtgttttatgaataataaatctaagtgtcatattgctatatatcaggaattattatttctaaaaatagaagaagaaatgagagataatccgtaaaaaatgcctatgaaattgtttaatgaaaagaaacattcattattaatttatatcataattctcttttttcatataactttgatatgtttctttattaaaaatatgttatttaaacgtaataattacctacatgatattatgcattatacactggatgtacaaactgcgaataagtattggaatatgagaggtattattaagtaaactaggtttggatgaagtgactagtgaggatggttgggagatcttgcaatgaaagtttgtgatcatgggctcatgtttccagggaatgtacaagcaggagtggattgataagagattgatccattttgaaaattatacaagtcatttaacaaaagctacatatggaggagattaaaagactaattaatgataatgtaaaataactctgatatattctttattctcttctcttttcttgtaagttctacttatttcccatttgaatcctggtgcttcaactttcaagtaaagctctagtctttgcttctcttcatctctcatgatcaagtttgactcgagtccgttgcagaatcaagtttagctcagatctttcatgatgctgtagatgaagactaaacacccttctgagtcttatcatgtttccattttttgttgcagctcttcttattgacttaggtttgatacctcaagcaccaagactcttcattcttcagaaaacagtgtattgaggatcaaagtaatgtgttaagcttcggttttgacttcaaataaactattataagcggttagacctcttctcaatgcataccacacagctgaatgcaaaacagaacggcttgttttcacagtcatttaagcaactcccacactcatggcaacgttctatgcagacaacgcaagctctgcaagatgacttagaataaggatattgacccttcaatggacatgtatctgctggacaatcaaataccagacttggtttctcacaccaggggcatatctcgaggtcagtaactcgatcatcctctaaatagaattctgatctacaagacgtatagaatctcttcttcctctcttgtaaacccactttagcatctcctcctagcaataagttgagctctttaaactgctcctttgtgaaatacaacgccccaccagtgattaggcttttgactccaagacggtttgaagattttaagtcccttaaagttgacactagtcctgctgtgcttagtctaagacaaccagatacactcagctgcaaaaaaacagacacacatgaacaaacaacacagaatcatataacaagattggttccatcattcgatcaaactaaccttagtaagatgtggattgctagcaagaacttgcttcaagccataatcagtgataccaacacatcctccaagattcaaacatcgaacaccgcctagagcacggcgtgttaacttcaaaagagactcatcagtaactctatattgaagaaatgagtcattaagatcaatacttgtccagaaaaaaggttcctttccaaccgaatcacgcaaagacctacaaactacttcaaccgcaagaatctctttcaactctagatatggaagaaccaactcaaacgcgtcatgagcttcaccaccaccaccaccatcatcatcatcatcaccatcatcatcatcattattataaaaccaacttagagtctcgaacaacatctgatcaacaacaccaatttctttctgattctcatgaaaccaatcagagattgtgttcaaagtcgatctaactctcatacaaaacggatcctcaggcaaagtatgatcttctgagactaaaccaatctgattctcatgaaaccaatctgagattgaattcaaagtcgatctaatgttcatacaaaaaggatcatcaggcaaacccacaaaatcatccccaaattcgcctaaacccaattctaattttctgtaatcgttataagaacctcgaagcctttcgtaattaacctccattaacgaatctctcaatgaattaaggaaatcgaaatctgaaacagatccaatgaaataaatatataaaaaaacggcgagagaatgaatgaatgaatgaatgaatgagaaggaacgggatcgcgtaatcagcgggaaaaaggaaagagaaaggattcgagaggaagaggaagaagaagaagaaggaatcagagaaagagtttcaattgcaaagaagatgactttttttagggcttttactctgttgcgattttggcgcgtgtctaactataacttctaatttaataagaacaaataattaatgagttttttttcttctttttaaattctaattaatgattacgtctctaaattagatattttcattcactcttttttttttctttataagtcagatcttctaatttataatcttttcaaatttgcaggatcttctatttttttgggttattagttttattccttgtccataatcctattgattaactattgtattaagtaatttgccattttgtgaacaaaaattaagaagttatttacttattatagattttgcactttttaataaaggaatttttgttaaagggcaagatttgataatttaattaagtgaatgacttcttgattgttgttaaataattatacttttattttaaatatttatgaatatacttttattttaaaatttggtattttcgtgagtaaataaattaactagaaccaatggaagcagcttattaaatgatgtttaactttgtacccttaaattaactagaacccttaaacagttaaacatcactagattttgacccgcggtataccgcggggctaggtttttaataaaatttgttatataaaatgtatatgtaaatatttgttttattaatattgtttgctttgtttagtgtttaagataatgtatatatagattttagttgttatatctaggatttcatccgtagtatatcgtttcgtattattatcgatcaaaactcgtcataccatctaatcctgcatattgaaattaaacatatctaatagatttcacttgtggtataccgtctcgtaatactatcgaccaaacccttcctaccacaaaccccgttcagtaaaattagacattattttgttatttttgttttaataatactttagtttaaaaaatatttaattcaaatcaatttaaaagttttttttcaaatggttatttaattattataaagtttatatattataatattataaacacgtcctaccatctagtcctactatctaatcatgttcggtgaaattatttttttattttttttaataatatttttattaaaaaatttataatttaaatcaatttaaagttttctttcaaatggttatttaatttttaaatattttaactattttgacaaaaataattaggccatgaaataaaagcatattcttttgaataagatttgctttgatttggtagttaatttttgcatttaataagtcagtggcagccattgtaaataagttctaattgcaggatttatttcacaaaatggctgcaaaaatgtatatatagatttgcggtcaaaaaagttaaacatcatttaaaatgaaagagaatgaaacagtcgtaatgtgttttaattttttttttttttttttttcgtcgtgttttaatttattttagtaagtattattgccaatttcttaattaaaattctatctagttcaatttctcttttaataacaagagcagttattctgtgtgtatacgtcgaattcatgagattcaatcctctattaagcagaataagatctcttaatttaattagcttttccacaaagctgttttgcattatgtaaaaaaagaaaacaagggactagtacaacaaaaactacaaggcataaacaaacaatgtcctagtgaagatcactagtatacataagattcacttaaacaaactccaaactggtgaagagtttttattcagcaagcaaggaaaaaaaagaaaaaaaaccctcttattttgtgtgtactcatcatcatcatctctatgattataccatttacaatgtaggagggatccaaatgtagccatgagtctgcatataaccagctttcttaagtagctgatctgcttccgctgggccacggctaccttgtttgtatgggaccgatttcacttctcccttgtcgatcctgtgaagcagtggagtgaagatttcccaagctgcctgttttgtgattgatcacatacatatatgtgtttaaagatcttctcaatatatggtaaaaatcagattgtggaagtttcaaacaaagttgagtgatgtgaagtatccaggggttctaagtggtgaagtagaaaggtaaaattacctttaattcgtctctgcgaacaaagtgttgttggtcgcctctgattctgcagagagatacacaataagggtcaactaatgagatgaatgaaggttttgatatacagaactattgttactagattcttacgtgtcaagaataaggcgttcgtaagcctctggaattgagacatcttggtaacgctgcttgtacgataggtctagttcactctgcacggtttgcatctccagacccggttgcttcacctgcgcagcaaagccaaaaacttcagattgaatgaataaatgaatgaacaaaagtgagtctctccttttttcttatagtatcgtagattatggttggttcatcaggtacttacagttagcttcatgtacatggcctctgaaggctgcaagcgtataacaaactcgttcctcccttggttttgacctgttgcattgcatgagaggttagaccaaccaaatttcaagtatttgggaaggtttgatttggtctcgatacaaacatttgaatatgtcgccaggaacatctttaaactgaatgcgaatatctgccttctttgaactcattgcctttccggccttcagtataaaaggaacacctgagagatacatcaatacacaagttactaaccactacaactaaaaagggattttggcacatgatgttccaaacttgatctagaaaatgaaaagatgaagagtgaaggggacacatgcacacagtaccttcccatctttcattgttaatgcgaagaattgttgtggcaaacgttggagtgtttgagtcatttggaacagttggatcatctctatatccttcatattgtccaagaaccacctcttcatcttttatgggaatcacagattgaagaacctgaagttcatttaagaaatcagtcagttgttattaatattaattggctgaaaatgcaaatgaagatatcacttgattctacaaaagtttgaaactaaagatgtgatcaagaaaactgtaatcaccttcactttctcatcccggatgtgctcgggtttaagagagattggtttctccatggcgacaaggcaaagaacctgtggtacactaaacttagttaatacataaaagtatctgcagttacaagcaaggaaaaacaaggaaaaatgtcatatggaggtggctttcaacaaggaaatttcatgtttttcttcacaacagacaaatatttcaaatgtaaacacttgcctggagcaagtggttttgaataatatcacgaatgattctgaaaaatagaagattatatatacaagtcatcagaatgcaatgatacttctgtctcatgtatatcatattcaaatgaaacactgagaaaagcttacccgtattcatcaaaatatccaccgcgaccttcagttccaaaatcttctctgaaaacgatctgcaaaaagaaattagagatttatgtggatggattcaactctatacaaaagtttagaaatatttgtgctaagcgatcaaactctcacctgtacgtttgcaatattgtcgcggttccatagtggcaaaaacaagcgattggcaaaccgaagaaccaactgcactaacgatgaatgcgttagattatatctttatttgtctaaattaataaactaatgactagaagcaaatatgtgttaccatgttttgaactaactcttttcccagatagtgatcaatacgataaatctgtggttcttcaaacaaggctccaatctgagaactcagctgctctgcagattccaaatcctttccaaatggtttctcaacaacaatcctagtccatccaccaagatcagctggaaacaatatacatttccaatgaagttattaccaaatattctctatctaataatgttaacaaaatctaacagtaaactcacatttgttagtgcaccatgccttgatcatcttgcttacaggagggtatacagacggaggaagtgcaagataaaacaatctcctcgaagatccttcagcagtctttttagatatctcgtgctccaaaatcgccttgtctaatctcttaaacccttcctcagaatcataaggtccactcacatacttaatctatacaagaaaattgtattttcagttaccaaaaacaaacgggactataactgtgtaaatgaaacagactaaccagctttagaaacttggacaaagcttctgttttcttagatgcattcttctcatcaacaagatatctacataaaacatgataatataagcttttcattgtgtcagatgcaacaaaaaggcggaccggatcggatcatctaacccgcggattttatctctaagctcctcatcagtaatcttactccttgcatatccaaatatatgaacttcatctggattaagaaatccctgtgctcatgtaaaaccaataaacacatcaaataaataaaaacaagtgacattgaaaacaataaaagataaaaaagattcttgtttgtttaaaaaaacctgatgaaatagattgaaaagtgcaggaaaagtcttcttcttagcaagatcaccagaagcaccaagaacaatgatagagagactcccagtttccgtgactggattgtattcttttacaaacgaatcattctttaaagtagacctcttctccatatgccattgaccagaacccatcttccaatagttttttaacactctaaccaaaatacagaacaaacctgtaaaattgaagtttagtgaaattggaatcattgtgttacgattgattgattggttaatcatgaaatcaaagattacttgtgaaattataacattttccaacaattcgagtctcatgaagatgataaagattcttaacttaggctataacataactgcgaaaataaaacacagaatcaatacgaaaattgaatgataagtaatttgtatggatcagatttcgtcgagaaatcaaacggatcaacaaagattacgagaagagatctctctacctgcgacggtggcgacaaaattttcactagtttggagaattttgttatggggtggagtttgatagttcgaatttttatatagataaattagaaagctgatgattaaaaataaagggactgtttgtaaatggatagtagtgaaactaatattataattacgtgaaaccattaagggaattattgtaaggttagtttaatggaaagtggtaatgatcagatatgctgagatattttttggaaacgaaaaagtcaaaaagaataaatgcgacgttgttttttttcccaataatttacgagtttcatattcatttttgaccgttagatttcacctgcccaacaaggcaacaactactatcattttttttttatcagccaccacaaaatagtgtttttttttttttttggtgagtaccacaaaatagtgttaacacaaaatgtctttaacccaattgacataattagtgttatatactaattcatgcaataaatcgtcattgtttgttataataccaaattcattcatctaatataacgtagcgcaatgcattcatttagtttcttctactttggaacgagacaggtaagaaaacgctataatgaaagtaacttttaggcccaagaaatccaaatgagccaagatattaaaagcccataccgacacaataagattgctactgtgaagtgatgccgacacactggaactgtcacttttcaaaggtaacatgtttcttgttatgtgagaaacaaagtgaaatcacattttaaaccacttaggctttgtggtcttcttctctgtggatttacgctcgtgttcaacaggtacagcactagagtcaaccgtggctggctctgatgacgattcaaccggttccacggctttggtcatggcctctaaatctttcagtgacaaaatctcttcattaagataaggagttgaactaccaccatcatctgcaaaaaaaccattgggttttttaaagataagttcagaacacagtcctcttcacaacaaattctttagtatgtaaggggaatcaatattatacctaatttaaccagctttctaagattagtattccctatgtattcacatgatcctaaacttcttatcaaactatttcattcctaagtttgaaagtttctggacaattcctcgtgcagtttagttatccatccctcaaaaagatctcacttactaaatctataatcccgtacatatcgcaatgcaaaaaagttccccagagaaagactatggtattgggtgaaggtaatgacagaaactaacctttaggttgatcgtttgaaaagtagacaatggctccaggaacaaacccagctgagtagaagtcttgtgagaaatcttttatctgtttcttgggaggagttgtatctgacaaaaagatggcacgttatcaagttttcttctcttgacaaatgtaaaatctgaaatctgagtgatggaaacatacacaagtagaaaggaacatctgggtgggcaactactcttttgacaagatcaatcaagccttggatcttttctgatggatgaaatgttgcctccaatgtgtgattatcaggaaaacgaacccggattacagcctagacagtatcaatctatagatagtcagtgggataaaactagttcccaaacatgaaaccaatagtaaaaagaaccttagtgagctttgatcgacgagcagcttcttctgcttcccggatttttcttgtcttcaacgatttatcttttgtataagtaatttaacattacatgttagaagaattaaacaaccaaggtactgatttctttagagcaagcaatacattccgattatgacaaacacagttggatttgatcaaagatttgcaaaattttcatggaaatggctgaagaatgtaaactaaaccatacagattcttcagaacatgttaccttctttcttagtagccaaaaggcggtaaaaatctgcaggtgtgaactcgtagaaatcatcagattcatcgtctgtggaattttcataaacaatcaatcacaagacttgttcaaattcagatcaaatgcaatataagaatcagagatccaaaaaagttaccagcactagaaacttgacttggtctctgtgagatactcgaagtctcgaaaacacgaacctctcgccctaatttctctcgcatatcagcaattttagcctaattttacgaaaatccatcaaataaatattgaattcgactcaagaaatggaaaaaccctagaaaactttgcgggaacccccaaatatagaagaagaagaaacagaaaaatttcggatcaaatgaaaatcgaaatggaagtaggaatcagatgatatagatcaatgagggagaagaagaagaagaatgaagttagacctgagctgaagaagaagcttccatggaatcggtgatctcgagtcgtctgcgtttcaaggtgtgtagagaagggtcatcaacaaacatcagacccggttcaagttattctttacttgctcgctgcaaatccaccgtctatataccggaggcgcttttgttttaggtgattttcaatttaagcacagtatgttttgttttttttacagataagccctctttcttattttcatttttttgacccctctttcttctatctaatttttccccaagtaaaccacaagtcttaaagacttaaactattaaacaaaatgaaatgtatgaaataaactatttttttttgttgaaatgtcaaatttataaatcaacaaaataatttatatacaacttaatccatataacaaaaaaatcaaaaaaaaaattaaaataaaaaacattggcatctctcataatctaaaccaatattaaaaaatctcagagatttggagtctcaaaaaaatatagagaaattttgtgttcttcattttgtaagtgcaagatgtagtagataaatatctgaaatgccaaaataataaaaagataagtgagcaagttaaacaagtgaaatggtaaaatgatgaagtttggtcgtctaatcaacgatcaggtgaattttctagcaaatcaccattattcattcaaaccatatatgtaaggttttaagcataagcaacataaacagctcaagattcagtgcgattgttgaattttcgaaccttatgtctagttttgttatttcgaaactcatgatagattaatgaatttttgagaaatatttattacaaaagagaaaaatatttagttttgtcttattcatttgtaatatataaacattaaattattttgaaaaatacaaagaaataaatgtaatcattttgtacatggcatatcgacaagaaatgttattacataaatatgtgccatctaggttgtacaaaataaaagtatttacccacctgaaattaataaagtaccaaccattaaaaggaaaaaataaaacctttaaagaaaagtattgtgctacgaaaatgaaaatttattaatctgatagcctcttcccacctaagcttcttctttgcttattttaattttatctttttgttgtatccttcttgtctctattaacgctcatctttcaccttcaagctctaaatcgaagcaatcttcacactccacaaaccctaatttcaatgcaatcgcaattcaccatctcaatctctcttcatcttcctctatccatggatccataaatctctgtaacctcacaaaaggtgtttccaatgccaagcgttggtgtgaagctctacagtgtcttcttcaagttccttttgaaacaccgtttacaaaaccggattcaatcttccggtgatgaatcttcctcggatccatttggtgtcacgacccgacccgaagaatccgtcgctgctccgaatccgttattcaccgacggtgttgcaaccaaagatattcatatcgatccgttaacttctttatctgtacgaatttttcttccggaatctgctcttacgccgcttgaaccgagtacctccgcctgtgtttattccggtaaggctcgaactctcaacaacatcgccggatcggatcttcttagtaggagaaatagcttaggttcgtctaattcgttgttgtctcataaggtagaatctagaaggaacagttacggttacaccactggttcgtcctcccctgaggcaggatcctccgacgtgtatagaggatacgcaccgtcgtcgtcgggtggaaactctagaaaacttcctgtgatgttgcagttccatggtggtggatgggtaagtggaagtaatgactcagtggctaatgatttcttttgtagaaggatggcgaagcactgtgacatcattgttttggcagtcgggtacaggcttgcgcctgagaatcggtatcctgctgcgtgtgaggatgggttcaaggtgttgaaatggctggggaagcaggcgaatttggctgaatgtaataagtcgatgggaaattctcgacgacctggaggtgaggtgaagaaatcagaagttaataagcatatagttgatgcttttggtgcttccttggtggagccttggctggcaaatcatgctgatccctcgaggtaaaaacaatgtcttgtttaggtagtgaaactagtgaaagagccaagaatttgttagaaacgaatgtgtttgtgtgtgttcatgcctgcctgaaaatctaagctttagtgtcaactctatatgttatacgatgtcctttacgatctttgatttgtgatctactgatgctaagttcagcttactccttaacctcaatagtcttgataggtccttatcatgtcttgaaattattcaaaccacacttgctttctttcaggacttctcatgctaattctcctcttacggtcttacccattggtatgagatgtggaattgtttcgtcgtcattaatttctgggtcttagtacatgctagatatgtaaattcaatcctttggattccaggaatcttcttggattggattatcaagcttgttttttgatgagaaaaccttctgcttaggattcagtttcctgaaaatgtgcttggtatgttgtcaactgtggttcatatgcatgtcacaccagaagtcttttttttttctttctcattttttaaatgatcactgctttcacgtagttcaaggagtttgcattccataaatgttctgcttttggttcttaacaacacttgctgagtatagataaattttgtagatcgttgctttcatatgaccaaaaatcttactgagttctgtgacttctcgaaatttgaaacttcagatgtgtgcttctcggtgtgagctgtggtgccaatatagcagactatgtagcccgcaaagccattgaagttggtcaaaatctagatcctgtcaaggttgtggctcaagtcctaatgtacccgttcttcatcggtagcgtacccacacagtctgagatcaaacaggcaaattcctacttctacgacaaacctatgtgcattctcgcatggaagcttttcttaccagaagaagaattcagcctagaccaccaggcagcgaacccgctcgttccaggccgaagtccaccgctcaagttcatgccacctacactaaccattgtcgcagagcatgactggatgagagaccgagccattgcttactcagaagagctaagaaaggtcaacgtagatgctcccgtgctagagtacaaagacgcggttcacgagtttgcaaccctcgacatgcttcttaggactccgcaagctcaggcttgtgcagaagatattgcaatctgggccaagaaatacatctctcttcgtggccacgagttctcatactagtgttcaccaaaatctccaggtagcaaaaagaggtgaaccgaaagtagaccggcttttttcgggttttgctgttcctccatgaagcggaaagagctgaaccgagagtaaaccgggttttgttgtttctaccaggaagtaaaaaaaaaggcaagcaaagcaagaggttctttttctctctgcgagtagagttagtgtagagtggtgtttactttgtgagatgggctagggaaagactctggttccctcggggtatttcctgtacattaaactatatacgtgtttctcttttctggtataaattagttgagagttatttcgtttaaaaactgtaatatctattaatccgtcgaccaaaaaatagaaatctattaatatcattattcaacgaaaacattagtttaaaatatttatcaagaaaatgaataatacatgcaagatagcattaatagtaaaagaaataaatatttttacatagaaaaaataaatttggtatcttgccaatataatttgataacgtcgcctgcttttagatttcttgcatctctaagattattccaccctcttccgatataataaccattaccgtcctttccaaggtttaccaaatatgaattgttattgtcttgtgcgtcttgttatgttctcaaccttatctttaggcaaaatcaaaatcaaacgattcctataactaacatcgctatctgttagtgttttttgtatcatcatagttggattcattttacaaaaacttaaggtgtcttaggaatataattaagatttgtttccaaaaactaaaatatttgaggagtttgaacagtataacgcatatatatatatacttctaggccaaagtaatgttccttagtggaaaaaaacaaaagttccttagtggattgccttagatatttatttcaatagtattaattgtattaaacacaactctctaaatttagtacatgttatggatatattttgtaagttagcatattattaatcctctaaatttacaagtttatctgttaaactagtcacatattatgctgaattgtatttacaaaaccttatttttagtgctttttttgaaaagtcttcccaagccaaatctattataatatctaagtacataaaatcttttaatatcagaaaaaactcattttccaagccacataaaaatgttcattatatctttgacatctaagatttatttgatttttacaataaatcttattatttttgacattaatatatttcaatttaaaaatcactattaataaccaaaaaatctagttaaaataatttgcattttttttttctaagaacagaaatacaattgccaacatcaataacaatttattggcaaaacaattaatatctatcaaccaatggcattataaacagaaagcaaataattagatttgctcaaacatgtcaatcaaataaatcgcgaaagggaatccacaagaccaagtgtgagtagaaaatcttcttactagaagaagaattcagcttggaccacccggcagcaaacacgctcgttccaggctaggccattcattattgtcgcagaccatgactggatgagagaccgagccattgcttactcagaagagctaaggaaagttaatgtagataatctcgtgcggccgtgctagtgtacaaagatgcggttcacgagtttgctaccctcaacatgtttcgtaggactcgacaagctcaggcttgtccagaagacattgcaatctgggccaagaaatacatctctctccatggccacgagttctcatactagtgttttgaaactccatgtggcaaaaaaggtcaaccaaaagtaaaccgtgtttttacgggagacaaagcaaaagaacacatgcagaccgaaaagattgatatcatcgttgcaatcatcgtatcatgtgatttgtctcttctatttagagttcaagcttctgttgtatatcatcgtatcgagtaacgtccattttgattaacccaaccaaaccaaatgcagaccgaaaagattgatctgtgtaccaaatcttaacttgaattttgtttgatatttatccttgatagtcctaactccttagtattccatcttcaaaatcctttaagtttctacgatcgattgattcgatgttaaacttaaaggattttaaaccattggctttgtgttaaccggaaattggattgcatatgcaactacgagtttaggggctaagttgttaattggattgcatatgcaactacagatatttttgattaagaatttttctgtataatcgcattaaaaaacgccactatatcattaatgcatgttaccaatcagagccaatagaaacgagtttaatgaaacatcatattagattgtcaatcattacttctccaagtccagttcttaataaacaagataaacgtttaaattttgtaaattttcctaaacctgaaaagagtttaattcagtttcggccatctatatgatttatttatttatttcattagtaaatttggactgtgttttgataatttataaaaagtttctattttcgttctttttttttccttttctaaaataccagttgtttcatcgttggtaacgttaggcccatagagtccaaaacagcccattaaactaaatataacccgactcgtaatcaaaacacccgaacccggatccggttaacgaaggatctccgatttattctctccctcctcggtttacgtgacgagcctaacctccgtcgcaccgtgcttcaaagttcgatctcttctttaaccgccggttcaattattccgggacatcgcctagttcttcatttaaaacggttagtttatcagtcattcaataatctacatcttttgaatcacaagcttcacggattctgagcaaaagtttaaaaaaaactcatcgatattaccaaattaagctcttagcttcgcattaatggcgagatccaaaaactataaattgtttcctttttccgccatatgtgttatttatttattgctcttccctttctgctaaattactgttactattttaagcttcttccatttttttttttgttcattgactagtttcatttgaatctcatttttttttctctgcgttatttcttgatttgtattgttttagttgtttcttctgtgtagtgattttagatctaagctaagtaatgtatagtggaaaagtttggaaacttctcacagttggactcaatattactgtttatagttcttcatttgtttgaatctattggatactaaaaaaagtttatgtactcttgttttaggagctatatgctttgtttgattctctgttttttcactttcctcttcagcctatgtttaccaaaaagttataatcatgtactagtagttgcttttatgttccataaaaagaaaagaaaatgcaacattcaagctccgagctagtataatctgccaccaaagctctctctcttttacctctgtgcttccagatctatcctcactttcttcaaaatacttcctcatagatcaaggaaacaagagcactttcactctagtactcttgaaagcttgaaaatggttagatctagcaagttttcacaggaagcgacgctaaagagaggagagagcagagaaaaccctactgatttgagatctaagctaactaatgtaactataacacttgtgtgattcaatttgatacgaaaaagttttatgtattcttgttttaggagctatatatatgtcttatttttaattctctgtttttattatggaggattttggtgacactggtctgttaattgaatatgagatgatttttatgcagatatatactattgaaatgcgtgatgtaagatttgctatgagcattcgaccaaggctgaggatagttggcgttttgattttagcggcatggattgggcttgtggctttgtttggtttgctaaaacctataaagaatggttgtactatgacttacatgtatcctacttacattcctatctctgtgacggatgatacaactcctggaagatatggactttatctttaccatgaaggttggaggaagattgactttaaggaacaccttaagaaacttagtggagttcctgttcttttcattccaggcaatgctggtagctacaagcaggtaaggatcctccttttcttggttcaatttctgagagctagaagtaacccatttatagtaatattatatgacttagatggtgccactataaaatcattagatattttcaattgtgcaaagccgaagttggaattctttaactagcagttttttggtggaggcgttgtttctttaacatgtaaaatgtgttactcttgttgggaacttatctcctggtttcatataccatactccttataggccctgtttttaattgttttccactcaggtcaggtctgtggcagcagaatctgatagagcgtttcaggggggcccatttgagcgcacattttaccaggaagcttctctactccgtgggggaggtgcagatacggagtctgtagactatgatttgcctagtcagtacagtaacagactagattggtttgctgtggatcttgaaggtgaacattctgcaatggatggtcgcatacttgaggagcacactgaatatgtcgtatatgccattcatagggtgggaattttgatagtacagaaccatattatttaattgttatttgcttggtataaagatgcccttgtgcgtgcgtgggaacatcttttcactagtttcatcaagcaaagttctctaagataacacaacatacggcttttaagtcttgtttccaagtgagtttctctctgtttgatcccttattgttatccacttattgtcttcagattctagatcaatataaggaatctcatgataccagagaaagagaaggtgccgctgcgtccagtaaattaccacatgatgtgatcttggttgggcattctatgggtggttttgttgctagagctgctgcagtccatcctcgtttgcggaaatcagctgtgcaaaccattctaacactctcaagtccacaccagtaagttttctccaaacttaacaagttttactcgccaaacaacatggtttgggtttttatgtatctaatttcatccagatcacctcctctggcattgcagccatccttggggcattactttgctcaagtgaatcgagaatggaaaaaaggttatgaagttcaaacatcccctgggggaaattatgtgtctgacccattactatccggagttgttgttgtatccatttccggtggctacaatgactatcaggtcagaaaatatctactagtattttggttcttcaattgcttgatcgattctttataccgtggtgctttctttgtttgcattttagttccagtgggtgagatttgaacttttcttaaggctgaaaattttccttctggcctcaggttcgatcgaagttagagtcacttgatggcattgtcccttcaagtcacggctttatgataagtagtacaagcatgacaaacgtgtggctgtcaatggaacatcaagctattttgtggtgtaaccaattggttgttcaagtaggtaaaattcccttatttgtaatctggaaatgccatgttcaacgaatttgaaaatttgtatgccatgcaggtttcacatacgcttcttagtatggttgactcgaaaactaatcagccattttctgatactgataagagactttgggttttaaccagaatgcttcaaagtgcattagctcaaagtttcaatggaatgacacccatggaagtctctcatgagttacccatattggcctcaaagggtaatagtaccatctctaccctgaacatatgtatatcttgttttctctgaaaagaagtcctcaaataaaggatataaatttcgttgtattataagcttgtctaatcgtgggggttattaacatttatcagtatatgttcttaagtaatccgaatataaaaagctggaggtatattttatctatcaaacaattgcaatggctaattttgagaacaattcattaggtgtacatattacttgtgggtacatggattctcttatcatattactgtctatgtttccaggctctacgtgtttcctggattggagggatgatgctctcgatagggatctatacatacaaacaagtactgtcacgattttggcaatggacgggagaaggcgctggttggacatagatttattggtcagtgctgatagtattcctttagggatgtcattttagacctatatatcacttaaataactatatcgatctcccatgaaacattttctgtacaataggggtcaaatggaaagaatcactttatatttgtcacaaatctggtgccttgttctggagtaagactccatctatggcctgagaaggagaaatcgaattcaaatttaccggtttgtgaaagggtcttggaagttacatcaaagatggttctcattccggcaggccctgcaccaaaacaggttaatatatactgtgtctgacaaagtaatttagtgatcgactgcaacattgctggatttgtttcctgtaacacaaactcaacgttctttgtgtatatgtttactagtcggaaccagggagtcagactgaacaagctcccccatctgcagtactgaagctggggcctgaagacatgcgtggattcagattcttgactatctcagttgcgcctcgcgaagtattttctcaccttgatacatatttggtttctttcaaatttcagcagtttttgaatgacaaaaagcatgtaactgaaatgagaccttctcttgcacaggccgtttctggtaaacctccagtagcagtttccatggcagtagggcagttctttaatcccggagacggggccgtggaggtctcatctcaatcaatgctcttatccacttactgggcaaaggttattattctgaaaagaggccacacttttcctttgcatctctaatgctttgaactaagctagtgaagtcattagttacctgatttcagttttgggttacttttctgcaggaaatatttttgaaggaggaccatcctctagcttacaatctatcgttttctaccagcttaggtctattgcccgcaacactgtccctgaaaactactggatgcggaattaaaacttttggtttaccagacggcgagacaggagacttggacaaggatagtgagtattccaaaccctctctttaatcatagaggtctttcttttagttttgtctgttaatcttctagtcagcatctgccgtaatttcctgttcttttggaataacataatagtcttcactcttcagttctt

SEQ ID NO: 472 - DNA, 70952 bp, Arabidopsis thaliana
aagcttaaagattgtcattcccctatcgatgttataaatctgatcattgttcaattttcagagctctgcaaattgcgttgtttcccacctgttgctcttgcctgggattctgcttctggacttcacgtttttgcaaatctatacagtgagacaatagttattgattcatcaccagctctttggagttctcagagttctgagaaaacaaccgttatgctattggtcagaacttgttgtagacaaagctagattctgttatcctcactgtaacaaaaaactcaaatgtttcttccgtttccgtgcccttctacaggttgaccctcattgctcatacaccgcaagtgttcatgtttctgctccagccatgtccagcagatttgtccttctatatggtcctcaggtattttatctttaacctcttgagtatctttaataatttgtgtacgcactcacatggtactaattaagctgtaatagtattgtgctacataaaattattacagtggatgagcctgtgtgtcacttgccacaggacttcctctccaaacttgataaccttttgtttcttaaatatgagatagatttttcttattagggattgaacatttcttcatgttgcgtctgatattgcagatagttggcttctcatttgccgtcataatgttcgctcttatgcggcaagctaatcaatgggacaacaaattatcagtgccaccattactttctgctgtagagtacaatttagaaatgccatccccatttctgcttctagctgttttacctcttataagttcattgttctactccttcctaatgggtcaaccaattcctcccctcacaagcttcacagtggtctcgttgatctgttatttgttggccaatgccttcatcagtgtgttaactattgtttccaaatttcccttccaagcgtcggcccttgtccacaccactgttaaatcaaggtatttgctttgctttcatcactttttttggttcattgcaaacctattcacctctgtccagaaataagtgaataagcgtcaatgtgttgcaggtgccaagctttggaaagaaactattctcttgctttccttcattggttttctatactttcttccagtttcttctgtttaaaggtttgcttttcgattctgtcctttatctaaaatcatctgatattaaccgcatgctgtccttgctctacatgaaaaaaaaatagttttagtgtagctaagttttatcatcataatgatttattgagattctgtttcttaaagcaggcaatccgaattctgaagctcaacacaacaattcttatgacactaatcgcagttaccttggtgtcctttgttcatccggctttgggtctttttgtactcctcgcctctcatgccctttgctgccataactccatgtgctggtaagtaagcaagctttctgtcttttcaagtcttgtcatgtgagataggaagatgcctcaaaactacatcaaacataatggttttaccccttataaaccaatatttgatccagaaaaattcaaactcagataaataggaaaatcatcaatcagaaatcagtaggaggcaatcaaagctgatggtagttttcatgtttttgtttcatggaagtattatgatggcatcaaagagaaaggaatcactcgaccagaaaaatgaagccgagcgtaaaacgcgacatccctcaagcagagaggatcccgtgtcaggagacttgtctgaaaagtcatttgttgagacgcaagcagacatcttcaaccacaggcacggtttactaatattgcatctccttgcagctttgatgttcgtaccctctcttgccgcttggttccaggtactttttccgtgtccataatcaggcattcttcgttgcaattcgattgactctaatgcaactagtgaaagtgctttattttatggtttaccactcgagttttttttgttttggtttttagcttatgccaatacctgaaaaaggcttgattgatgtttgaatggaatgtttttgtagcggataggaacaggacaaagcttcccttggtttgctgactcggctctctgcgttggcgtaatcttccatggaatactgaactcgagacccgagtcaagcattctacgctctttcccgtttttctcaggacaccaaatccgtccccatcacatctatcttctcgctggctactactgcttcttctccgggctagagttggctccatacaaagtgttctatgcgatagcttctttaggctatatctctttgactcttaagatctcacaggtgaacaagaacgaccttcgtttccgtactaaaagcagaatacacagaaactgagttttacagtcgcatgataacacatttctgtgagacgaaaatcactactcgaccctaaaagcgcgaatgaatgaccgagatttatttttaatcggtcaggtgtgttgattggggatcttataaatgaagtcagaagagttttgttgccatttcaaacttctccaataacattaattagaattggtttcattgtgtacttgtcatgtgtttttgtatttctatctttatgtatgttatttactaggagcttcattgctcgaaccagactactatgataaattttgtatgatttggttttggtaaatttaatgaggagattctcaaattggcaacaaatgagttaacgcaccattttaagttctagtacacgcacaaaagcaatcagaaacaaatgtcattaaaaacaccaaaatataatgattttgcggaattcactagccaccagagccacaacttctacggccaaacatggtagcattccccatcgccaagagaaactttaaagagctactccatcatatcattagactatttttgttgcaaaatttaggatcaaaaacgccaaaacaaagtcaaaatttttaattaaatttggaagttttgaaagactcataatagtttatgctgggatcaagagaagtcaattgactaacactatcaaatttgcatacagtaataaatatttcttctcggaactgccttttagggcttcttgattttgacagattctgcagttgcttatccagaaagcaacaagtataacttctttaatataactccgatcatagttccgtcactttgctatggttttatgggttggtattaaacatgacagtacttttatctttccaacaatacatcatatctcgtgtcgacgagcctccaaagttgcctcctccacactgcattcattttcttcttcctctttcttattcttctcttctccacctctgatctgctctggtcttgctcctcaccaccaaagagatttaaaacagccacaaagtaactaatctggcccaccactggtctccacatcctccgaaacgtctcattttctctcttctcatttcctcccatttcacgatttgttctcaacaccaatttctccgacatgtttctcactcttctctggtctgctttatatcttattacagatccaaattcgccaacatacacaacaactcgacaccaagcagcaacgtcacgacgatcgataataagatatatgaccactgacatgcttactttgctagggttctcttgctcgagctttctttctttgctgcaacgacgctacaagtgttttataaaaatacacacgagcttaccatggttatcacagatggtactccgcaccctcttcgtgggatactcgcaacgtttgatgacttttctcgtcggacgtcagggctgaatataaatgtgttgaagtcttctttatttgcagcgggaagaggaaaacaactactccaacaagaagcctaaagtgttggtcttgcagtttgtgaactaccaatccgttatctaggactgcctctcactaccaaagctctagttatccgttatacacctttacagattgaacctttttatacatgatctcatagttttaatcaatttacatttcatcaaaaaagaaaatgggcataaattttctatcatagttaaatcgcacatgatacacattaattacagctgcaacacacctccaatactttcactttgaaaagccttttcaacaagcgggttagaaaaatcgatagtatattagagaaacttttgaaagcatagcagatattactatattagtaattataaccgaaatgattcatgaacaatacgtttgtcgtacctagtgaagatgataaggcatcaagtggccagtagctaattagataggaagcatagtagttagagattggaaaacgtgttttggactattttgtgagtaagagtttttggctagaggagagtttaagatctctacattgattgattgagtaacaaagatatttttatctttaacgttccaacatcattattttgttttttgtacgaacgtaattaacaaacacatcaccagacatttcttgtttatataaacattctgaaaacatacaaagaaacactgagattaagtaaaaaataaacgaatgttgcaacagtaaaaaaaactgaaatgcaaagaagcagtacttacaaaggtcattaaaaccaaaataacgcgctatgatgaactcaataaatgaccaatatggtgttggcttagtggtaaatctctcaagtggagggatctcttctcccaggtaatgaatttaatctggtatagatcttgcatttgggagatgtatagctcttctagtttgaagttccatatattcaaaaaaaaataaaaattaactcaataaatgtagacagccacaaatttaatatcatttgatttaatttattttaattaggtttgatttaatttaatttattttagttagattagatctcactaaatttacttaatctattttatttttttgtcatcaatctagtttttattaatatcatttttatcgctatgctgttcatttgcatgttgtggatttcgcgaccaatcgtaatgctaatcgttgatgatcgctgaaaattctagcaactgaaaattgtgatcattggtcactggcgacagtcattaccattaatcgttgaactatcaacatgcaaacgaaaaaatttggttgctacggctagtttatgttgccaataatatacaaacgaacatgcctatagggatgagtcattccttgacaacaaccaatactataatataacttttaatataattttttttatgaagtttcaaataccataatatttaaaattttaaaatatttgaactctgtaaaacatttaaattatttttaataattaaaatctaaaaaagaaaaatattaataatatttgagttctatatatacatattataagaaccatttaaaacaaactgttaatgtgacttgaattctaaattttttaaataaaaatataattaaaacaaaaaaataacaaaatattgtttaatatcaaaagacattgttatattatatgatgaatttgaatcgatattaatatgtgacaatatattacggataaaattttagaactaacaatcaaatataattatataatattaaataataaataaaacaaatataacttaaaaaataaattttatagttataaaaaatcaatcagcggtacacctactattaaatattcttgttgtaaaagaacgtacgtggagccaaattatattgcatgtggtcgaagcaaatttaaaaatgaaaagctgttttcctccgttaactataggtgtttacgtgaagaatgcttttactcgagtgaagtgatccacgatccacttatacgactcttttctctattggaattcgacttagctgtttaacaaaatttagtggataaattaaaaatacagatcatattgttaataatttccttaaacatcagaatgtatcattcagttcagataagaaatacgcagagaaactaaacaatactccatgtacatgtctttaagggattttggtcaactctatcactttcctccaaaaactttttatttctacatctcataaatttttttcattcatgccatatataaaaaacagttttgccctcagctgttgtaacaggtttatgtcagttaaagtacaacatccggagacaaaacaaatatctggaccaaaacaaaaagaccgaatgaaaaaaccagtaaatgattttaataaatcctatttgaggaccaaatcaaacgaaatataaacaattaaacatcaacaatatgaaaagaccatagttagaatttggaaacattaaaatcaagggacaatgaattaaaatccggagataaaaaacagttaaaaaaatatactagttgtcctcgaattttacatacatttatccctgtaagaagtgactcagattttagtcttcgggtctaagtcataacacgtgaggcgagctgactaaagtcataacatgtgaggcgagctgactaaggtcataacacgtgaggcgagctgactaaggtcataacacgtgaggcgagctgactaaggtcataacacgtgaggcgagctgactaaggtcataacatgtgaggcgagctgactaaagtcataacacgtgaggcaagctgactaaggtcataacacgtgaggcgagctgactaaggtcataacaagcttgagggcgttttggtctttttcgcatgagctctgtaactatatctttttcttcttctctgtaattctgttagatcggagatagagaaagagagagaattgtaatcaagttctagagagaactagagagagaaagcttgtaaagatacattgtaaagaaaggttctagtggatttccggagagattctccggcgagacgtagcgattccggttgaggaacgcgaactcgttaaatcgtgtgtgtctttgtttctttaagttctcttcaaagtttcgattcattctcaaagtttaagtcgtttgattcgagagttttgtgagctaagtgttgatcaaaaccttacaaattggtatcagagctcaaggttcttgagccagttcgaatcggagtatggctggtaatccaatcgcgatctttgatggatccggtgatttctcactctggaagacaaggatcatggctcatctcagcgtcattggtttgaaagacgttgtgcttgggaccactccgaaacctctaaccgaggaagaagaagaagatccagagaaacgtaagaagcgagatgcggatgaagtagcaaggctcgagcgctgtgacaaggcgaagaatgtgatttttctgaatgttgcagataaggtcttgagaaagattgagctatgtaaaaccgcagcagaagcttgggaaacgttggatcgactattcatgattcgatctttaccgcatagagtatatactcaattgagtttctatacattcaagatgcaagaaaataagaagatcgatgaaaatattgatgattttctcaagatcgttgcagatcttaaccatcttcagattgatgtaactgatgaggttcaagcgatattgttgttgagttctttgcctgcaagatatgatggtttggttgaaactatgaagtacagtaatagcagagaaaagcttagactcgatgatgtgatggttgcagcaagagataaagagagagaattgtcttagaacaatagaccagttgcagaaggtcattttgctagaggaagaccagatggtaagaacaataaccaagggaataaaggcaagaataggtcaaggtctaagtcagcagatggtaagagagtatgttggatctgtggcaaagaaggacacttcaagaagcaatgctataagtggatagaaaggaacaagtcaaaacagcagggttcagataatggagagtctagtttggctaagtccactgaagtttttaatcctgctatggttctaatggctactgatgaaacgttggtggtgacagatagcattgcaaattagtgggttcttgatactggatgctcgttccacatgactccaaggaaagaccggtttaaagattttaaagagttgagttcaggttatgtcaagatgggaaacgatacttactctccggttaagggaattggcagtatcaagattagaaactctgatggatctcaagtgattcttactgatgtgagatacatgcccaatatgactaggaatctcatttctcttggtacactagaagatagaggatgctggttcaagtctcaggatggcattctgaagattgtaaaaggttgctctactatcttaaaaggtcagaaaagagatactctatacatactagatggtgtgactgaagaaggagaatcacattcttctgcagaagttaaagatgagactgccttatggcacagtagactcggtcacatgagtcagaaaggaatggaaattttggttaaaaagggatgcctgagaagggaagtgattaaagaacttgagttctgtgaagattgtgtgtatggtaaacaacacagagtcagttttgctcctgcacaacatgttactaaagaaaaattggcatacgtccattcagatttgtggggctcaccacataatcctgcatcacttgggaacaatcaatacttcatctcttttgttgatgattactcaagaaaagtttggatctatttcctaagaaagaaggatgaagcatttgagaagtttgttgaatggaaaaagatggtggaaaaccaatcagacagaaaggtcaagaagctaagaacagataatggtctagaatactacaatcactactttgaaaagttttgcaaagaagaaggaatagtgaggcataagacttgtgcttacacacctcagcagaatgggattgcagagaggttaaatcgaacaataatggataaagtgaggagtatgttgagtgagagtggtatggagaagaagttctgggctgaggcagcctccacagcagtttacctcatcaacaggtcaccctctacagcaataaacttcgatttaccagaagaaaagtggactggagctcttccggatctaagttcactaagaaagtttggatgtttagcatatattcatgcagaccaagcaatgttaaacccgagatccaagaaagggatcttcaccagctatcctgagggagttaaaggatataaagtttgggttttagaagataagaaatgtgtgataagcagaaatgttattttcagagaacaggtgatgtttaaagacttgaaaggggattcacagaacactataagtgaaagtgacttagaggatttaagagttaacccggatatgaatgatcaagagtttacagatcaaggtggagcaacccaagataactcaaatccaagtgaagcaactacaagtcataatccagtccttaactcacctacacacagtcaagaccaagaagaatcagaagaagaagattctgatgcagtagaagatctgagtacttatcagttggtcagagacagggttcgcagaaccattaaagcaaatccaaagtacaatgagtcgaacatggttggctttgcttattactcagaagatgatggtaagccagaaccaaaatcttaccaggaagcacttttggatcctgattgggaaaagtggaatgcagctatgaaagaagagatgatgtcgatgagtaaaaatcacacctgggatcttgtaacaaagcctgaaaaggttaaattgattggttgtagatgggtgttcactagaaaggctggaatacctggagttgaggcaccaagatttaaagccagattggtagctaaaggttttacacagaaagaaggagttgattataatgaaatcttctcacctgttgttaagcatgtgtctatcaggtatctcttgtcaatggtagtacactacaacatggagctgcaacagatggatgtcaaaacggcattcttacatggatttctagaagaagagatctacatggctcaaccggagggatttgaaatcaagagaggatcagataaggtatgtttactgaaacgatctctctatggccttaaacaatcacctaggcagtggaatctccggtttgatgaattcatgagaggaattaagtacactaggagtgcttatgatagctgtgtgtacttcaagaaatgcaatggtgatacatacatttacttacttttgtacgtggatgatatgttgatagcctcagctaacaagtctgaggttaatgagctaaaacagttattaagcagagaatttgaaatgaaagatttaggagatgctaagaagattttgggaatggagatttctcgagatcgtggtgctggtttgttgactttgtcacaagaaggctatgtaaaaaaggtcctgagatcatttcagatggacaatgctaagccggtttcaacaccattgggaattcatttcaagctcaaagctgctacagataaagagtatgaggagcagtttgaaagaatgaagattgttccttatgcaaatacaattgggagtatcatgtattctatgataggcactagaccggatcttgcttattcattaggtgtgataagtaggtttatgagcaaacctcttaaagatcactggcaagcggtaaagtgggtcttgagatacatgagaggtactgaaaagaagaaattatgtttcaggaagcaggaagactttctgctaagagggtactgtgattcagattatggcagcaactttgatagtaggagatcaataactggttatgtgttcactgtgggaggtaacacaattagctggaagtcaaaattgcagaaggtcgtggctatttcatcgacggaagctgagtacatggcccttactgaggcagtaaaagaagcactgtggttaaaaggttttgctgcagagcttggacattcacaggattatgtggaagttcatagtgattcacaaagtgctatagcattagcgaagaactctgtgcatcacgaaaggacaaagcatattgatatcaggttgcatcatcagagatatcatatgtgcaggtttaataaaggtggtgaagattgcaacagaatgcaatcctgctgatattttcaccaaaactgttccagtggctaagtttgaaggagcattgaatatgctccgagtcactgaaaactgagaggtaattctcgtgttccggagaggagatccaagaactagaacaagttgagacaaggaagacaatcagagtcaaggtggagaattgtaagaagtgactcagattttagtcttcgggtctaagtcataacacgtgaggcgagctgactaaagtcataacatgtgcggcgagctgactaaggtcataacacgtgaggcgagctgactaaggtcataacacgtgaggcgagctgactaaagtcataacacgtgaggcaagctgactaaggtcataatacgtgaggcgagctgactaaggtcataacaagcttgagggcgttttggtctttttcgcatgagctctgtaactatatctttttcttcttctctgtaattctgttagatcggagatagagaaagagagagaattgtaatcaagttctagagagaactagagagagaaagcttgtaaagatacattgtaaagaaaggttctattggatttccggagagattctccggcgagacgtagcgattacggttgaggaacgtaaactcgttaaatcgtgtgtgtctttctttctttaagttctcttcaaagtttcgattcattctcaaaatttaagtcgtttgattcgagagttttgtaagctaagtgttgatcaaaaccttacaatccccaaattttaaacatacaaaagaaagagcaatttcatcttaacacatacttaatacggtagaagtgaaatgatggaaaagtagtaaaaatgaaaataatataagaaattatgatgcaaatgttctctatctttaattaggtcgggtaatatctttcaattcagataaaaaaatgcatctgtttggggccatcgctgtttccactgatatttccccacttgcattaacaacgttcaactttcacttggatcgaactagcacacggattggaaactcatggctgcatttcttcccaatagaataccacgtggactaccaattttaacaagctggttcatcccctaaactagttggtaggcatcaagtaatttaatgcagtggtccatttaagaaatgatatagagaaaaaaaaagttaactagggtaccgtatatttctatgaaaataatattactcgaagcggtttttaaaatattgttaaagcagactatgaatttttaaagagattatagaaatttcaggagtaagttactgaataataatgtagttttttgtaatatctaaaagttcaaaaccgaaaatcctacattttttataggcgagatccacacaatattcatcttctttggagaaaaaattctttccaacatgtcgaatccaacacttctaccaaagagatttaccaccgaaccaataccatattggtaataatgtagttttacaatgtgttaaaccaatggttttgctaaagatgatgatgaatgtcattcaacttgatgatctcttatcatccttccctgctacagctcatccttccctgcgacagctcattactccatacatatcaggttagctcttgctagtgacagaaaataagttttcgccatcgttattccaaaggctgacacgaactcttgacactgcaactgcaacgctaatgcaacatccatatcttgatccaaccttatactcgtgcttctccttgttctctcgctcctatcacttctctgtcttttaatacaaacaatctcgaaagatcatctctttggaacctctcttgaaacgaagttgtttatctatttctgattcttggactcagcgtttcccttgccaatcaagttaccataagtttaataatttatatcttttgaatcaaaattaaaagatcgtagtcttaaaattaattttttttatttatattataaatttgtttttgttaagaatgtatatcccttatacattaactgagaagcagtttaaaaaaataactttatcttcatgtgtgattaacaaaaatgctatgattacgtatcaccttaatatagctcctcaactcttttaattaattctccataatttactaaaatatatatttacaccaactagccatcggtatttaataacacttatattactcattaattaatccaaatataaactaaaaaaaatgaatttatcgtagtataagatttaatatgttctgatttcaattaattaaataaaacgatattatatttaacatatgcaataagagatgcaaatctttagaagattaaacacttaacattttgtgtaccgattaactttataactatacatgtttatataaccatgttacttttaaaaatatgaatattaaatatatattttaaaatttctaatcgattaaaaagattaatatccactaataaatatctacaatatggaatctaagtatctaacattatttgataatcaacttaactataaaacacaccaaaaaaaaagtgccataaatgataacatttcatcaatactttctcatcaatccagctgggccatcttggatttgaaccggatacctcgcccttgatgtaaaatattgcactcaaacctatgaatagcgatattctcataactcacaaagaaaaaaggtgatttttctcaatcttttcgacattggttatataggagcacgtccgaaagattgagaaatcaaatttgaatgtatataatccatggaatggaaaacaaaatatttgcaactttgaatagagaaaaaaacttttgttatatgtttttgctttatacaaacagattttcgatcttgataacaattttacttgaattgttttattttgcacataatgcgggtgattatcaagtatttcactaaaatgaaaacagtttaggttacaatcgaaaaactacagacctatacactggttgcatggcaaaagataaaaagcattgaagcataataataaaaaataataaaaacaagtatattttttttctcttttctcatggcttatagttgatcttacatacactaattgctacttgattttatccttttttctttaaaattcaatttaaatatatttatgtttacctaatacttgaatttatctaaatttgaatatatttatctaagttcacaatatcaattggagtttccgactttctataatagaaaaatcttttgccaacaatagtaatacaaaaagaaatatgttataacttaaaactaaaaatttatttgagtagacaatatgttataacttaaaactaataacaaatgaaatcttgcgccaacaatagtaatactgatgtgtgtgtatatatagataccataagaacaaaaaacaaattaataaaaccaaaaatcaaatcatctaccaaaaagtaaaaaaaaaaaatgaaacaattgttagtctttctatttgtttttagcatttgcatgctagaccatgtatcaggcggcggaatcaggatctcgaacgaactcaaaaacaagaaacttctttggatgcggtgttattccaaagatgacgtattaggtccaaagataataccaatcggacaacattatgaaaatctttttgatattaacttttggcatacaacccgttttatgtgtactttgagacaaggtcctaactttagacactatcagaactttacagcattcaagcttttcgctatggcagatgaaggaggtctatgggattggagagcaagagaaaatgggatctatttaaaaaaagaagctggcgagaaagttttaaacccagtttggatgcataaagagtatgattggatttattaaaattattgacaagctatctaaaaatgaaaaagaagaattttcttatgatttaaaaacaaaagaaattatacatgtatgagaaaaaaatcttctcaaattatattatgatttaaatgtaagaaaaaatatatatattgataaatttggatctcaagtattatcatttggcaaagaaaaacataaaaattgtcaattggtgatgagccttggactgatgcttttatctatggaatgtatctttaatcattcgatctcaccagacccatcaccataagaagaatcaccatataatatgtccccaccaattgaagacaaccatacaaaacagttatatagctcttggacaatgagaccccttagcccaattaatcaatctcttgtacaaatcaattaggtttaactagtatatcttataaaaggcattgccttgttacataatctcttgtacaactcaattaggtttaacttgtatatcttataaaaggcattgccttgttacataatctcttgtacaactcaattaggtttaacttgtatatcttatataaggcattgccttgttacataataaactaagaaatatattttacaacttcaaggtgtgcttgacattcaagatttaggttcataccatgcaagataaatatatcattaaatatgaaaacggtttagattacaatcaaaagattaaagtacaaagacaatgatctcagtaccaacctgtctataaggcatgtaaagccttttgtttttaggcacaaattgtatagcaaaaattgaagccacatttacaaaagtgtctaagtgacgggacctccaatagaaatattaatcctctcccggtttcgagtctccatagttgatactttgtcattctgcactacttctttaaatttttagttttttattaaatttaaaaaccatattttcaaaatattctttaagccacattaatttaaggaccggtctcaaatgctcacatggtgaaaaggtaaaaacatggaagtataatattactatagtttagagaataaatttatctaagttcacaatatcaattggagtttccgactttctataatagaaaaatcttttgccaacaatagtaatacaaaaagaaatatgttataacttaaaactaaaaatttatttgagtagacaatatgttataacttaaaactaataacaaatgaaatcttgtgccaacaatagtaatactgatgtgtgtgtatatatagataccataagaacaaaaaataaattaataaaaccaaaaatcaaatcatctaccaaaaagtaaaaaaaaaatgaaacaattgttagtctttctatttgtttttagcatttgcatgctagaccatgtatcaggcggcggaatcaggatctcgaacgaactcaaaaacaagaaacttctttggatgcggtgttattccaaagatgacgtattaggtccaaagataataccaatcggacaacattatgaaaatctttttgatattaacttttggcatacaacgcgttttatgtgtactttgagacaaggtcctaactttagacactatcagaactttacagcattcaagcttttcgctatggcagatgaaggaggtctatgggattggagagcaagagaaaatgggatctatttaaagaaagaagctggcgagaaagttttaaacccaatttggatgcataaagagtatgcttggatttattaaaattattgacaaactatctaaaaatgaaaaagaagagttttcttatgatttaaaaacaaaagaaattatacatgtatgagaaaaaatcttctcaaattatattatgatttaaacgtaagaaaaatatatatattgataaatttgtatcttgatctcaagtattatcatttggcaaagaaaaacataaaaattgtcaattggtgatgagccttggatagatgcttttatctatggaatgtatctttactcattcgatctcaccaaacccatcaccacaagaagaaccaccagcttatatctccccaccaattgacgacaatagcacagaatgaattgtaccttttatattagattgtatatttgataactaccgatgttggacttagtaactctttaacctatttgtgacacacaagttattacaaaaacacaagttaacctaatttagtatgtcttcccattatcaaactctcacaagtctctgacaccaacaaaggttccatggtaacggatcgattacaatcttcatgatcagactatggatttctaaggaaatttcaggaatacggaaccgaataatagtgtagttttacaatgtgaaaattgccttgatctgtggcagattcaggctaaagatgatgatgaatgtcattcaagatgatgatcacatttcatccttgcctgcgaacagctcttgacgccatagcttgcaggttagctcttgctcgcgacagagtagaaaccgatgaagaagaagtttcagccgtcgttgcgccaaaagctgatgcgaactcctgtcgctgtaaccgcatcgctaatgctgcatccctattttgatccaacctcatacttgtacttctcctccttctttcgctcctctcacttctctcttcagatacaagcaatctcgaaatatcctctctttgtaacctctcttgaaacaatgcagtttccctgtttctgcttcttagcctttgattcggatttctaggactcggtgtctccttgcctttcaagttagcagaagcagctctctgtgcttcgacttctttagggaacaaaagctggattgtgttccaaagaaccgtattgacagtacaatatcttccatttctacatagataaataacactgttagacaaatctcgaagcttttaatccaaaactcatcaaagttctatgctatttaccctattagttgcctgcatttagggcatttccttccacacttatccgccgcagatcgcaaacactttttgcagaagctgcagagaaccaaaattggacaattcagtaccaaattcaccatacaaagataactttttcttgtctagttaaatctacctgtgtccacaagttgtagtactaggttcaaagcaaatctcaagacaaatctgcagaatcacgaagcaaaaatgtcaagctcaagaaccctaaatcaatgaattgcaaaaaaacaaaacagtctcagcctcaagattcagatacataccgcgcaagacaattcatctcgaagcttatctatgcaaggaagcacaacatgatctgacaaactcttctcatctttatctattttcttctcttcttttgtttctgtttccatctctctcttctttttcttcttctctgcagatttttcttctacaaccaaaacagattccaaaacttcaacaaaaacttatctctgtcactaatttcattgatcctaatgtttccaacaaactaatttcatgaaagtaccttcatgtctgattactttatcaagatcaataacaggtaacggaacaagactttgcttaacacgctgattcctggaatccaaaaaggatactaatttcaaaaaaatcatttgacaatttcgctaaatctgaagaaccctaaagaaaaaagaatcgatttttggtttaccttcttgaagaaccagaaggtggggttgatttaaacaacaaattggaacgtctccttcgctttgaagaacttctttcaggagtatcatctaccacaaagctagcgattatcagatcttcttcgtcccaacccgccatagccgccgctgatttgaatctcgggctgatgaatatctctgcgttttcaccattcttctctctcgcgatcgatacttcctttgatccatttgatccatctccagatcgattagtaactctcaatggtgtttcactcaccattctctggatctagggtttgagagatttcagagaacgctccccgaaaagagagaaaaaaatgtgaaagatactatttccccaacggtcggaatctttttaaaaatcttaatttgtaaatgggcctttgttgggccaattgattgaaatgtttttcataattttccttttttttttgtttggtaaagatttgattttccttatttacatcactaatcgaccaaaaattacaagaaaaaaaaattccgacactggcaaaaagttccactgtagaaattcaaaactaaaaagagagcaaaattatggctaatgggctttattattaatctgttttttaatctttcgagctattctatgatgggccgaagagccctttttaaatctaacattgtcgtcttcttccgctttttcccaaactaaacgctgcgtttttttgtctttgaacttctcaaacacttgatctctaagccccgtatcattaacctcacagaatctctcagcccaatcagatggttcaacgggtcgggttcctaaaccgggtgctcgatctcttgacccgacattctcttcgttttgccaatccgctacgtacgtcgcgactcgccgataaaacttctctttgaaaacctcccacacctgatacttgtagtggttgattaccattatatccttatccatgtcagcaaacgtgaatccatctctgaggtgaaaatggtgaacaacgtttatcagcgtcgcgttcatcgcttccggccggattatgctcttgtgtctctccggtaacaccacacggcaagtgtatcccgacgtgactccactccgaggccgagatctcaaacccgatggcccgaaactgtggcaaggtgttcgaatttcaccgattgagtcggtggttgtgtaatttctgatgacggaagttagagtttcaccggatgggatgtagaagaactcgtcgacgtcgataaacgcaatccaatcgcaatcgctctttgcacggatcgcgcaattagagaatccggcttcctgagttttaatccacggccagaaatgtctagagatgttgtaaccacgtctttcgagattctcgatctcggcgatgatatcgtcgtcgctgttgttgtcatagatgaaccaccgttgaacgccaattccggcgtgatacatcacccactctctcaaaaccgcggctgcgtttcgggtcatggtgcaaacgcacatttgaaagggtttctttcgcggcgggttaatgatccgaaccggctgagcgatagaaggaagcattccggttcctcctttgattctaaccgagactttaacaggcccacgggccgcttttgggccgtctaacacagctaacggtgttctacaccgtacgatctcctgagccgcagtgatgacatctgatcttattaaccgattatgtttcgcgaaatcccaaccgtacacgcactcatatctcgacacgtcagcaactcttcctggccgtagattaagccccttgacaaaaaccaccgtagagttatcgtagtcgatcacggcgtcgtaaaccagccaatcataccggtgagttggtccagccgggagatgatcatcggtcgtccatctcgaaacggcaagcgaaatggtgtagccacgtggcgtctcaggacaccgtacgatctgacctccaaatttgtctctgtccacagccgtcggatacactttccgtagcttcgacgaaccggagaaaacgcaaatgagatcgtcttttgtaaataaccgacgagactgagggtattttaggaaaaccagagtttgttcaggtaatttcaccgcttcacgaatcgtaaccgccggagaagacgatatagactcacggaaaaccgcccttgccgtaacagccgttgagaagcttatcgtcgaacgaaccaccggacgaaacttccccttaaaaataaacatggtggagaagagaacgaaggagaagacaaacagaatcacgaaccaaaagaacgtccgccatgaaacaacgacgtctccgccgcaaccaccaccaagtttcctacgaactttcatctcctacgccgccgaaatcgccggcgtaatggattagagaagaaattctgttttaattttgttctgtttttctttacttctctgattcttttccggtcaaagtttctggttttggatgatgagaagagttttgaatttacgttattcctctttttgttgtttctcaattaagaagaagaaaaaggtaacaaaattttatttattcctgacgtatgaagaatatgaaaagagaagaaaaaaagttacgaacttggagaaggagaaaaaaagacggctcactaaaacaattggtctccgatcatatttatttgcttttttaaggatacgaattttactttttgttgacggttttcgtttacttcactttctttgacgttgaatagtaagtagtttaatacaacaacaacaacaaaaatatgtagtttagtaggaaaaaacaaaaaaaaacggatactttgcgtgtttatttttcatgttgtaagttctttacggcttttatgaatttttacgtttgattttccgtttgaggcgtgattttgctttacctttgactaaagttagaccagtagttaataactactagttattatggccgcagaagttattaggacctaatcactaatcagcacttagttctctccttacgacgccgttttagcatctagtataaaactaatataaccaaatccaatgggcttctgagttaggcccaataaagtacgtttagagttagaatgaagctagaagcttaaaaatcatcgtctccggcgatcgccgggaaaagaaatgtgggcgattacgagagtgataagccggcgagttcatggaacaagttttattactattccaaaactctcaggtttctctattgtatctcccaaacaagtaagcttctctgtttcttcttacgtttacacggcgatcagaaatttttggaattgaaatctgatttgtcgaatatcgttttgaaggttgaggtagagtatgcagatggaaccaagttcaatttttcatcagagtttctgagaattcatagtccagctgctgatggaaaagtcagatcaatcggtggtgaaaaggtaattttgagatggttcaaagccacatgattgttttgtgaaggttatagagttttgatatcttgtgttagctcatcttttagacattcttaattgcaatattgtgatagctacctatgagactagattaagcattggatgctgcttttgtttatttttggcttattgtttttggtccagctaaaattgtgaccactagcttgttgttcttactccaacttatgcttggttctagatggattctggttaaaggaaattctagtttggtggctctttgacttttttataatccctgtgaaattattgacaactaggttgttgttcttgtcacgacatgtacttaaaaacttgaagacgaggtttatgtagattaggctacggttaaccaatacgccgtgtttttgtttctctaccttatgactactagttttctgttctagtggctgatcattcatagatccttgatgggttttaacaaagatgcaatctttttaagtataaccacttcaatagtatagttacactggatggagatatggtgttgtttctttgccacttttgcttagttctgttaggattttgttcttttaagtatcttagctatgagtcttgttattgttctttgtcttatggttacgagtcattaaactactcacatgtagattctatacagtttcgaacaaaaatgcattcacttagctttactctatgcgcaatgagtctatctttgggctaaacaattttgtttattcaatcaggtgatatctggaaggcggtatgtaggaatcatgtctgcagaaccggttggaaactacggggtaaggtacttacaaatactgcaaggtcattatgagttagccatcatgaagattcagatacctaagtttattgttttgcttataacttaatgcggttgggggctaaatcttttttgaggatccaggttagtgtttgatgacttgcatagaacagggatatatccatgggattatttctacgagcttgggagcaataagtttggtcttatgaggaactatatcaagactcttcaaaagcataatctcagccgtgaacctcctccttcaagaaagagatgattctgatgatcaatgttagtatttaacattgttcaaaatgtttgatagattctctttttgcagagaaaccttgaatcttcttgtcttgtttcagagttacggttgttgctttttgctgttgttgttgtctttattactattgttgttgatgttagtgttgattgatctataagttgtctttagagaacaacatatttgtgtttccggtgtaccgcccgtttatcaagatctctattcgacggatttccgatttgggcccagccttgttttgtaaccgtgtatatcgagaggcccaatgtccatttcggttgattaataaaaggaaaaatactagtgtatcatcatcaatattagtttgttttaactcttgtgaacccaaatgtgatcaacatacagttttataaatttttgattgtacaattttcatttcaaaattttttggaagtgatacaaaagatatatacatatatgctaaatttcaatagagaatgtttgaaaatgttttaacatacaaaaaatgttttgttgggtttaattttaaactttaaaattcgaagtttattgaattagttaggccgtcgacgacgtcgtttattttttttttgcaataaccaatgcattcttatttcttaattattattttttcattatattttcatgcattcttaatttctagtgcaagaaaaagtggaaacgaatataccaaacattggagaaaattaaatgaaatatgtaaatctctaaaatctctaatcggttatacctcttacttcatctacttatttccaccaaactcacaaatgaaaaataattaaaatacaatttaaaatattatctccattttttttatatttgatgtttaaagttttatacaatgtttgctatagtgtatagtggaaaagaatatagcaaacattggacaaaattaaatgaaaaatgtaacgagtgaagttttctcatcacatcacatcacatgtttgcacgtgagttacattcggttcgtaaaatctactccattaggcgtggttatgaaaccacgaatattttgcaaaacgaatagactaaaaatataacaaacaaaatgactttttctaaccttgaagtctccttaatttcttatattataaggttaataataaacaaatatctcagtaattgtttatactaatagtgtacacatcaaactctatgtaattattttttttgctttcgatttcaagactttcattgtcatcaaatcgttttcgtatgtaaatattaatatttgagctatcagacattttctacacataaccttcttggatataaataacaaattttttgtcaacgcatatctttagttttttctttcttttagctatttataagtatatagtaagtgggaagaaatagtgtagctttctttgatggttgaattgttatgtatggtactactaactacgaagagacagattacttgcaacttaaatctgttttgttttgtgtgtgttacaaaatactcttaatcggttatacacaccaacgttgatacctcttacttcatctacttatcatcaccaccaaactaaccaacgaattttaaaactgtagattttattacacttacattgatttaattagaacagtatttgataatcgtaacaattttattacagcattttttgaagacaactaactctcaattttgttttcctgaaaatgcagtattttttttttatttttttactaaaatgtagtatcgtttgcttacgatatcttaaacttaaggttaattagctaatttatttatctttccaagacaatatgaaattactaactttaattgtgagttcttgagatacaaaatcttgacaaaaaacttcttggaaacaaccattttaaatcgctttgtccaaactccaaagcattgtaataccaaatatcaataaaactaaagaatcatcaaaatttgtccaaaaaaaaaagaaccatcaaattgttagtaattcaacttttattgatacaaatatcctattgtttttgcaatagtacaaaagtttacttaatgattgctataaatctaatacaaaattgtgaaatatattaaacggaattagatagtgtgtgatcgcggatattatttagaaattaaacgtttttgttattaaacaaatttaagccagcagcgttacacattttaaagtgactaaatgtgataattttattaaaaaccactactatttttaattgattttttattttaatcatcgatttttgttgaatgaactaaatttattttactctttagtgatttgatggaacccctaatttttttggcagatgatttagcgacgtgactaatttgataatgtcgacaaaagataacaattaaattaagaaatcaacaaaatcgtatagtaaaaaagaaggaattgtaatttatgctggtgggtaaaatatttgtaataagctcttatttcttcaagtttcaacaatttggtaaatataaaacaatgatctagacgttttggacgatactaataacaaaacaaaacatgatgctgtaatatttttttctacaatcatatcaaatctgtccattttcattacatttcctaaactttattttttaaatcagatatttaataagttactttttttcgcattatttttccacacttgagaaaacacttttatgttgtttattggtctatatatatttgaaaatcctcaaatataatagatcaattaaaacttatttccgtaacatcttcgaataacctaaataaaataaaataaaaattggctgacaaaaaaaaatccaaaaaaaaaatctataaaggtatatattgtcttaaagacattttaataacaaagtcctcattacaatatttataagtaacgtttttcatttacaaagaaattctggattaataattaattaaagtaattatcccattgatttttctctttagttaaataacattccaaatatagcttataaaaaaaacgtttcataaatcaaacaccaagtttccagaatttctcagtttttttccttccccacaagaaaaaaaaaaacaaaactttcttttattttcctttcgcttcaattctcaaccacttcaatttcaacgaaccacatcatcgtaaaaaaaaatcatttcttcccagttcttataatttcattcctatcctcaaaaaaactctgaattatttatttttttcttcaaattagtatttgtgtgtttgattttatcttgttcatctcctagttcgtgggacccagattctaaatatattcttttgagatcttctttttcccccaccacatgtgtttagcttcttgagagaaataatctcacttcttttcaacgacacaacacagaaactattttttcctttcgaattttgaatcccatagacgttacgttgacgagaaatacactctcatcagaaaatcaaaaaaaattctcatcctcagaaaataaaataaaagcttcaacttttttctgggtttttttttttagaatttggttttgtgtttttgatcttgaggttgtaaaatgggtgaatctgcagttctggttcattcttattccttcgcagctcctattactcgtaacgattctcatgaggttagttttttttttcttttttgttcttacgattttattgactccataaattttccggcaaccgaagaattttccgggacaattcgacggaaactgggctggttctatgtttccgatgaatacccatcaagaaaaatttgaccttttgaagttatttcgcttttgggatttttccctggaaaattcaacataaagtttcgttttttaatctaatcctttgaatctgaaagctttatttgatttgttgtttgtgtgtgttgcaggagaatacgattcatgcgttaagtcaatcaatatcatttgggaaattcatgacagagaatctagaatgggggaaatggtcaagcttttcacataaaaagtatgttgaagaagcagagaaatactcacgtcctggatctgttgcacagaaaaaagctttctttgaagctcattacaagagaatagctgaagctaagaaagctgcaacggaagaacaaccatccgttactcctgctgaggttttgcttcatactttggaaacacagcctcctcctcctcctcctcctctggtgttaaagtatggtgaagaaggacgtgaaagaaacagttttcagattgatgatcatgatgtgactgatgaattggaaaatgtgatgtttggtggtgattatgttaaggaggaggaggagaagaaggtagaggaagagttgttgaaggaggattggtctgttggtgaaaaggagaaacaacacaggaaatctgtaactaagaatagaccggtgtttagattgtctttggagaaaactatccctccgaaatctttagatgagatctctttaacagagaaaagaaggtaatatggtttgtgatttcaatcatttcatagattcttgtttgaaaataacaatctttttctgattgttttgtttatgtgacacaactgcagcgaaagaccgatgactcaggtagaagaaaaaccggttcaccgccagagattcggtctcttgaggtaagtcagagtctttgtgttttctttctttcttgcattatcttgatttgttgttcctggttttgattatatgttgtttctttgttaaaccaatagctgtttcataagtaatgctaaaactcaagatcagaaccagagcaggaataaggtaagattttgttttctattaatatctcatagagacatgaaaagaagatcatgattcttatttctcggttgctttctttcgcgcagagaaagacggagaagaagaagcagtttctgtgtctttgtttgaagccaaagactataagagagtaatcataagatagccaaagacgcttcaagaacacagctttgagaaaaggttacagtctgcaaatggcgaacgggagaataaaaagatcgatatcgagtcacaaactcgatggttcgatcaaagctttagtgataaaaacacaacaatttcgatatgtagatggcaccgattatgctcaattcacaccagtttggaaaagagtccgagtgcaataggaattagcttcttttgtttggttctctttgaatctttgttatctgtcttactatgtaatgaaagaacaactccagtttcttgatttgatctgatcttaatcttgaaaatggattgttgttgttaaagctattcactttacacaaaagataatgtaaaataatcaaatttaacattcacaaaagaaaaagaaaaagctgatccatgtgagtgagggagacatcattagttgtttcttttagaccaaacaccaaccatcttcttcttcttcttcttcttcttcgttgtcatctaacacatgttccatcatcatcatccccacatcgtaaaaactcatactttcatcataactatgagacccaccaccatcttctttctcgcttttatctccattactctctgtcttcaccttttcaactccagcttcttgttctacatcgtcttcacaatggttaggatccaagaaactagggagattcaaaacaggttctgtcttgacccgccacgtcagcagtttgtagcttgatgaagcaatgtcgtttgatctcacccaatgcacttgaccaggccacactttccggtgagctttgtttggttttgatggcaatgtggttaataactcagaaggttgaggtgaagtcaaagagttgaccggtcttgtgttaagcggtggtggaagaatccggtaagttctgacaagaccatgttgccgaccttgtcgtctcatctcaaccgtcgaatattaaagaaagaatgaaagagagagagagatttttcgaatttggaagttagcttgaatgatatataagccaagaagagctttaatggagtcaaaacgtaacatccaacaacaagagtagtttgtgggttaagtcaatgagttgttgttatagataacgtgcaggtcttaaataattgaagacttctttatctttgccattacagaaaagaaaaaaaaaacagaacatatatgaatttagaatttgaggttacattattgtttatacttagtactcacaatttaaaaaaactttgattcaatttcttaaaccttttttttttttaatatctgaaagttcaaatctaaaaatcatatatcttctctacatcaggttaaattcaactcttttggaaaagagataccttccacctcgaactcagcacctccacctaaaaaatttaccactgaccaacagtacattggtaatttcttaaacttattgtgatgaattaatcgataaaataacacataattctcaccactgaaagaggactttgataacagagagaagattatgctgcaggaaaataaaatgattaaccctgctttggtcaataaattagaaccattttgacacaagtcactaagacctgaatacagatgtaacaatatacaaataagttacaaccaaaatgacaacttcaattgcaaatctaataagttaaactgaagactgattcttagaaagttgcaaaagtagattaaattttcatttgggcatttcatcgaacatctggaagacacttcagaacaaaagactaagaaaactcaaaaccaaatctaaaacatgaatctacaaatcttatgagagcaaacaagcaaatctacactagaccattgtttttcttcttcatcttcttcaaatcttaagccctctcacctctaatcctcctcgcaagttgaatatccttaggcataatcgtaaccctcttagcatgaatagcacaaagattagtatcttcaaacaatccaaccaaataagcttcagctgcttcttgaagagctgcgactgcactactctgaaacctaagatccgtcttgaaatcttgagctatctcacgaaccaatctctggaaaggaagcttacggatcaaaagctctgtgcttttttgatactttctgatttcacgtaacgctactgttcctggacggaatctgtgtggcttcttcactcctccggtggctggagctgatttccttgctgctttcgtcgccagttgctttctaggagcttttcctccggtggattttctagctgtttgctttgttctagccattttgagaattcttgacaatgaaaaatttgaagcttttgattgttgagactgtcgtgtttgattggtatatacagagtgaggttgggatgcttttttatactcaaagaagagagaatttggtccgttagatgtgttttcctctaaacggtcaagattgtttttatctttgctatctgcgtcgtatgttaagtaaccaatcagagtgattctttcagttgtcgaggattctacacgtgggatatttatgatgacgtgttaattattgcgatgtgtaacggtgtttgtgatccaaagactctgagtgagacagaagtgttttcatctttgatattacgatctgttcaatgaatttattccatcaacagattgcgaaaatttgtaggcttttacaatacaaactctgatctctctctatttgtgatatctgttttttttacttataaaatatcacataagcttcctctgtttcacaagtttgacatcctgaattgtgttttaaatcttctacattgtctctagtcttcaaacatacatgaacataaggagttcaaggctcaaatcgggcaacactgaacacaaacgggaggctgtttttctatgttgcagtcacagcaagctgttaggcaatggttgttgcagcctgcacgtgaagaacaacaacaaaaagcaatggtaccttccacagttaaaaaacattatcgttgtttttactttctagaactagtattcgaagctatggtaccttccacagtaacaaatagagacttctgatgctcccgcaagctcggaaagaactcaaactgttgtttagttgctggagcaacatcggttgctgttccaatagtaaccaaagagacaaagaatatagctagtgttgccggtgtcatctttcttgtttgttgtgtgatcagtacttgcagttatacttacgcagtcaatcataaatgtcaaggaagttatgattgatacttttctatgattaagctatgattgataatacatcacgttgtgttcatgtgtacagaaggcagagacacaagtacatgaaatgattttatcataggccaatgcagagggaacacaaaagagtagatgataagtagatgaggtttaagtttactcgagttttattacttaaagaggagattttcagcaagatacaaccacaaagctcatctacttgggaagacttgcaaacgagtttttttaaggcgctaatatttggcaacaacaatacaagaatgaattgaaaatccgaagaggttttgtgaagattattagcttcaaacgttaagactgatgagtttcccaacggatcccgcacacaaacttagctgtttcaacgctgaagttgcttgatgtgagtaatctgttttcctgggttcaaaccctttggacaggcacgagcacaattcaagattgtatggcaacggtaaagcttgaactcgtcgtcaatagcctcaagtctttccttagtgtactcatcacgactgtcgcttatccacctacacataccaacaagtctcttgttacaaacacatcgaaaggtcaaatttctattgaatgccccatatatagatcagcttcctaaaccaaaacaacaattcagacagtaatacagtagtgaagaaccacataagtgaaatcaatgcagctaacaacaatatatgagaatcttcccaaccatccatgcaaattctgaaagcaaattccaagagtgaagggttcctagttctacaatttgcaaccactttccatcaaaatagacttgaatgagaatcaatgcagctaaacaacaagatatacaaaatcttcccaaccatccatgcaaactccaaaatcagactacaagataaatcgtttcctagtcctacaattggaattcaattccccaaaaagccaacttctatatccattttcaacataccaatccttcaaacaatctttttttcacttaccaagacagcaaaatagacttgaataaacaacatatatggatcaatgcagcttaaagcttcctagtcctacaattttgcaaccaatccctccaaacaaatccaacttctatatccattatcaacaagcaaattctcgaaacaatcatcaaacactatcatttcccccacttacctattagcgtgtagcaaagcagctggaccaaggtaagactcaggattccaccagtaactaggacaagatgtgctacaacaagcacaaagaatacattcatacatcccatcaagcttagctctatccttcttactctgcaaaatctccttagcaggaacagacgctggagtcttcctcttcaaccacggctcaatactcttatactgattataaaaattagtcatatcaacaaccaaatccttaatcacaaacatatgaggcaacggtgtaatcgtcgtctccgatgcttcatcttgaatctttgtcaaacaagcaagtccgttacatccatcaatgttcatagcacatgaaccacagatcccttcacggcatgatctacggaaagtaagagatggatccatttcgtttttgatcttaatcaaagcatctaataccattggaccacaatctttgagatcgatctggtaattttgaagctctggcttccctggattatctggattccatcgatagatctgaaaagtcttcaagttcgatcctcttccgccgccagaggaagcttttgtttccgcctccgctcctgtagaggtccatctcgccggaattaacctcgccgccgtggctaatttcgacggtttcgttccaaccaatcttccgatcaaaccagacgccatttttttcctcggagaaatctgaaaatggctaaaaaattaattcaagtatttatatttttcagaagataattaatttataataacttgaaattagccgaaattgacgatttagggaatataaaatataaatttatagagacacaggggattatagctacgtgtgcatatttgtaaatgtgaggcttaggttcatctacgtataagtgccgttgatcgtttgaacacgtaatgttctgaatcattgtgaccgttcgttatggataccgacttaaggtcaatcgtggcgaacacaccactggatatttcaaggcgcgtggtcttctcgaaaagtgtaatacacgtggctttgtttggttggatattttaacttgaggagaacttgagaagaactgcgtcccgtttggtaagagaagagaaacacgtagtgcagtttgtgattatggtaatgctttttatggaaagtttcaccaatatatctgcgaagttaaaaatagtttttatcattgttacataatgatgtttacttgatagtatttgataaccaacaacaaaattgagcagtttcataaacgaaaacatacactgttctataaataaataaaaacgtctgaaaaatctttacaaggaatgacaaagtttataaagcaaagaactaaatgcgttttaagtttcaaatatccacaccacacgttccatgtttaaactatatctacattccttgagacacccttttgcgattcttgatcagatccattgacacttccttttcttctgaacgatctctgactgaatatccgcgaaatgatcttaaccggagctggcggttctgttatcgattcgtccttagccgaattgttgtctttcaagtccaaatcttccgatagtttcttcactaatgccacaaaatgtcgacgaaatgttggatatcttgataccgttttcgttagcccttgcatcctaataaaacacacaaagacatggaactttttgtttacaaacaaaaccaaattgttcgaaaataatcgaaactttaaagcggttttttacctgcgagcaaaggcatcgagttcggctcttttacgttcggtgagaggaggagacgcggaaatggcattcgagctctttagcctctctggatctccaaatagcaaaactaatcttccgaggtactcttcttcttcctcagacaagtttgtagctttcatttgctcctttagtatcaaaaacggattcagaaaccaatcaaagaagacgtcttttgggcggttcatggtagttatttcagttacaccgtcacctacacaaacatgcagccaagtaaaaatctctcctttgctcggttttgttggtttcttgataagctatatgaaaataaaaaaacaaagatcgaaactttacttagtaacaagccggaagaattggctttgactgagcgaagaatctcgtaaagaagtccataagccggtaaaccaacgctgatcacttggctgcctttactagatctcgcttcttcgatatctttcgagtttatcagtccttttgtcgctaaaacttctccatatcttctacattccacaaagagctcattcaacagctgcatacagacatcaaagtcaagaacgacaaaagattgatttttcacattaggtttggtgaatataaggtgtgggcttacatcgagaggcttaatatcaatcatagggactctgactgatcctcctctcatcgatgacgcgttcttgacagagcctagtcttggtacaggaccagaaaaaggcgttggttcctcgtcctttcttcgatatttcggccttggaaaacaagaaccttcaggcaagtcaagtatatcggtgctatactcgtcgtaaatggagacagaggcaactatatagcagagtccatagtaaaaagatgattcttgatatgagactactcctgcataagcaccaaggaagatactagagataactgatccaataaccgcgcccgtgacagccaaaggccagagtaagatcgcgaggcctgctatggggacacacattgtctccaagaatggaccttcccgtccaatcaagtcgtgaaacaaacggtgccatcctttgaacaacatataagggcttttgcatatggctacaagtgagataaccggaggatcaacaagtatcccgagaactgaaactactaaagcccctggaagttgaagtagcctgagaatagatagaagatgtaagacactatcgaacaatcggtttcacaatggagctaaccaatgaacatattatataataccttatttcataatattttcgatccggacagctttgtttcagctcatccataagtgagaagtatgaatgaaagcaaacatctttaaaatcccgaacaacggtgaagctgcgttgcatggtgctccaagttccatcataaaagcaatggaaaaactggtaaggcttgccttcaccaacagcatcaaaggtggcgaaaattggggagaagaaaccatataaagctcctcccaaaacacttcctaaaataccaacaataggccagagaatgatggcagcaggaagacataagcatagaaagatcttcaagattggtcctacttgtttggcactgcatgttagaggaaccaaaataagatcatctttataagatcatctttaacgtcataaagatagagccaaggggttgaggaattagttacctcacgattgaatagaaagtccaaacgatgtggactggtagaagactcagtatgaccgcggagttgcctatagtcacaacgaggcatacgagtgggcacaaaacaatacctacgcaacaaagaaagagcctttcagatcagaaaacaaattccagtgaatctttaaaaaacatgttcatgagtttcagtgataagaaaacactagacagtattgatgaacccttaaacccttagacttttccaaacgtttttactatatttagtgaaccctaatggaccctaaacaaaatcaaaatgcatgagtttgacttcagtttccacatattaatgtaattgaaagaggcctgagcaaggaaagaaaagtcattagggagaacaataaaggaaccaactaaaagtcaacatccatctaaacaagaagtcaacatcctggtgagttatgttcttaccaaaagaaatctgtctgaataaactgaaaaattgggcttaaagaagtagaaattcatcaaaagtttagaccttttagtgagtgacaccaaataaaacaaccaaaagtttcttaaaagaggaccatcagtaccaaaagtagaaacaaatgttataaattgaagtaaaagattcactctaaagttcatacctttgatgaaacccagaaatagcaatccaatgaaataaggaaggaagagtaagaattggaataaagaagctcgaaatcctattggaggctccattgaaattgaactgaaactttcaactatactcacaaacttaacacaaacccatcttaagaatcagtcaacaccttcttcctgaaacatataaagattcgaaacagagtaaattcaaaaataagtaaagaagagctggaatttaattcttaattacgaaaactttgaagctctccgcaaacacacaagtcttttaaaattactaaaaacaaacaagttgaaatcttggctttaaaagtcctcacatgggttgtacagatttgagtagagagatttacggttaagaaactgtttctcttctcaataaacaaataaaaaaaatcaaagcacgagaaccaaaaagcaaaaactgacctttttgtccgaagaagaagaagaagaagaaccaaaaaaggatgtctttttttttctacttatcttgtcgtggatgctttgagctcaacgcattagcgaatatgtaaacttagagatagagagaggtcaaacaatatgtgtagatcaaacgagacgtcatgaaaatgtcaaaatttgcagttaaaactattaatttattttttggccaaactttgtttactactattatatgatcaaataaatatgtatttattgttcggatacaaatcaatgaaaatgaaaactgtagtgacggctaccttttgtttcgacaagggaattaggttattaattgtaattaatattttcgtccaaaaaaaaatattgtaattaataaaattgcaatgttgtcatttgtcaattattatcatcaaacagcaatggtgtgattaacggaaacaaaacacatgttaccgaaaaagattcactcatgagatacatagttaaactatgattggtaacagctttgtatcaaactttacaaaacatagaattttaacaattattaatcacaaaaactttataaaaacattacaaacagttttaccttcagctttttttacagctttctcatacagctttacattatttcgataaagcttacagcttcagctaattgctaaaaaatttatacaacttttggttaccaatcagacacgatagtttcaaaaaaaaatattacttgatttgctgttgttttaattaccctctaatattaatatagtacattttaaacttgatttgttgacaaacacacaaagaaaactcttgattcataattacttggagcaacagtgaaattaactacttgaatacgctaattaaaataattatagtcaaatttgttatcaaatttttaaaaaacaaaatattcaaaaatatttcgtataaaaattccgaataaatattaatatcttcgtttgcaatatccaaaaaaatatgttcctttgtaatttagtgtagagagatcatttgagtatatttgaagcaaaaagagctgttatgttttaatacaactggcactttattattaaaataaaatggagtttaatgattgcacacttgttgattctgtttgtgacaaaagaaaattgattcattatcaaatgattcttctttttgtcattttataatgttttgagacgagggaatgaatggttgttttataatgcttaaaatccatacggcagattaattcgttttatatacacaaatggcagaaattattacaactagctgtgtctcgtgttgtctagcaataatccgctgtgatattcgtctttttctatccaccatgcacggttgttattacttttaaattaatgataaaaaaaggagaagataaaataagattgttacgttcgcaataaaatgattgaaatttgtaaacctgtttattaatccgatatacataaaatctcaagctaatcatatttgaatactaagtgtcgcagtagtatttgatcacatatagtctgcagtgcgcaaggatgaaatatatggttaaaaccaagtattcatggtgtttaacttttatttcccaaaattaaattcaaaaaagtgtagtataatactatcgatgatcgtgtgaaatgttttcccataactgctggaggcccggttcatattttattttagctctatgctaaaattaaaacttaagcccatatatacttgatagattatctttaacaaatcacgtgatatcctgacatggcaaatggcactataaaccactattaattgcttccaataaataatagaaaaaaaatctagggttttcgcttagattcgcaatcgcatttgtatttgatttgcttcaatagtgcgacacaaataataacgtttgtgatctatgttttaaaacgaatagaaagaatattgcattttgtgtgtgtgtgtgtgtatgtgtgtctactgtgtcatatgtaacgaatagaaggaaatttgcatgtctagttcttatatctagtcatatgtaaggaatcatgttaattttgatcacaaaaacgccgatttattactttgacaacacgattgtggtgtggaaaaaaaagaaaagaaaaaccgtttgtgggtgggggcaaattttgggagaaaattttgtgaagtgttttctgaactttttatacccacccgactttagattttcggaatatttcggggagggtttcatctttcagttgtcatattatggggtcttattttcgatatccatcttcactattgagaaaacattgtggctcatcgaaaactcttcggggcagtagaaatacgtacataaaatttatgttaaagtaagagtagcaagccaatctagttcaaaagaatgatctaatttgaaaatggggatgtgattatatattaccaatcattgttttacttgtataatatgatttatgatcatttgagagacatgggagctacgccgcataagattgtgttgaatatctattcaggatatatgaagttgtcgtggaggtgatacggaatataaatatgattctagcttagtgtaccaaagtttttaaaactccaaatcacgaaccatataatctagaatatagacgtttggataatcatttcttgtcatgtggtttggcagagatttctcttttccgaaggcaaataggggtcataaatcaaatcattcatttggttgagatgaaaaatgaagaagagcatgtagtttttgtgaatggtcaaactattagtatcgaaaaaggaaacggttgaggaaaaagaatggcttcacgagatggacaaggtagaatctttataggctattagtgtggttccccaataatcaaagacgattcagaagtggtcacaaaggattgctaaaatagaaaagaaaagaaaaaatgcttttatgttttttcattgttggaaggtagatagaagaacaataacttggaatgtggagaaagcgtatcgaacggaacagatcaagcatatcaggcggatcaaacgtatcaggcggatcaagcagctttttagaaaagacgttaaatgatggaaaaaataaccaaaaaagattgtgaggaagctaatgaagaagtttattggagacataaagtatgacaaatggaaaaagactccaatttttttcattcagcttctaaaagacgtgaacaaaaaatcgaatatttggtttaacagaatcatggtaaaaatagagatgaatataatattatggtgttacaatatgtttaggatcatttcacaagcaaaacatatgatgtaatcataaaacatatgatgtcacaaacaaatagttccttggatctgaaaatgcaagaaaaacacaacagcaagaaacgacatcgttctcaatgtcaaaaaggttgacattaggcagtcacttttgactaccatgctcaatcaacggttagtaggtttaacttttacatagacattcatcatttcgtttaaacacacaaaaatggttatgtgattttgtatctttgaatgcacgtgaggaagaaaactgaaaaaactacgaaaacggcatcgttcgaggtcaataaggttgactttaagcaaatacttttgacaactaaacccaattaacggtttcacaacattaaccgtatgttaatcacctgaaattacgataatgtaggtcccatagtaaatttaataaaaactatataatatctcacaatactaatttaaaataaatcacgccttcactcccggaactctcctcttcctctttaaatactttccgacaatagcaagcttcaacaaaaaaaaaaacgaaccaaaaacttcctctctcttttataatatctttctctcaatctatgtttagaagaatggtttcgtattctaataatcattttgcatacgcatttctacttcttctaacaatcggtaacacgcttgcattttcttcgagtttgccggatcatgttcaagatccaaatctagtcgttgacgacgttaacaggtacgtgaaagagaaaattttgaatatgataatttgaagtttgatatatataacaatgttgcttttgtaaatataagtgatatatcatacatacgaagtagaaacaaaatgcagcattttattccataaaaaatgtcttacaatattcttttgattcaattatcactatggctcacatttacagattcagttccccattagtgggtttttgtaaactaaactttaaatttaggaaaaccctttacggttttaccaaaaaaccaaagttaactatggttcatatagtctctggaggtttctatgtacccgtcagttttgtctccgattttttttgttttttttcgcctctaaataactcaaacgcattttatcaatgaaattcttcagacgaaaaaaaaaactatgtctcacatgatagtttcccatgaaaggactttatgtaaactactgtatttgtaatttcattaaagttaaactagctagtgaatatatgtattttacccgtcaactagctagtggaatatatatgccaattgtgtccaatattgtttctccaactaacataatatgttcacatttaattctttttctttttcaaccgtacactttttatcctcacatttaatgttcaaatttataacagaatcagttttttcattatttataagaattttgttctctctcatttgtagaagtgtattcaatgcgtcaaggaggagcttggcctacctatcttgtagaaccggaaatcctattgacgattgttggcggtgtgaccctaattgggaaacaaaccgccaacggttagcagattgtgccattggatttggcaaaaatgctatcggagggcgcaaaggtcgaatctatgtagttacggatcctgccaacgacgatcccgtaaaccctagacctgggactctaagatatgcagtgacacaagaagaaccattatggatcattttcaagagagatatggtcattaggctcaaaaaagaacttatcatcacatctttcaagaccattgatggtagaggctcgagtgttcacattaccgatggaccatgcttaaagatccactatgcaactaacatcataattcatggcattaacatccatgactgtaaaccaggatcaggtgagccatattcaaagacttcaaacttttagtagatgtgcttaatataatagaggcaaaatgtcataaaacataaaatatgctactatatgttatgttttataggtggcatgattaaagatggtccacatcacaccgggtggtggatgcagtccgatggagacgcggtggcgatatttggagggaaacacgtgtggattgaccattgctcgttgtcgaactgcgatgatggactcatagacgctatacatggttccacggctataaccatatcgaacaatcatatgacgcaccatgataaggtcatgcttttaggacatagcgatagttacacgcaggacaagaacatgcaagtcacaattgcgtttaaccatttcggagaaggactcgttcaaagaatgccacggtaagaaaatcactcttttaccccttattgcgtatacacatatgtatcaatagttagttaggtacatagattgatacatatatgttataggcttgcatcagttgcatgcgaacttgcgaagcacgcgcataaagaatagtttgaatgtgaaagcttgactttagagactatagagtatggaagaagtcaacaaaagcagaatgagactttttaaaccactgtggatcgatcacatccatttattttatggaattataagatacgaattgaaatggatacaccattaaaataaaagtgtcggtcattcgttatatacatattggttccacttaattttagtgagttagagaaagattatgttggttttatgcgagtaaatatgcttcgagaagtttattattgacgttttgtagattcgtacattggatctagggagatacatggatgaaaaacttaactaaaattaatatgagaaactagagaaaactaagagaacagtaatctttcaattgttaaaccgtaaaaaccgaaggaaaatgttagtaaaattaaatgctaatatttagggttttggttataaattaaacaggtgcaggcatggatatttccatgtagtgaacaatgattatactcactgggaaatgtatgcaatcggtggaagtgcttctccaactatatacagccaagggaatagatttcttgctcctaacacccgctttaataaagaggtacatagtggttatcttattttcataaagtttttaacttgtgatgaaagttatgtatatatttacttatatataggttacaaaacatgaagatgcacccgaaagcaaatggagagattggaattggagatcggaaggcgatatgttgttgaacggagcttatttccgcgagtccggtgctgaagctccgtctacttatgcaagagcttcaagcctgagtgcgaggccatcgtcacttgtgggttccatcaccacgacagcaggcactttgagttgtcggcgaggccgtcgctgttaatgataatgaaatcataaagagagatgaaattattaatggatcattgtttatgcaatggtgcgtatgtttaacgaatggtaagagtatttttctaaagaagttttccttttcaaaaacgtaatgttacaagtgtaaggcgtctgcaatgtctctagacatttgccagagataatttccaaatttcaatacaaatttcaaatttattttgggatatatttcaacaaaaaaaaaaaattcattaattagtaacaagtgtaaagttttcattccaccttaattacggtcaggtggaagatagcttttaagaaaattcaattactataacatgatcaatccactatatagataatagaattttttttgtcaagaaagattttgtttagtcaatcacaaagacgggattgtcttttgatgaattgagttgacataaaaaaagggccaacgccatgaagttgtcggcgacaacgttcaaacgcaaagagggaataaggatgttgtttacgtccaataatctcggacaatacacattcttcttgtcctgctgactaaatttaatgatcttgatagttggtaattaatactgcttgatacattaatgatacatgtacatttctggggtagaaaactatttgttcgtttttaatggtttagtcaaatattgtttcagctaattatatcttgacaaaaaacatagtttcagctaactataagtcattttatcgatataattatatatggtttcatgttttattttttttgccaagaaaccaatcgggggtttaacaactttgtaaaaccatctttttatcagcagagcaaaacaaaacgatgccgcttctggtcttcaatcactgaagaaaacgatgttgggccaagaacctgctaaagaattgaagatgggccgcgagcctttgaagaagaagcctatgtcaaagcccacttggattaaacggtcttcttcttcatgtgaagacaaaaccagagctggcaaaagagacgcagtgacgtcggagacccgtacaaactcagctgcatttacggtaaagctcaccaatcgattcctggcccttgatgaagaagactcaagcggatgatgccacctgttaagacacattagggttttactctgttttgtctctgtataaatatcaaaacttgaactttgtaaaacctcaagccgaaatgatattcaaagcttcaactttatcttctctgttttgatattgccttcacttttcatctatatgatatttgcaatttagcaaaaaaaaaaaaactataagtcactttatcgtaaaagtataacaaaaatatccatattaataaaaattaagatatataactttgagttcacaaaaaaaaaaaaaaaaactttgagttcaagatcccacatggtaagtttggcttttgttaagatgtttttgaagacatattcacttctgtgattagtcggacgttttggcaaaacccggatacccgatgttaaatcaaaataaattttaaatttttgtatatgaaaactgcaaattgtagatgatttttgtcaatgtggctatcctaagaacatacttttttcaatggcatcaattaaggaaaagagaacaccaactaaggtataaccatttaaatgcttaaaacaattttttttttttttttctttttttttgtggtaaactaatgcttaaaactattatgcttttaaaatataattagaggcaaatgtgtagatttcaaatattgcgcatatcacacactatcggcaatcgaataaatgacataaatatgccattagtcccttactattgcaatgcaataatgtacgggcttgaggatacatgaatggtgcatcttatgaacggcaatggtttgatattcaacatctttaactagctcctggaagcacgtatttggaaaacacatttttgagacgtaaatattgtttggtatcatcggtcttgtactcatcgaacggatattttggctaagaaccagaaatttgcttctattaatattcagcatgattatgtttctctttttttgaatgtgtcacactcggattgtgatattttagaattttattaaagaaaattcccgttgacattaaaaaatgacattaaaaagtccaacgcacaattgaatttgatgttacacaaagagaaaaatatctcatgtttcacactctatgattgatagaacaacatatcattaatcttctccgtttcaaaagaaaaataagctggctcctcccatcacaacaacaatagccaaaacggttgaagaagatctagaggcggagctagatgtcgaggttttgacatcctgatccgcttcagattgagcaagcgtatcgggggttcctcttggactaatgggcgcgtaatcccccaccaccacaacaccgtctggtgcaagttctaaggggatttcgtaatccggataatcttgagatggaccaagactatcaatcaaactctttgtagagttatctactgttggtttgttgtcagcaagagtctttgatgaagatggcgattgagacttttcagaatcagctgctgaaattccattagccacggttagaattacgaaaatgaagacaaggaagaaatgactcgccatcgtataatttgtaatatagtacgtgatgatatattgatcccctaggctcttttattcaaatggacctttgtggggttatagtattgaattgtatatacgatgattttctgtgaggttcacaaaagtagatcgattaaacaatcaaggtgaattgaaagtgaaggagaaatggagattgggaatttaaacttgtaatggagatggttgtatattgttatttacggttaggtgttgtgtttcataactcacatacgagttcacgagctgttcaattttctatatctataagaaaatggttacaagttaaactatgtttagaatatggttagggtatttttaactagttgtttaaagagccgtctttaagtattttaagacgactaaaaataaaaaggctgttttacacatattgataataaattattatttatgattaaactaaatataaaactggatatagtttaaacattctaaaaaggaaattgttaaaattagcgtttctagtgactcaaaccttagtgttgaagattatttagaaccagcctttaccactagactacctaacaaatacaaaattataaagctgaaattgtttttatagtatttgcggccgcaagtttgggtttggcacgcttgtgcttgtgaccggtttgtaagtgtatgtgagaagtgaaagctatataaaatcatatgtatttaaacgtatttagagcatctccaatgaaaagagttcctcataggatctctctatttttttaagtataaatttcaaaaaaagttaaaaagagagctttagtatttttaaaaaaaattcatactccagtcaaagtttctcttagtggggttctcagaaaaaaatatattattttaaaatttttttatttaataagacttaataattattgtaattcataacatattaaacatacattattttgaaatatttttttaaaatagatgtgcaaaaacaaaattgaatatattatcaaattgttgatcgagtaattgatcaaaactttactctatgacatcgtaaaatggaatacgggacgaaaaagccatatcgtttgatagcttgtggtagaaaaagaaaaaaaaaattaaagaatgaaaacaaaaaaatctctttattttttgttaaaaatatgcgtccaatcacaagacgacaagtgtcagactctattaaattctcaaagctctctagagagagtcaatgctctcaattataatgagtttagaaatatttttttgaaataagtgagagagaattcatcaaaaaaataaaaattgaatagaactccccattgttgatattatggttctcttcttgttgttgttgatttagactataatttgtaacgctatacctaatatatgtgttgctccccattgttgtccttaaggagatgctatatacatatagatactagccatgcaaggatcattagaaaatgaatgtgattaaattacaaatagacccttcgaacaatgagaatctcatggttattgttataatgactaaagattacataaacataaataacacaaactaaacatttgtaacaacatcaaatatcctaacctccgtactatgcacgaatttaacgtgtgaaaaatcgggccggagaacaaactgttttaaaataaacccaaaaattgaaatatgaaacgtataatataatcttaaatgtagtatgaaatctccaagaaaatactagtaatattcaatcatatgaagaaaagccatgcaacggctgcgagaacagagcccgagacagagatcacaagcgatgaggctcctgccgcaggagccgaagcttcagggccgtcactggcgccagttccgtcatcggaagatggagacatttctggagtcggagctggcggagaggaggcggtaggtgcgtcagaggagctggtaggaccttcggaagaatcaccggagcttgagtcagggcttgaagccggagttttggctgatgatgactttggagatggggaagatggggaagggcttggagttccggtggaatttttcttggccatggttggagcagctgtaggcggtgaggttggggcggaggccgtgggtgattttggggatgctgcggcggcgggagaaggagaggtagagttcttttcgccgttggctttcggtgcgtttgccggtgttggaggatcggcggccaagacggcggtgatggccaaggcagccacggcgagagataggagtttaagtgtcattgtcattttgtggtgaatgtgaattgcttttgtggtgattaattatgtatttttgtggtttatgattagtgctaaaaaagattaaaaagaagaaaagagttatttttgagagattaaggaagaggtaaaatttaatttatagggaattctacagatttgaccaaagttttggttgaccgggtccatcggaacttgtcttaaaattttattggtttgatcttttgttagtaaaaagagaacatgtggtaatgataattcccaactttcaagaaacaattgagaacacgtgactattgagattgattttgtggtaactaaatgagcactgtttcaacaaaagttaattttaatttaagctatacaaaatactaagaattaaaacttgattaacgtaccagttagtcaataactcaatattaagtggaagttcaattgttcaatacaaattcatacacgtaactgaagaagcacatttaaaagtcaacgaaacatttacatttcgtaaactaaaaataaataaatctactgcaatcttgtgaatgagtctaattagagatgagaaagtaaactgagcccaaaataaataaggcccatttaaaatgtaaggcccatgataatactcataagctttgtaatccacgacgcacgtgttccataatggctaacataaaaacggcaagcagtctacttttttgtcgttatcactttttaacccttttcggcttctatccgtcgattcaaatcggcggcagttcccagcgacattaatctccggcgagacagtttactcggtgagtttcgcggctacatagtttttttgaacttccttgaattgttcattatttcgggatataaacggaatttgcttttccccgatcgtcgtatcactgtagagaaaccgatacttgattggttcttcgctatttttctctattttgatatgcaattcgatttcacactctcaaattcataatcctagtttgtatagtactctatctcgtgaaattgtctgcttttatcgattaaggcgttgttgcgtacattgcagtgtttattgaagctatgcctaaaagaacagcagaagcgtgtccatcatctgaaatccaaagaagcagaggagatacttttggtagttacagatctcaagtagctgagcttttgtctctaggtgagaggatctcacatcatgatcaacaagaagccaatgagaggcattctgagagtgttataggagctgggatgtcaaatgttgagaaagataatttgaatgttttgttaaggcagtgtgtgaggaatctaagtccagaagttgatgaggtacttcagagttctacttctaatatcgtatgatgaaagagtactcaatattattgcaattcgtttgcagatgcaggaatgtgtacgctctctgtatctaatttctcagctagggaacaaatgtcagtcatcgtcgccgagcgattttgttcctgaagaaaccggaggagcgagagttcgtcttttacttatatgttcttaatcctcttgcttgaaacatacttgtatatctttcattttgttttctcaaaattccttcaggaagatgatattcaactacttctgaggtctgactctgatatggtcaagaacataacgtcacagtattcaaatgttctgctgtccaaagtaatgttccacattagtatatctagcttgcagaaagatcaatcatctaatatagctaacttctgcatatgttttgttttgaaagctggacaatatgcagcaggaactcgagagacttcttgacgatgtggtggcgacttgcaggtatagtgtggtctaattgatctctagtttgtgccattatataatcagttaaagagttttccttatgagaacattctttgttggtggttacttatgtgttagttgttaactcttttaaaacagacctatgactcgtggtgaaattcgggagcttcagaaatcgatcaaggagctgcctgagaggaatctcaaccgcgtcgctgaaatagtaggaaatcattgcatagcatctggcagagatttcaacgataaggttatcgtcaaccttgatcaggcggtaagacacaatccgtagttaattgattctctggttccgatgagtattaatggaaaactaacagcatttcaaccaaactgtgttttcttcaggacaaggtcatgttatggagattgcatttctatgtaggagcagtcaagaggcccagaagctcgctccctagctaactttggctgtatatatatggactgggatgttgagatggtgtgatgggctaaaccggtttaatatatttcctactttttttgttttcctgattagtccggttaagccgtgtagtagttggtcttacatggacggttaacaaatgaaaatcggttctgatttggtaagactttgtccttcgtcccatgaagatttctctaacaaaaaatcattgaccacatcatgacatgaatccaaagaaaacacatagtttgctaatgtgtctgttagacgattaatctctttagatagtgtgtatcaatttcattatttttgttttaatcgtctgtcattgtatcagtttcggttagaaactaagatagggaaaatatttctcgtcctataagatgttttacctaagcacaaaaaatcattaaaacggtattcaagacttttaaataaatcaaacaaaaacaaattttgatttcaaagtaaaacgaaaaaaaaaatcgtaacatgaaaaaaaaagatatttttattttattttatttggaaataaaatctgaataattattttatgacagtcaataaaaagctatgaaatatttctagagctttactaatgggggaagtttgaactagctgcttgatattaatataataatttgattatcaacaaaaaagttatatttaagaattaagattgatatatgttaaacttttggtaattttgttctaaaaccaatattctttggttgacttgactattttattaatatattagtataaattgagaatgtgaatctcctttccaaactattcttataggttttctatatatataatttcctacatagcatctaacagatccccgaaaaaagatctcaactacatacaataccaacccacaacaaaaatttgctttttcgatcttctcaaaaatgaaactaaaacaaaccaaagtgatgtttttcttgttagtcctaatctctgcattaatattgcaacaatcgaaagctcagaaaaattattgttcgagaaccaacatagactatataccgggatgtttccatgcgttgcaattagcgtataacaaagattatagtctcctaacaagaaattgttgcagagcagtgttttcacttcctactacttgtgccttgcttgtctatcctggcaaaacttaccctattactacctttagattaatttgtatttatagcgatcctcttccagcaatgtctccattaagtctataagttttgtttatctcttaataataatataataataaaaatcatatttacattataattttttaactttgttcaagttacacataaaatccctaactctctatacgtgttgaatgtttgaggtctcatatttatcttactctttcggttttcaaaaggatatcaacataaatgtaaatatgtaatcattcctcatttgttggaaattaatttataaattttgatttcaaaaatcaactaatccatttgtaaactatgtaaaatatttatcaattatattattatttttgccaccttagaaatatatgttaacatttgtgtagttaaaagaaatccccaaattaaatcatgttttgactcacacttataatattatcggatttcataaataaatggataaaccatgtaaaagatgaaataacatacgataaaaaatgatcttagtcaaaacatatgaaagccgataataataatgacatttattggaaattcaagtctaaaaataaataataataataataacaacatacgagatgagatcgagataatatagtatataataaattaaatataaattactaataataatgacatttcttacaaattcaataagtgtttgtttttactcatgagtgtttttaacccatttatactcttatattttcataaataacctacttgttatcaccatattacaccagttaatatatttgtaaaattttgaaaaagattgtatatatcaatctctatacatgactcataaggttaacatttaacatcgtttaattgttttggaaggtagatttaaatccaccaacaattcaaggatgtgaagaatttttagatcaaatatatatttaaatgtacaagtgtttttttctaacaaaaaaaatttgaggtattgaacggatgggtaattttcgggtgtttttgccgtgttattgtagccgtcgattagttgggatgtatacttattgggcctaagaagcttaataccttaattgtacaatcggatggatatataaatgggctcaacaacaaggaaaaaggcccatttaaacctaagagttcaagctctatttgtagaaagaccaaagtatccctagatgtttaagtatgtcctctgtgtctctaaaggttaattggggaagaagaaaactctccttctttttgtaacttttgcttcacctctctcttcttctcttgttctattttttttcccgattcaagcaaaattcatcaaggtaaatttactcttcttctcaagctgagtttttttgaattgttggtatcttccttcatcactctcgcacttctcttcttgaagtctctcttgctcgattcgattctacggtttctctcgatccgagggtttttgattgaacttttattggtctctttgatattgaagaaattattcaaccctaatctcaaattgcttcagaagatttcgggaaactagtttattcttatgggtaatcgttttgatgctaaagtacttaactttttgtgattgtagacttgtcaatttgaaaaaatgtcgcaatcaaccgtagatgttccgccaaagggtgggtttagcttcgatctgtgtaagagaaatgatatgcttacacaaaagggtcttaaagctccgtcttttttgaagactggaacaaccattgttggtttgattttcaaggtatggttttttattctctcacattagtttcttgtccatagattgcatagagtaatagtttcatgggaactgtttttgttcttagtcagctgagaactaagttttgtattgtggaagttaaaattagatctttttagaattggttagtcaagaagttgaggcctaagactgagtcgcaggcacattgattagattgctctactataatgtgattgtttacttgtgtctgttaaactctttagggtcgttattgacgagcactttcagtttcgcatgatagatccttgtatgagtttcatctaaagtaggttttgcttagtgataatgtggtggttcttatcgttagctcttgtctctccgtatagtttagaacatagtatctagacgtgtaagatgtttgagttcttgtgttctaattgttgtcttttgattgctttttttagtaaattattgtggaagctgtgtaatattgattttgatattcgggctttgtataggatggtgtgatactaggggcagatacccgagcaactgaggggccaattgttgctgataagaactgtgagaagattcactatatggcaccaaacatatattgctgtggtgcaggaactgcggctgatactgaagcagtcactggtatatatactttctaccttcagtggggcagattttgttttctctgtcaaagaaatcagaatctaactggcataatgcatcacttcatagaaattgatgcttagttatcttggtttctttcttattgtccagatatggtcagctcacagctgcgattgcatcgttaccagactggtcgagactctcgggtcattactgctttgacccttctcaaaaaacatcttttcaggtaaatttgttctttctcctccagaaactcgtcttaaagaaacatagatgatttaactgcctaagattcatttcagctaccaaggtcatgtctctgctgctcttgtactcggtggagttgatatcactggtccacatctgcatactgtaagttatacatccccgacagtatactgagaagagatttttttgtttgtttgttgttattcatatcatatttgacctgtttattttataaacagatatacccacacggttcaactgacactcttccattcgccacaatgggttcgggttctcttgctgctatgtctgtgtttgaggcaaagtataaagaaggcctaactgtaagtaagccattcacgtttcaatatccagagacgttattttcatctgtctgattattcttgtttacaaaatcctctagagggatgaaggaattaagctggtcgctgaatccatatgctcgggtatattcaatgacctgggtagtggtagcaacgtggacatctgcgtgatcacaaaggtttgtcttcaccctactttaacctgtacctttgattaatccacaaatctacctttggtcagcatgttagactcatagtttatcatctcatagacataacagtgaccaagtaaatcgccatcaaacctcacaaaacccaactcttagcattgccattaaataaaagtaaaacaacctctccatttggtttaatgcaatcctagacctcagttctgcatgtacatattaagctgacccaagttattcaccaccagatcaaactcttttgcattacatgtgtatgttttgttgcttttgagcttattattggacacaatattggcaaacaggggaacaaggaatatctcaggaactacatggaaccaaacccaagaacctatgtcagcagcaaaggctattccttcaccaagaaaactggtaagttactctcaaacacacaacaaagaaacttgcatcgccgccctcgcctttagctagtcgaaatcctcagtttttctcacttcatttttgttgatttattgtgtaacagaggttcttctcaccaaaatcaccccattgctggagcgagtcgaaatcacagaagttggtgaagctatggaggaataattcaatcaatctcatatatcttcttttgcattgatctacatcaaggctctgtgtactctcatgatctcatcttcccagtcttgtcttcttcccatgtttaaggatcattcaaatcttgttactcctctctctccttcttagatttcaatagagagggtcagactcgagagacttcgtcctttcgaaataaaaaaacaactttccctaaattattattggtttgtgcaaaccgaattgaattgtacaagctgtttaaccaaatctcctaatacgacgtcgctttttgtctcaggatgacgtgtttttgttgccgctaatttctctacacgcgagtatatacatatataggaaatagagatacgaatttatcatataagacgttactatagagcgacacttatcttttatttttatttttcttcagatttgtttttttgtttcttcttctttgatttatctgagtaaaagctttttaaaaactaacataggattgaagaagacgatggagaaattatctaatggcgttagagatcactgtttgatcagtgactatgtttctccttcagctcctgctcctcttaaacaacctttcgtgatcggtacgtttttcattgatttctcaaatgattcaaaatctgattttctctgattccgtcaacgatctgcttatatcaggtgttgccggaggaaccgcctccgggaagacgacggtttgcaatatgatcatgtctcagttacatgatcaacgtgttgtccttgttaaccaagtaattattaaactcataatctgttttttcatcaaaatcgttgtgagatatgtacgtaagacgactcaataattgcaggattcgttttaccactcgcttactaaggagaaattgaacaaggttcatgaatataacttcgatcatcctggtgaggaaaatcaattatgatgatttgatctaaggaacgattcaaattttgttcttaagaatctttgttttgtttttgatacaagatgcattcaacactgaggttttactttcatgtatggagaagttacgatctggacaaccagtgaacattccgagttacgatttcaaaatccatcagagcattgaatcatcaagtccggtactattagtttttgcttgcagagactcagaaaacaccattagttattgattagcaacactaattacaatgtcctacttcaggttaatcctggtgatgtaatcatcttagagggaatcctagttcttaatgatcctcgagttcgtgatctcatgaacatgaagatctttgtcgatacaggttttgtatgatgatccttagcttttagatgaatcattaaggccttcatgctcatatcctatacatatttaccaattgtagatgctgatgtacgactctcgagaagaatacagcgtgacaccgtcgagagaggaagaaacatacagaatgtgcttgaacaggtttcagtgtatagtttacttagctttagatgaatcattaaggccttaatgctcatatcctatacttttgttttcagtatactaagtttgtgaagccgagcttcgatgaatacattcagccgtcgatgaagtatgctgatataatcattccacgaggaggagataatgatgttgcaattgatctcattgtacaacatattcgtacaaagctgtgccaacacaatctctgtaagatatactcaaacatcttcatcatatcttcaacattccagatcaaaggaatgcatactcttatccgtgatatcaacacaaccaagcatgatttcgtcttctacgctgaccgattgattcgactggtaaaaagaccgatcaaaacattagttttccgatgataggttgcttagaaagatcaaaactaagagtggagttgtatatgtttgtttcaggtcgtggaacatggacttggtcatcttcctttcacagagaaacagatcacaactccaacaggtaactaagccgctttaaagtttgaggaaagttaaagattaaatgtcacttaagctaccatctcttgagacttaacagggtcagtgtacactggagtcgacttctgcaagagattgtgcggtgtctcagtgatcagaaggtatataatacatcacttttctgtctcatttctttcgggtttgtggcctctgcttcgtagcttaaagttttcactacttacagtggagaaagcatggaaaacgctctaagagcttgctgcaatgggattaagattggtaaaatcctcattcacagagagaataacgatggtcgtcaggtcagattccattgccttcgaacatgtttcccccatacatctcagctcaactctttctcattcaaatgatgtttattgcagttaatatatgagaagttgccaaaagatatctcaagcagacatgtcttcctccttgaccctgttctagcatcaggttcatagtaacccatataaaaatctagaccaatgttacaaattgttgcagaaatatctaacttctgaaagtgttaacaggctactctgcagttaaagctataactttgcttctaagcaagggagttccagaatcacatatcatctttctcaatcttatagcagtaactaaagaccaaccaaacaaacctcttgtccatgtttctctctgtaatcatcattattattactaacacaagaaaaaaccgcaggcacctcaaggcatccacgcgctttgcaagaaattcccgatgctaaagattgtgacatcggaaatcgattcatctctcaatgaggactcacgtgtgattccaggcttgggagaatttgcagaccgttactttgggacaaacaacattaattcaaaagtatcaagcttgtctacaaatctcaagttaagaagctaaaacaaagatatgctcttctatagttccaacaaagccatgccttcatcatcatactaaacttgaataacctactgattcatcctgagtttctccaatcttcattctcttgtttagctaatatttatcctatttctatcaataactctatctaacatcacattgaaacacatacatttctttttgggtagactaatctccaatcttatagttgtatatgctaatagctacattattgatctattttggcatagaacatcaacaggaactaaacatctcattccattatctttcaaaccaaaactatctttgcagaacaagaaagtaaaaaaaaaaaaaaacagttacaagtttcaaaaaaacctagaaaacaagcttgttggtcttactgttgtttggcttcaaccttctttttctgccttagcctatcgactccactgtccgcatcaccctacatcgtttcaagaaaccattaacaatgtttccaacactaataacacaatgatccagggccaattctatagctagagtaacaagatttatgatcaagaagctaaacttgacaaacctgagcacggacaaaaccgcagagagcaaaggtagtgaattgaccagtgtagagtccattagcatcaagatgaccaatgttgagctgcactgaagcatgatcctttgatgtgataaatctgttagtagttgagctgcaattatcatcatccaaaacaaaccaagaacatttctcagatttcagcagtaggtgaaattggctacaccttgtaataatattatctacaaaagccgtggagcaaaaccctagcgtcgaagttgtgttatgttacgacaaactaaccttgctgtgttagtttaattaattgacatgccataaaaagtccaaaccgttttctagctacaaaactcattagacccttcattagctagtatatagaatcacttaaccgcggattattgatgctaattgggatgattccttagggtgaacggtaaaccaataaatgacacatgataagtagtggtttgtggctcgggattagtttaaagaaatgccgggaccgggaaccgcgagtcgagatccgagtatggaaagaacgtattcttggacaattggtcgacaatgcagattaagtaagactcattataataagagaagaatcctgtctatcggttttcaaccttggatgtaagttttacgggaaaatagactaaccgtatatgcatggattgtcgaggaatgttcggtaaattcatcgatggggagtccgtttatggtagtttcagtaaccgcaaatgcagaatttaaccgcaaatacaagcttttgtgatatggatgaaaaccgcaaaatcttagaaaaatgtaatttttttttaaattgtgtctcaatatgatatacatacccatggttccattcatatatacacatttaaatgttacaaatgttgctagagtagttttgccacaaattgaaataataaaaagttaaaacatacctttttattcttcaaagtcatcatcacaaacaaaggcaacaactcttaacttacactctggcccaaagaaatcgtctcttatttcattgtatccatctaaaattactggcgatggccttctggtaaagctaccactttgtggaatggcactgttctttgaggtaatgctccgtcttcttcatcatcatcaaattctagcaagtacctaatataatcagaaatgttcatagttaaacactttgggattcttaaatcttaactagaaatgtttaactatatgaacaaaggtgtggaggaacttactcgtcagatttcctctggaaccagatatgcatcatgcgggtttgaatagcttgaggttagttcttattggtttcttatacattgttgaaatgagtctgaaatggtgcgtgaaaaacagctaacctttcgtggggtacttataacagttgccttgtagagggctgtggttcctggatatacagctaagacgtgtttccctggtataaactcttgtgtgcttgaaggatcattccgttttggaaacggtaaaatacatgacattgatagtttatacgtccttcagattacaagagaataattagcaagttactcaatgtcattgcgaaagtttctgagttataaagagctcttagttacctctggccacctccttcttcatcatctcctggttcttcatcaagtacttcaactctgtgaaaaaagtttgaaactttatttagacccatatatgaatctatggaagagcaacatatttaccataactgcgtcataacggctatctaccagtttatatggatacttgaccattaaccatcagattcattaaaagttgtctaaatctctcttttagcacacacatatacctaaaattgtttgataatgatgactgttccctctcctaaccaataagagaatcttactaaaaggattcgagcttactcttttgtttctctgtcgaagtgaataactttcaccacaaaccattcatccttctcggcatcttcagctgtgactcttgcagcaacctacataaatcagatgccacaaaaaagttagccaattttggtggaaactcaaaagaaagaagtagctgttgttgctgtacctgttcaccctttagactagcatatgcctcgatttgatttctcatggaaggagaaactcttgttacatctgtatctactttcattctctttctcttctgttcgttgccttctgccacttatgtgatatcattacaagcatcgtaaaaagcttaatccctcttatatatatatcaaatcattggagaggtttgagacacaaaagagagtatcaagtcttatctttctcacaaaaacaaataacgcccaaagagtatatacattacatgactagcctgaaatattcaaagaagagtctaaacagtaatggaagtatacctaattttctgcgttgttgcccagttggtccagatggaagcagagaatccaactgagtaagcagaatatttgaaacgctgcattgtacacaaagctttagatatttgtttttggcacacaaaaaattgtgtcattttagttgtatcatcactctctaaaccattcaaaactgatgttacaactgaaaggaaatgatgaagaaatatggcttacgttacttcactttctgaaagctcttttgcttgaatgtacaaatttttaagctttgacaatgaaatatcaccaggcttctcaactatctccggcgctgcattttcaacacatacacaagagtcagccagataattcaccaagtagataagtattagaggctcaataatacttatatctgataccaccaaatgaggatatgtactatctaatacgactgaaagcaaatatcagtcataaagtcatattaacttcaatccactttagctgaaataagctttattcagcatgaatctactcctcaagacgagctaatttcgcttgaaaatgcttcagattctcattaatttgttaccataacagataaaccgatatatcgaatccgctatgacgatcctttctaagtacgaaaccaaggcttaatcgagaaattttaaaactcataaacaagttaaaagaaccacaagaacaaatgcagaaagataaactaccaaattggctaaatcctcacttgccaatctctacattacaacaaaaaatttcatgaataactaaagtctcttacttggttttcttccctgacaattgtattcaaaattcaaactttttcaacatctaatttcaatcaatgtaataaagagttctaactaattacttcaagatccaaacccaaattatcaaaataccataactaaaccaattgaaaatcagactaagagaagaagatcaaaagcttcttacttcggttcatcacaaaattatggctgaaaatggaaacacttactagcttgaagcttcttatgcatcttattaatctccacaagaacttcctcttgttcttttcttaaccgatcaagctccttcgtattatctaagattccggcaatgtccggcgacgacgacatcgtctttcaagctgctacaaacaaaaatccacgacaacgatcccgataaagaaacccaccaaactaaaacacaaattaaaattccaatcactgaaagtttcaattttttttttgctggaaacttcaaaaaaaaaaatacaatttttatgttcaaagtttcaaactttaggaggagaaaaatctcagagaagatctcagttttacgatttaataaattcaaatcgcaatttagttgtgttttctgttaatttgtgattggcagatcaagtatgagtacgacttcgttttatatatagggacagttttccaaagcatattctatagttctaaatagatatatttgtagttaatgagctttaggagtgtgtaatttaaatgtagattagacagatataagtaaaaattttactgtaaaatactaaaatcagatttaaaaaacttggttatggaaattaagtaactttgtagtttgtatgaaccatatttacttaatcaaagctttattcttttgggacaaaattctttaagagaaataaaaataaattttatcatcacttgagtcaaacaattaaaaccttataagattaatttatactatttttggaaaacttaaattttttatttataaggcaacacttatagaataagaaacaacctatactaatttttttaaatttactttataatactattttgtaacttacatttttgtttccttttttaagaacactataggataagaaaaaacatatattgcactgaacacttgttgatgtgtggttaatttttaatctaggtataatatattcataatcatagacaaaaaaatcagtaattatcataatattatctattaagctgccacgtggttagcttaatagtttttttttctttcttttttgctgtttaataataaactcctaactccttgcctgatatgtgtatctgaatgaaaggcccaatttagataaagtaggcctgtaatgggccttggttgataacgtagtaatgacaattttcgtcaacagagagagttacaaaatttttgagctttattcttttgagctaccgattttgccgttttcgtgcagtaatttcgagaaagcgtggaccatttctggattccaaagctgaagaagatccaaacattgtgaagatagaatccgtttactaatggtgatcgatcgctttctgagttttgtgtttatcgaattctgaatttggtgttgtcgccaattagtcagacaggacagaaactggttttctttctattttggtatatgatcgcatgttcttccattgtcgtacatgattatgttgtcgtgtttattgtttttaccgtatatagaattttgaatgcataattgaaattctgacttttgagtaatggaaaggagttagcaaaatctaattacgtttaggtttaggtgtgtaatttagaatggatttgttgttttttgatatgattgaagtgatttggtgtaatttttgattaatttggaacacatgatatttggttattgttgtcaagaaacaaggaacaattgttaatccatttggaattgtacagttgaattttgtgattctattgtggatattgaattttccactttgtgattgcttaagtattgagtataggcttttaacaaagctcatttcttactattactgtttatatgtttgtgtgtgttttgtagttagaagcatcgaagaatgaaaatgtgatgcaagtgaaggaatgaaagtgcgttgtagttcttcgtatcacgactttggcgtgcatagactgtagatagatatcagataacaacctgtaggtatatactctaatataggcagtacattgattatatcaaatatctatgtgatttgtataccatttttatttgaatcattatctgtgttaacttttggaattgtgtacatttatctttatgatatacagtggaaatatgagaagacctagtcaaatgatgaggcttctattaacatcctttttcggtgttattgttggtttccttatgggtattacttttccaaccttgactttaactaaggtaaggttaaatctttgcttcgtgcaacatgtctataccttttcgttcattttcaaacttgattatgtcattgcttacacggtgatggtttctatcttttttgttttgaaatggttagatgaatcttccatccacattgtttccctcgattgatcttgcatacattgaggataaatactctgacatatcaagacaaagactatttggttcttggtcttcgacaaaaggcctcaaactcaagaatgacatccctgaccctccatataactataatgacactaaggttgtgattctcttgttctcttcttatttacctttcaatgttttaatataaaaaggttgatgatagaacgttcgagctattgcagatatgggtttcgactaacccccgtggtgctgagaggctaccaccagatatagtcacgcctgaatcagatttttacctccgtcgactgtggggcgaccctaatgaggttcataaatttgaatctacttgcttttatttgagaatggcttcaagatcatggcacattttgttggtatggcatgcaggatttaacagtcaagcagcggtatctagtaacatttacggttggctatgatcagaggaaaaatatagacactgtgttgaagaaggtatcctgccttgcctcccatacatattcttcttctttccttccttttctcattccttgactttacatttctcagttctcagataacttctctataatgctgtttcactacgatggccgggcaagcgaatgggaagagtttgaatggtccaagcgagccattcatgtgagcattcggaaacaaacaaaatggttagtggcctctttactaagcaggaacgccaatcttcttcctagtaggagtttctttgtcatgacagatttacttaacaatctatgaattttccctgaaggtggtacgctaagcgatttcttcatcctgacatagttgccccctatgaatatatcttcatatgggatgaggatcttggcgtggaacactttgattcggaaaagtatgtttttgaagcttggacttccttttaatagacattccaggttatgaagattaaatttcttggacagatatctggcggtggtgaagaagcatggtttggaaatctcacagcctggattagagccatatgaagggctcacatgggagatgaccaagaaaagagacgacactgaagtccacaagttagaattatatagtgaagtttctacattattttctcaccaccgcttcaattgagcatattcagtgtttactctcatatattcttgcaggcatgctgaggaaaggaatgggtggtgcactgatcccaatttacccccttgtgcagcgtatgcttctttacttatctatatcaatagaaatgaacttagcaaaaaggatttgcatagaaagttaatagtttcatcattttgttgattttgctactacaaccaaaatcaggtttgtggagattatggctcctgttttctcccgcaaggcatggcgctgtgtgtggcatatgattcaggtatgtaatggaaccaaatttctattcttctactgtctttagcaatttccaattgttaccttgtaactgcagaacgatttgattcatggatggggtctggactttgccgttcggaaatgtgttcaggtctgctacttacttgctttgtacagccatatgcacatctagatccctctctcacgaattctatacacttgttttatatcctcattaatcatacttgccttaacagaacgcacacgagaaaattggagttgtagatgctcaatggattatacatcaaggtgttccatcattagggaatcaagtatgctttcaaatccatatttatctttattttgtgggtgagaaaaataaaattttgcattttgtggactgcctttggaaattatataacagaactccaatgactaaataccataggaaaactagtccccttcaagactctagagagagtagttgtgttaatcatatagtcatacttcgatattattttgaatgtggtataacacattcccatttatacagtagaaacatctagttattgacgttcccatgcctataaatattttattttgccgtttccgtccccgtatccgttttggttctacttagtttactatattatcgtgagatgtaaatgcgtagaacaggattgttaatcttcccttttattctttgtgcatctggaatcttgacagggacaaccagagcaagggaaacaaccatgggaaggggtaaatacgaatcccctagtctttttcgtccttggtattatcggttatagaataggaggatcccgtcgtttttgctactttatctgacgttattggcgttttcaggtgagagaacgatgcaggagagagtggacaatgtttcaagacagattggatgatgctgaaaaagcttattttgaagcatctgctcacaagaatgcttcttcacggcctcacgggtaataaggaaacatatagtctctccctccgacttccactctctttgtttaccctgttaattttgttcccggagctgtgctttgatttcgtgtttatggaagagaatagtctggtcgagagaagataaattgttagcagctaagcacattcattaacatctgattagtctttcttttttcttttcttttcttaactctgttaactcttattgttgatgagaactccggtggagagtagagttagaggtagacaacaataaaaaaagggagattaactgtgatgggtaagaaattaggtgttattaccagaacacgacagaactttttttaattactgttatatttcgagttttttttattacccagcgtgcccctactaaacgttaccggaaaaaacgtaattacagggaatgccactgccacgtcagaatttgctgatgtggattaaatgaactcagccggctgagttacggtatgttgcggctgacttacgtcaaaaatatatgagtcataacaaaacggcgaagtatgagtataactcagccagacgttacggctgagttgaaaaatgttgcctgagttatagtataactcaggcaacggtatggttgagttaaggatgttcggccgagttataagaagttatacgataacccagccaacaatatggctgagttatgagaaaaaggctgacttatttcctcgacgcggccgagttatagttttgattggcttagttatggaaagatgtgacggctgagttatggtcgagtgatataaatcagccgctaatagctggattacgatataactcagccataacatggctgacttatttttaaaagattaattactataatatcatgcagttatggccgagttgttgaacgttacggttgagttagttgagttacgacattacacggctgacttaactttattttttttccttttttaattactgtaatagtattcatgttgcaactgacttatagatttgcttgatggttgagttatcaaatgttcgtttagtggcttagttgccacctcatcaattcaaaacgacgtcggctgtaatattccatgtcatcattccatgtcagcatcatcaaaggataaaaaaatagggtaaaattttttcaactcgtcttcttcacttgagtttttcacatcaccggaacttctaattcctcatcgtttttctcatttttcttcaatttctttcatctttctcccgatatggttgatctagttttggtaattgttgtttccaggaattgggtatagaaacacaaatacatatttaacactgatataagagggtgtaaacttgtgcagatagatgcgaaaacaacgtacgacaaatttgtgaagttggtgctcgatgataaagttagacgaaatgttgtatctcttattgtttcacgacaaatttacatgtcacggctgagttatatgcttaagggaagacgaaaggtttagtcaatttacatgtcacgactgagttatacgttccaggaaagacgaaaggttcgataaaattacattacggttgagttatatgcttaaagaagaacgaaacgttcagtcaatttacatgtcgcggctgagttatatgttccaaggaagacgaaaggttcggtaaaattacattacgactgagttatatgtttaagggaagacatctataaatttacatgtcacgactgagttatatgttcaagggcaaacgaaagatgagtgtaaattatatgttacggctgagttatatgcttcagggaagacgaaaggttcggtaaattacatgtcacggctgagttatcatttagggaagacgaaaggttgtgtaaattatatgttacggctgagttacatcacgttacggctgagttacatcactttacggctgatttataatacagatcggaaagcaacattttttggggaagacaatatgaaatttattggctaaataacaacaatcaaattaagaaacgtaataatctgtttgagggatacataggaggaagacgaaaccatatgaatcaaaacattgatagaagtagaaatatctctaaatagatcgattgagaggaaaactaaacgatagacatataaaatcaaagtaaaagagtagttattcttgattcaactaaaacctgtaacaaatcatatagaattccatagatctctttgatttgggttttgatttttgatgacttgaaattcgacaccaccgaaagagacgagataagtagagaacggcgatgaaattagggttccgtcgactgaacgagagaagagagcgacaattttttttttttttttttttgcgcggatgaacagtaagatgtgctgaaaaaatgagaaactgaaagttttaagggaatttttggtttcagatgacgtagattagggtaaatgacatggactaatgacatggataatcacttttttttatttattttttaattaaaaacgaatttaataataatatttaattaaaactaatcgaggatcttaagtgtaattacacaagtacagaaaatatacgaataataaaaaaagatgtgttctattataggaataaacatacaattgtgttctattctagtaattatttcataaaaagaacatctaatacatgggtatgaaacttgaacaaaatcagctacaacctcatcaagtattgggttcaaattgcccatggagggcacacgtccactgatgagtacgcatgctcccggctgagcccgagacaataataagaacaaaagaatatgttgtttctttccttattaagaatgaagggacctgggcaacgacaatgacacgtgctgcaaagcggccgtgaagagctattgttagccagcaattcataatcgccgttaatctttcctcctggtttggcatacctgatatctccaactacacacaatatatgaaacgtgactccgcaatctttacaagtatagaaccaagtttttggatttgtttccctttcacaaatatcacaccaatatttgccgcttgcgttttcatcaccataacaaagagtgagtggatgatcatcgtatctgggaagcattaccgtttttggtagagtggcacaacaaaaatccaaataataattgcatttgctacaaccaagtacttctgtttcatcaataccgcagttctgacaagtcttcacttgaccatatcgtagtttgtagtagagtaaatgatgatcatgacttccatgaataaaaggcacggtaatcgaactgcacaataagtcaaacttatccctatatgaattgtagatgaatccttcgctaaacatttgacgacaagctcgacatctccctaagacgtatggtatccattggaggctaagatccagaggctgtgggctaagaaaatgtcgtttctttgtagcaagattagcacacctttcatggagaaaaaaaccgcaatatgattttgaacacttgtagaatgtgtaagagccgatgggatgaacacatgctccacataagctgctttcttcatcgtcattgtggaggctaaggttatgttcatgagcgaaatgagtgatcgtgttgtcatcattcctcttaaatggctcaatatcttcaacttcttcaggtactccatcaagctcttttccatcccatacatctttccttgttgcacacagtgaatgaatagcataattaggacaaagagagcatgaataagccccatatgaccaatcaatctcttcccaacaaactccacatctccattctccaggaccaagaggatacttgtacgaaacacggtgatcatggtgattaacatgaatgacacgtggtaaacgagcacacttttgatggaacatcctgaaatcacattgaacacatacgtaaggagcacggtcgcctttcgtcccacaagcatcacaaatgaaggatatcaatcttggcatgagtgtgagtgtatgctcatggaccttgagatctgaaagagcgactggtatgggattttcaaccgcgcattccatatccaagttgaacttacaaatatcgcaatgataaagtaagtttccagtttcttttccacatatatgacaacttcggtcttccgtgtaatctggagctccattggtgataagctt

SEQ ID NO: 473 - DNA, 54452 bp, Arabidopsis thaliana
aagagggtgactgagatgagaaggatgattaatctctggtgagtcaaatacggaaacacaactctcatgaatcaccaacctgcaacgagggcagaaatagccatgtttgccaccctcataacaaaaatcgcaccacatatcagagctaaaatcaaccatgagtagaagatggggatgccatggcttactcagacgggctagggtacatatgccatcaatcatgcaatcaatgtccaaattgactttacaatcatagcaatgataaagaaggtgtttggtgtttttaccgcagagatggcattttgagtcggtgtgaacaggagctccggttgtgagaagtttaagacaatgcccatcatgagaagggtggtggaatatatcttctgtcatgaacacaaacgcacatttccggtgaacagtaaacttgcattcactgcaagagaacccatcaccagacgatcgatcgcaagcatcacattccaaactatcaccagagctaacaatggatacacgatgctcgtgtccttctagcctaaaagtcatggcggttgtggatagcagagaaagaaaattaaggtttggggtaataacagtttgggtttctgtaatattattgttatttctctatatatactctaattatagcaacgctacttgttagattatcatatacattaatatattagtaataatatagatgacaaataaacattagtaacgctacctagtgggcacgtctttagtctttgtttaatttaaacactaatatcgatggtcccgttcaggttttgtttgccatgttagtttgttgacttcgagtcttcgacttttattttttaaaatattatttttgcggggaaataatccgaaaaaaacttatttattttttctttttctttttaatatatgtaatattaaattttctaaaacaatatatgaattaatttttatgtcttttaaattttcgtttatttaaattttagcaaaatcacatatccgagttaatggatgctttaattatagttgaaacttaactcatggtttttaagaatacatacacaatctagttttaaactttacaaatatattagcttagtatcgtggttaaatgtggatgaaatattcatataaaccagagtttgaatcttctttaagtcccttttagaaataaggatctcgaatcaatatttccagctgctgattgatttttgcattgacgaagaagatgaagtcccaaaaaaaacgattaaagatatggagacgagattcgaacctagattaaacaggagccgagattcgtcggagaaagaagtcgccgtaggaaggaaatcgcggaagtaatcaccgaagaaactaagacacaaatatttgacgaattgatgtttttctattttctcccaaatcacttaacctaatattttatgactattgggccgcccatgtccatcacatccagtccgctaaagcccatgtccgttaacgaccatgaccattaatgcccgcttcataatgggcttgtccatacctatccattaagcattggaaacgagcagtccccccattttgacaactctaggcagatgagatgaggcgaaggatacggaagaagagaatactggtgaaactcaaaagaaagcagatcgaattctaacgacgcgaagagaagagatgtttaaatgctttatttttcagcaaaatccaattattcaatatcgaggagaggaatgggtataaatgaatttagcaaaagggatttgcatagaaagtgactagtctcatcattcttgctattaaaaccaaaatcagatttgtggagatcatggttcatgttttctctcgcaaggcatggcgctgtgtatggcatatgattcaggtatgtaatagaaacaaattccctttcttctctctgtaaaagtgactcaaaaatcactgtcttcagcaaattccagaactaagattttgcattttgtggacagcctttggcaattgtattacagaactccgttgaatatatatcataggaaaaactagtccccttcaagactctatataattacaattaaccccttaagtaaatattcacatatactcttctaatcatacttctcaagctcaaagcctacacatatataattagaaaattagaaagatgcaggagagagtggacaaaagttgaatctcaggtttctctccttgtctgtttttgtgtggcgtgatggtagctatttctctggtatcatttgagttttgctgtcactcatgtctgtgttgctattggttttgactacggttttctaattgagttgtggcttatccggtcttattggtgctatccgacgttcacatgttttatgagaaaccttagtggatctctctctagttctgttagtgatttgatatttgtctgtttctttaatgagctctatcttttggttgttagtcactggatccgaaggtttctaacgtttcggcttgtgtctactttctgtgggctttagtatccggtgatatccttgtcttcaccagatttgtaatccaatacatcatttatgtttctaatacaaattcaagtgacataaaaaagaagaaagtgcacgagccaaagctgcatatgaccgtatgtaagaatacgatcatgtgtaattttaaatgtaggtacgcacaaaataatacaacaacaacaacaacaaccgattccagttcataaataaaaacaacaaaaataacaaataagttccaaactcgaacattaactacgtaccaccttataaaaacaaataacaaaaaagaacaaaagtacgacgttgacaaaaaaagaaaaaagaaaaaaaaaactaccagctcgtattcgattctaactctaacgcccatggagggcagacggtatgatattcgtcaaaatggaactttaggtgagatttgaaacagtaaaaagaacagaagaactcggggtcatagtcgacccaacctaaaacaatgaaggtacctgggcaacgacaatgacaattgtagcaaattggtcgtgtagaactattgttaggtagcacaaaacccccctcacagatatttcctcctggtttggcatacctgatatctccaagtacacataaaatatgcaaagtgaccccgctttctgaaccagtgtagaaccaagtctctgtattcgtttctctttcacaaatatcacaccaatatttgtcgctcgatttttcaccgtaacagagagtgagtggatgatcatcatacctaggaaggctaaccgttaatggtagagtggcgcaacgaaaatccaaaaaataattgcacttgaggcaacctatgacgactttagtatgatcgatgccgcagctctgacaagtcttaaagtgaccgtgttgtagtttaaggtagagtaaaggatgaggatgacttccatggataaaaggcacatcaatggaactgcatagcaagtcaaaagtcccatatgtatcatggtcatagacgaatccttcagaacaaacttgaagacatgcagaacaagctgttggcgagtcatcagactgttccaatacagaaagatggagaggttctgggctcagaaaatgtcgtttcttcttacgtaaattagcacacatttcatggagaatgaaaatgcattctgattctgaacatttgtaaaatgtgtaagaaccgatgggacgaacacatgctccacacaagctgttttcttcaccgtctttcctgaggctcatgaggttatgttgatgagcgcagtgagtaattgtgctgtcatcattcctcttgaatggctcgatgtcttcaatttcttcaggtactccatcgagttctattccatcccacacatctttccttgtggcgcacaatgaatgaatagcataattaggacaaagagaacatgaataagccccatatgaccaatcaatctcttcccaacaaactccacatctccattctccaggaccaagaggatacttgaaggatacacggtgatcatggtgattgacatgaatgacacgcggtaaacgagcacatttttgatggaaggtcatgaaatcacattgaacacacatgtaaggagaacgatcacctttcgtaccacaggcatcacaaacgaaggagatcaatcttggcatgagtgtgagtgtatgctcatggaccttgagatttgaaagagcgactggtggaggtctttcaatcgcacaacgcatatccaagttgaacttacaaatatcacaatgataaagtaagttcccagtgttttctccacatatatgacatctttggtctgtgtaatttggagctccatcggtgagacgcttaagagggtgtctaacatgtgcagggtgagtgatctctggtgagtcaaatatgaaggtacatcttgtatgaatcaccaacccgcaacgaaggcagcgatagcccttgctgtcttcgttgccaatcttgtgacaaaagctgcacctatcaaaatatgaaagaccaagcactagaggatggtgatgccacgacatattcagatggaatggggcagatctgtgatcagctatgcaaccaatgtccaaattgagtttgcaatcagagcaatgataaagaaggcgtttggtgtttttaccgcatagatgacatttgggatcggtgtgatcaggagctccggttgtgagaagcttaagacaatgtccatcatgagatgggtggtcgaatatctcttttgccgtgaacacatatacacatttcttgtgaatattaaacttgcattcgctgcatgagtagccaccaacatgcaactgatcgcaagcatcgcattccataccatcaccttggttaacgacggatacaagatgctcgtgtccacgtacattctcagtcatggcgtttgcggttagcagaggtggagagagaagaaagtttatgtttggggtaatagcactttggtttaatgtaataatgaatcaatatagttgttgttcctctatatactctaattatataaatgctacttgctgctgcgttaatattcacgttgacaaatatatagtaagacaacaagtgggcaagtcgttagtctttgtttagtttaaacactaatatcaattgtctcgctcaggttttgtctgccatatgttatagttcgtttatttgaacttctttattaccaagtttgctttcttttttacctgatgataaaagaagattgatttcgttgtatcaatccagatcatagaaggaataagtcaaattcatgacagctaacattgagtcgatgatgataattagtctgtaacagaaatcacactgtttttgtttagtcttctcttgtttctctataaactctaattatatcaacgatacttgttacattaattctatatatgtactctaacacttaacactagaccttaaattgtgtggaatatataaaaaaaaaaaagagaggtaacgatatgttgtctttaggattattgttaaaactagtattaacataaaaattgcatgtattattattaacttatggtttatcagaaaaagttgagtatgcatgataaaatattaacacatttgccattgattaaccacaaacatacaaaaacttaagttagactattgatctttgttcgttgagtacaaaaatatttcatgtcttgctctttttgtttttttgtgaaacttttgttttgtgtatgtaaacatgtctatttttgtattgtatgatatggcataatgatttaattaaactaaaaggggtgactacaatggttcactcctaaaagtagatccaagaattgttcgctaaaaaaagagttaagaaaatagggagaaattgtagtcccgaaccgaagctgcaccgaggcaaggcaagataaatatgatcgtgtgtgatcacgttgaagtcgtcgggtaatgtaaaatgtaagcagactaataactttcgtgaatagtttacaacaagtcaacaacattcaattcaaactcatacaataaaatcatatatatatatcaaaattggctaactctctctatatgggtgacacatcatcacaccagtaagtgccaaaacttagtgataaaaatttagtatcatcatcatcactctctaaattactatcattaaagtataacaaaacttagtgataaaaatttaaaagtttcacattgcattaaattatccactaatctcactcttaacaaaatatcttcatttaaaagaaaaaatacaaaaaatcatgttaatgtatcaaacactactctcattttacttttcttatttttgctatttttataatagtcattatttgataatgactagaaattttcgtgcattacaacttaactgttttgttatttaaccttccttagtttagaaattttaacttagtcttttctttttattacctttttttgtttacatgatatggtctttttgtgtgtttatgataaattggtaacattaatactgacatgcatcttttgttaaatagtgatcttttgagatgttagatataccaaaaagttcaatatacgaccctttctctaatatggatatatgcaaatgaaaaaagaaaaacctaaaagtgttgactcaaaagactatttaatttctgattttttttttttcatgtgaaaacttttaaaacaaatgagtagtttatatatttgttattcaaattatgtcaatccaatatttagccatgagcctatcatgatgtgattggaatactagattaggagagaatacatggaacaagaaattatttgcttagaatcaagttagacaactttcaaaccaaataagtagcataattgcataccattatatcatattgttgatgtaagtatttcatgatagttaaaaaaatttagaaacttgggtatatagataaaaagatttatacatgaaaaaaatataattgatatttgaatcaaaagtgaatctaactatacaaatataattacataaaatgaatataactttattaactacataataacatacacgaaaataacataaattagaaataaaaatagttaaacataattatttttaaacaaatttcaaacaacaacccacgcgtagcgtgggtactcacctaatataaataaaagcacaaaaaccacatatgagtgttcttttttgtttaaagatacatattcttttagagagagccaatcggaaaccaataaatttatatgaaaaacaaaagatacatgggttcttattttagtagctaaacaaattatccggatattgataaaaacaaacttaagactaatacaacatgatagaaaaatggatctcaagaccctaaaacaaaagtgaaattcgccaccaaaataggccacttgatttggctgtagactaaccattgacaagggcaacatatgagttccacactcaaaagttaattaccacctcatcatgtcttgagttctaacttcttaacccatggagggcacatgatatgatagtcgttgctataacgaaatatgacatgttttaaacaataaaaagaacagaagaacacgttgtagccatcatgatcctcgccgtagccaacaaaattaataaaaaaggtacctgggcaacgacatttacagttgagacaaattggtcgtgtagaactactgttaagttgcaattcaaacccctcacagatatttcctcctggtttggcgtacctgatatccccaagtacacataaaatatgcaaagtgaccccgctttctaaaccagtgtagaaccaagtctctggattcgtttctctttcacaaatatcacaccaatatttgccgctcgccttttcaccataacagagagtgagcggatgatcatcgtatctgggaagactgactgttaacggtagtgtggcacaatgaaaatccaaaaaataattgcacttgaggcaacctatgacgactttagtatgatcgatgccacagctctggcaagtcttaaagtggccgtcttgtagtttaaggtagagtaaatgatgaggatgactttcatggataaaaggtacatcaatggaactgcatactaaatcaaacatcacaccatacacaaatccttcagagcaaactagaagacaagcgtcacaccatttagggaagttaccatagtttttccattgagatataactagctgttctgggctcagaaaatgtcgtttcttcttgcgtaaattagcacacgtttcatggagaatgaaactgcaatctgatcttgaacacttgtagaatgtgtaagaactgatgggacgagcacatgctccacaataactgccttcttcaccgtcttttccgaggctcatgaggttatgttcatgagcgaaatgagtgatcgtgttgtcatcattcctcttaaatggctcaatatcttcaacttcttcaggtacttcatcaagctcttttccatcccatacatctttccttgttgcacacagtgaatgaatagcataattaggacaaagagagcatggataagccccatatgaccaatcaatctcttcccaacaaactccacatctccattctccaggaccaagaggatacttgtacgaaatgcgatggtcatggtgattgacatgaatgacacgtggtaattgagcacacttttgatggaaaatcatgaaatcacattgaacacagatgtaaggagaacggtcaccttccgtcccacaagcatcacaaacgaaggagatcaatcttggcatgagtgtgagtgtatgctcatggacctttagatttgaaagagcaattggtggagggctttttgccgcacaccgcagatccaagttgaatttacaaatatcacaatgataaagtaagtgctgagtgtcttctccacatatatgacatcttgggtctgtgtaatttggagctccatcggtgagaagcttaagagggagtctgacatgagaagggtgagtgatctccggtgagtcaaatacggggacacatgtgagatgaatcctaaacccgcactgaaggcagtgacagccaagttcgttaaccccattacaaaattcgcaaatatctgtataacatatttgtataggatggtggtgccatgacacaagcagatggtctttggaagctgcaaatatgtggtgacttatgcaatcaatgtccagattgagtttacagtcagagcaatgataaagaatgctcttggtgtatttaccgcagagatgacaatttgggtcggtgtgatgaggagctccggttgtgagaagtttaagacaatgtccatcatgagaaggatggtcgaatatctccggtatgttgaacaaaaatgcacaaatgtggtgaatagaaaagtcgcattcattgcatatatagccaacaccgtagccaacagcagtccgtcgatcgcaagcagcacactggtgaaaaggagtgttgacgatgaatagatcatgcgcatgtccgcgaaatttaaaaaccgggaaggttgcggtatccatatttatgtttggatagtagcactttggttttgtgttctaatggatcaatatagtcgtgtttctatatactctagttatagcaatgctacttgttacattatcagatactacattaattttgacgttgacatgtctatagtaaattagtaatacaactagtgggcacgtacgtcgttattatttgtttgatttgtatagtaatacaaccatgttagttagtttactacgacttttatttattttcctatctttgcttttcaaactctcatgcaagttttattcctttttttttaattcaataacaagttgtttaattaattaagacaacaaaagtcatgacagctaacattgagcccaacgatgataattgataccttcgagatttttgattagttttctcttgttttgtttcataaaatatattgaaatgactatttaattagatggtatcaaatttgtttaatctttatttaaataaaaattcatatcgaatttgtataattttcttacttttgtctgccccgttagattgtttatttcgacttctttattttatgatctttgctcttcctcttcccaactttgctgctcaataactttagtaatggtttgagcagggcttacctggaaaaaaacaaaaaatgtcatacgaccagttttaaattgattttcaaaggttttaaaaaaagtattattacaaaaagtattagaaaatagatactatcacaaattttccaaaaacatttaagcccaaaattaactatgagattcggggaaatcatgtttgattcgaacccgaatcaatactactcaaagaaagagacagaaacttctttttcttttgccactggactttgacgatttggttataacaaaaataataattaccttgaagatagaaaagaatcaaaccctttaacaaaaaaaaagaagatagaaaaaaattgatttcattagctgtatcaaattcagatcattgatggaagatgtgaaaagtcataacagctaacattgagccgatgatgacacctctgaagattaatcattaaaatataaaatcacgcggtttgtatcagaaaattttgatatgacgaagttttcaaaaacaaatatactgaaggattctctctagctatgtgacatggtggccaccttagaaaaaatatacgagttcagtttgaaagtttcaacatatcaattcgaaaaaaatgcaaaagaaaacaaaaatcccactgatttcgttttcacctaaaaaatttgataaatttttatttagttttaatatttatgtctaagttaagctcttcaatttgtatccgttgtgttatgcaatatcaatgaaaccaaaccggtgcgtgacacgagtaatcgcgtaatgtagttcttcgggcagaaggcagtactgaattgattacacggacatggtaatggttgttctttctccttggtttgacaatgtttagatgaatcttcttcttatgcttcttggctcattccttgactttacatttctcagttctcatataacttctctataatgctgtttaactacgatggccggtccaatgagaagagtttgaatggtccaagcaagccattcatgtgaacattctgaaacaaataaattggttagtggctacttacctaagctggaacgccaatcttcttcctagtaggagtttttgatgtagtgaatatcgaatgttttagtggagccacttcccagatcttcatagtattccaattctcttttgtccagttaaagccattgttagctccttgaaggtgatttagccgtgtagatcccaaatttttgtggtagccaagcataagttgaaagaatatgcggaattgtattaaagattaagagagttatgaagaacaagagagtttgtatgtgagagaatatgagaccaaatcatgttgatagaattagaattgtaacctttgtgtgtttacaatgctttaaagacacacaaagagaatatgaccgtttacaattaacgtaagactgaaagagacataagagaagaggttccttggtcttggtgatgagagtgactggtcattggttgaccttgttgctaaagacactcgtgagtcctcttcaacggctacaagagatatttgtgtgccttcacctcttctagaagctcttcatagacttctcatatgttcggcccactctcttgtagtacatatccaatactaggcctttcttatttgagtcttgatcaatataagtatcctcggctccattagtactcagctttaaactcagaatctcctgctctaagtcaagtaaggcttctcttattttctccctgtcccaatcacaagttacaggggatatgaggtctgacatcataaaggcatgactgtggaaaggtccaggtttgttggggaaacacataatcttatgatcatgttttcgtcaagtggtgtacactgtacgtaacgatatataaacgattttcaattgaatcattttttggtgaatagtcatcatagcaacaatcaatagaaatttaaaaataattcaatacaaggtcataagaatacaaagataaaatctaaaaatcaacggccaagtattggtgttagctttgatctctaccaaagcttttagagtaagaacacaataacactttgtttggcaattaagattgccttttttttttagaaacagacaaaacaggaagcaaagtggagtcgtagctccaacaactacaagcaaggaaaatatgaacgagatggctctgatcctaaacataaggagaacagattctcatcttatttctaattgaagcaaataacataattaaactaaaaaagaaagaaaacacaaatcagtttactggtcgttttgcaactccatcaattggctttgatgtccacttctccaaggaggacatctcaacttaattttggagtactccttcttacttttggtgattatgtaacaataataagaacaaaagaatatgtaatattctccaccaagatgggcgtcatgttgctttcttatcctaagaatgaaggggcctgggcagcgacaatagcagttgtggcaaaatggtcttgaagagctattgtttgacagcaattctatatagtactcgatcattgcttttggtttggcgtatctaacatctccaactacacacaaaacatgtaaagtgaccccgcaatcgttacaagtgtagaaccaagtttttggattggtctctctttcacaaatatcacaccaatatttgccgcttgctttttcgtcaccataacaaagagtgagtggatgatcatcgtacctggaaagtgttaccgttaatggtagagtggcacagcggaaatccaaaaaataattgcatttggtacaacctatggcgactcttttttcatcgataccgcaaccctggcaagtcttcacgttaccgttttctagtttgaggtagagtaaatgatgatcatgacttccatggataaaaggcacagtaattgaactgcatggtaagtcaaagttctcttctaaatacgacgagtagatgaatcctttgcaaaaaatttgctgacaagcttcgcaaatttctactccccaacggcgttgaaggcgatgatagctaagagtcagtggttgtgggctcagaaaatgtcgcttcttcatcggaagattagcacatgtttcatgaagaatgaaactgcattctgaacacttgtagagtgaggaagaagaaccgatgggatgagcacatgctttacagaagctactttcttcaccacctttgtcgaggctcatgtggttatgtcgatgagagaaatgatcgattgtgttgtcatcattcctcttgaatggctcgatgtcttcaatttcttcaggtactccatcaagctcttccccatcccacacgtcatctcttgttgcacatagtgaatgaatagcataacgagaacaaagagaacatgagtaagccccgtatgaccaatcaatctcatcccaacaaactccacatctccaatctccaggaccaagaggatacttgaaggaaactcggtggtcatggtgattgacatgaatgacacgtggtaaacgagcacacttttgatggaaggtcatgaaatcacattgtacacatatgtaaggagaacgatcgccttttgttccacaagcatcacaaacgaaggagatcaattttggcatgagtgtgagtgtatgctcatggaccttcatatttgaaagagcaacgggtggagagctttttatcgcacactgcaaatccaaattgaacttacaaatatcacaatgataaagtaagtttccagtgtcctctccacatatatgacatcttgggtttgtgtaatttggagctccactggtgagaagcttaagagggtgcctgacatgagaagggtgttgagtgatctcttgtaattcaactacacatttctcatgaatcctcaacccgcaacgatagcagaggtaaccttgtccttcataattctcgttacaaaagtcgcaccaatttctagatccaaaatcaaaacatagtagaggatgggggtgccatggcatattcagatattctgggcctaataggtgatcagctatgcaaaaaatgtccaaattgagttgacaaacagagcaatgaaaaagaaggcgcttggtgttattaccgcagagatgacattttggatctgtgtgatcaggagctccagttgtaagaagcttaagagaatgtccatcatgagaagggtggtcgactatctcttgtttatcgaacacaaatgtacatgctacatgaatattaaacttgcattcgctgcatgaatagccatcaacattcaatcgatcacaagcatcgcattccagaccatcatgatgtttaacgcgggaaacaagatgctcgtgtccttctaactcttctaactcataagtcatggcggatgcggttagcagagacgaagaggatgcaaaataatgtttgggggtaatagaacttcggtttcatgtaataatggatcaatatagttgtttctttatatactctaaataaatcaatgctacttgttacattatcatatatgactttgacaaatatatatcagtacaactagtgggcacatggctggtctttgtttagtttaaacactaatatcgattgtcccactcaggttttgtctgccatattagtttatttacttggaccttttatattcttacctttcctctttcaccgctcaacacgtaaatcgagtagttttgtctgccagctaccgttttgaacattgcatacaacaataaaatattttgttctacaaaagttataattagggttattacttaaaagtaaaaaaaaacatgttatatcatagagtgtcttttccaagttgtgaaataagttcaaatttaacagattcgttttaaacaaaaaaaaaaaaagaacaaacaaactgattttgctcttgattaggtggagtttggtgcggttaatatagtaagtgcatataatttctaatgaaaatttgctcacttttgtacactaactctctcatgtttcattatgttgaacccttctcgagagggttctcatacccaaattgaaaaacaatacttgttagtttctaagaaataatgatcttatatattagaattatatttgaaatgggtttatatagtcttacaagacatagaaatacaaaaaacaaagataacaaagttaacttatctaacgcggctcaattcgtacaacttcgccttattcaccaaatcaacaacaaaacaaacaatgatgtagtctcaagagactaattcttcaatcatccggccggattactcgagttataactccaacaacaccaacacacatgagatagccccttgaattttggtctcttacctctgggttcacatgtgcaaccttctaaactctttgctaatctgggagaaggaggatttttccaaaattcgtctaaacatatattattactgttaggcccacatgttccattaccctccaccttacggtcacatattcttatcgttcgtcctgttcataatatgaaaagagaaaactttttagaacaaggtttttagcatttaaagtaaacatctaatactaccaaaatattaaaagtttatgtttaaattaaaaaccaccatttcttaaagaaagaatcacaatttcctatcttagccttaaaatctatataaaaaaacacagtgttaaaatctatattaaaacatagtgtttaaatctatataaaaaaaaatctatataaaagaaatatacctttaacaaggtttgtttggaggaatatgagaaaacagaaaactataaatgaagtagtatatctcattattaaaaaaatataataaaaatttaggcatctaacttgcaaaaacttgttgaaatcttattaaatatacttcacacaaactaaaaatagatataatttttttaccaaattaaagagaaccctaaaaatggaaaagaaatgtggtagaaaaaaaagtcaactagagagaaaagattgatggtctattttatacttttccatatttttaataattattttgtttgtataataatattaattttaaaacttctatcttctttctattggtcacaaacaaaaaggaacaataataatgacacaaaacatcaatcttggtggaacaaaaataaatacctacaacatcaattttcatggatcagatggagtagtaaacttttcttgataacattgttttataaaaacatttatagtatattgtacaaactgatggtatttcaaaagtttttgttaaatttatgttgttagtagaaaatgttatttttatcgacttaacattcaatgatagaataatttggttttcttgcattaattatttttcttttactaaagattattggttcttacatattaatataagatttcaaatgttatatcgatttgattaaacggttacattttatttaaaatatatttttttagtaatgaaaaataatgatttatggaaacttacactaagagatgttattgcagataattaaatgttttaacgattataaattggaaatcacgcaaatgtccgatttttttggttttcggaatcggtgtttcgttctaggactctgctcgtgggtttttgcttgtgctcccattgtttgtattgtgttgtaattttgttatttttttattagattttggtcttttcaactatttgtatgtctttgtaatttccgtcaaaaaattacgagaatggtataaatcttcacattgttaacaaaaaaaaaagtttattttgaagcatcttctcacagcaatgcttctacgcagcttcctgttttctgtttccctgttttcttcatcatggtccaactttttgtacatatataatctcttttgttgacttataaatttagcatttcaacccaagaaaaaaaaagcaaaaatgagtttcaaactctaacattaactgccacctgatggatagtgatgttggaactgtttgtttaagtctatttgttgaaacaacgaatatgatagtataaattttgaatatgacataaaagaatgatagtataggctacaatcaacagaaacactatttgaaaagatgaaagtttgggataagttgcataagcaagtgtcatatattggtgaagagtcatatatatactaccaacactcaatacaaactcataagaaaaatacaaaaataaaatctaatagatgattttcaaacttgaacatcaacagccaagtattggtgttaactttgatcttaaccaaagctttatagcaaaaacacaatgacacttttgtctagcaattaagattgccttattttttagctttttcattttttagaaacagacaaaacaggaagcaagaaaaatgagtggaagagatggctcctaaacataaggagaaccgattctcctcttatttctaacggaagcaaataacataacaaaaaaaaaaaaaaaaaaaaaaaaaaaaaaaaaaagaaagaaagaaagaaagagaaagaaaacataaatcatctatttctcacttatgttcgacgtactagttttattgatggttttgctactccatcaattggatttgatttccaattgtccaaggaggacttctcaacttaattttggagacctccctttcggcgtaccccgagattatgaaacaataataagaacaaaagaatttgacttctctccttttttcactgtagccccacttttctgccctaagaatgaaggaacctgggcaacggcaatggcagttgtggcaaagtggtcgtgaagagctattgttagacagcaaactgttatcatcatagataatatgtttcccttctttggcgtatatgatatctccaactacgcaaaagacatgtaaagtgatcccgcaatctttacaagtgtagaaccaagtctttggatttgtttctctttcgcaaatatcacaccaatattttccgcttgccttttcctcaccataacatagagtgagtggatgatcatcgtacctgggtagcgttactgttaatggtagagtggcacaacggaaatccaaaaagtaatcacatttcatacaacctatgacaacttctgtttcatccatgccgcagctctggcaagtcttcacgtcaccgaatcgttgtttgaggtagagtaaatgatgatcgtgacttccatggattaatggcacggtaattgaactgcaaaatatgtccaaggattttcttaaatatgtagagtaactaaatccgtggaaaaaaacttgatgacaagcttcgcaagaatatgggaggaggtaactttcgaggcaaagcgtcaaaggttgtgggctcagaaaatgccgtttcttcttacgtagattagcacacgtttcatggagaatgaaactgcatttcgattctaaacacttgtagaatgtgcaagaacctatgggacaaacacatcctccacacaagctactttcttcaccaccttgaccgaggctcgtgaggttatgttcatgagcaaaatgagtgattgtgttgtcatcatttctcttgaatggttcgatatattcaaccttttccggtactctattaagctctttcccatcccatacgtctctccttgttgcacatagtgaatgaatagcataacgaggacaaacagaacaagaataagccccatatgaccaatcaatctcttcccaacaaactccacatctccattctccaggaccaagcggatatttgaaggaaacgcggtggtcatggtgattgacgtttataacctgtggtaaacgagcacacttttgatggaagatcatgaaatcacattgaacacagatgtaaggagaacgatcgcctttcgtcccacaagcatcacacacgaaggagatcaattttggcatgtgtgagtgtatgcttatggatcttcatatttgatagagaaactggtggagggccttcagtcgcgcaatccagatccaagctgaacttacatatatcacaatgatatagtaagttcccagtagtgcctccacatatatcacaacttcggtccgtataatctggagctccactggagataagcttaagagggtgtctgacatgagaagggtgaataatctctggtgattcaaatacagagacacatccctcatgaatcaccaacctgcaacgagggcagcaatatccatgtttgctagtaccatgacaaaagtcgcatgacataagagaagcttttaagtcaaccatcagtaggggatggtggtgccactccatattcagatcagatcgagcacacaaggaatcaattatgcaatcgatatccaaattgactttacaatcatagcaatgatagagaaggcgcttcgtgtttttaccgcatagatggcatttcgggtctgtgtgatcaggagctccggttgtcagaaactcaagactatgcccatcatgagaagggtggttgattctcgcttgtatgttgaacacgaatacacatttcttgtgtatcgtaaacttgcattcaccacatgagtagccatcaccgtaggatcgattgcaagcatcgcattcaaaaccttcgttaacgtcggatacacgatgctcgtgtccttctagcacataagtcatggctgttgcggttagcagagatggagagaatgcaaatttattgttggaataaaatcactttggttttgtgtaataataatggatcaatatagttgttcatttatattatcatatctgacgttaacgttgacaactagtgggcacgtcgctaccattcgtttaatttaagcactatttagtattgattgtcccgctaagtttgtgtatgtcatgttaatttgtttatttcaaatttaattaaataacaaaaaaatgttgccctcaaggtaaaagaagatttgatatcattataatgggaaatctgtttttttatactttcataattgtactatgtttaaatttatacctaaattatatcgttgtttagaatatatctcagaagataatgtgtatgcaggatttcgtatacagatcctcgaaagagagtgataagttttcaggattatgatggttttatacatcatcaaatgacgaaacatcaagtatgggcgctgttaatctccgtagaagtctctcctactccatcaaaagtcgaagctcttctttgggcgatgaagtgtatgatcggtgcagataatcaagatgtagcgttctttacagactgttcaaacctggtgaagatggtgtcttccccaactgaatagccagcattttcaaaataaaaggaatttctgagcgacaaggatgagttttcatacttctctttatctttattctcttgaaagagaatcgcaaatgtaaaaataaataatttggcacggaaaatccgttctgagccgcatcaaattatctatgtaaacaatatttcacataaataactcttttgagtttttattaaaagcagatgacaaaaaaaaatgagatatctctcgatattaatcaatcgattaaagaaataaactgagtttgtgcttcaatagaatttgaggctcgtgttttagttctagggaagtgaaactacatcactttaagaaagaaaaaactcggtgggtacccaaaattttttatagggtaaatccgagtaaaattatattttttttgggtatccacctattttaaatctgttttttttttaatacaaaaaacaagtctcatgcatgtttaataataaacatatattttgggtatccatcggattttaacccagttttaacaatcctaaatatagacatttatataaaaaaaatttaaattaaaacatgaacaaaaataaaatacaaaatccgaagaaccataaatacttatattgaaacaaaattatacaaaagctatatgcagtgtaaactatttattagatttacctcatacatgttgttctctaaaaaccaattgatatcaaacaactttttcaaaaataaagaggataaaattttttttgtaaatattgaattataaaacagagtaatttatattttgttatataaagttgtactcagtgtgtatactatttgtttaaatttgattggttgtttttctaaaaataatgtgttttaataaataaaatatttatgtggtaggaaagctgatatggtaaactgaagcacgttgatttgtatgaatgaaaatgttttctattgatgataattaaaatgagatgtcaacttgaaaaaaccatactgtattgattcctattttaatatttgttagtctttgtttaatttaaacgctaatatcgaagtttggcctgccatgttagttagtttactttgacttattcatttttgtatctttgctcttctaagaactctcaatagacaagttttctttctttctttttaattaaataatagaaaatcattacactgaagataaaagaaatatttatttcagcagttgtatgaatcttgatcattgaaggaagaagtcaatgtcatgacagctaacattgagccgtcgataacacattcgagattagtcattaaataaagaccatggtgtgtgctataataatgttaagaacggtattaaacggtgtgcttaataattggcttttttgtgggttaacttatattttacacgaatatactattgggccttaagtatttagttatcggcccataagcatttaacgataacgggagtttggtgaatccgaagctaatctctaaaatctttcagtttcgagatccaaagtcactcacttttttctgaaattcgctactcagaattttcccgctccactgcatctctacggcgaatggactcaccgatgtcaacgagttccatagacggagacgaagattgggaatgttacgaagacgatggcttcgtttacaatcgaaaaaagcgaacccgtttcgccgacgctgaagaaacatcaaaaccgccggatccggagttagatcgggtggtagaagagaggaatcgaaggatacggaagaagagattactggtgaagctcaaaagaaagtaccagagtgagatcgaccagtgggagattttatcgaatagtttcaatgctatgcaagagaaagcagatcgatttcaaacggcgcaaagagaagagaggttaaatgcgaacgaaacgatgtcgtttcctgggaattcttcctctacaacagaaggaggccgagaatttggcggagaagatgcttctaagtcgccgtcgtctatgctcgaccaacttctttttacggtaattagggtttggactcaattcgatgaaagttttgaaattggttcgtttttgaaatttgaattttgaaattttgcaggtggaaagacaagaagcggtaatcaacgaagtctcaaagctatgtgaagttacagagaacatatgtagagtggaagaagaagaaacgaagcagtccttctttgatcttcccatatggagctcaccaacggatctaatggcatcgctttgtggtgattaacacttaaattagtcctcttatgtggtttatctgagctctctacttatgtttactttgtacaatgcgtgtgtgttgtgttttgttgcaattgtagagtgattttgtgtgttaggctcgaattagggggtgttctatccggattttagtcagttatatcctcaattttcaaaaaaagcttcagttttatactggtttttccggtacggtttcgggttcggggtttggatatagatatgggttcaggtaagtttgtcttagattgaatccttcctatgctcaagaattatgtatctatttttgccatacctcggattctataaatcatgaatattttgaaggcaaacactaattgaactgagtacttgtttgattgtttcaacaaaatatgaaaagcataacaacctgcagtaacttaaaaccacattgtgtttcattgttaagatgtgtatgtttcaagcaatctaagaagtttggtagataaattaaagagttataactaaaagattaagcaaagagaattgtcaaatatcgaaataaatcacccaagactgtacaagttccattccctgatgagagagcattttagaggatataaaatctctacaacttgttcaatggtcagtcttcttcagattccgcttgagcttctgattcgtctccaatatcctctaaaagcttatcaacatcaactcctaattctatcagcttcgcgcttagtttctcgactttgctttcctcttgtcccaaacatactaacaagtcatttaactcgtcttcgctctctttctgagcttcttttctcacttcttccttgatggcttctatatcaggaaactgcatgggactctctcctcctttcaaggatttcacttcctgctcaagatggtaattcgcctgttctagactgttgtatgcatccgataagctttttaggtcgaactcaagttttgcagccatgttcttgttacttgatgcctcagactcgatcttggctttttcagccttcactgtctctaaacgctgagatgtttcttggagttctcgtctgatgctttccatctgaactttgtccattactgtacttgctctttgctctgatccttgagattgctcgttcctgccagagctagctacgtcttctgccaaagcagcgtttcgagcaagaaggttctgtaaaacacagaggtcacaacaacaagaagctctgtcaggaacaactgatgttgagatttcttttttgaacggttaacctcaacatatatttatcacatcaattcagagacctattgtctgaatattgtttgatatccagctgagaacataagaccaattctaaatagtcccatcttagccaaaacttagtgcttcctatattccgtttcagcaataagcaatgcttcctaatacccatatttttagttgaaccccctgaacttttcatctatttttaaatttcatgttacttgtgatgaatctcaagatttgtcttcttttaattgcaatcaacaccaaaatagtatatattttcagatatgctaacagtattatactcagtagcatagacagttctgaagagggacatacctgaatctccgagcactgtttctctataaaggctttcaagcggttgatgtagtctttctcattttctccgctcttctgctccaaatctgctggtactacagccacctcactttttggccgactatacacatccacgattctttctctgatgttaccttccaagctcttcactaagcctatgaaactagcatcaaacaaagataagagcattgggtgatcctcattccctttaaccatttcatctacctcatccacctcattaatctcggcttcactcggcgtgggtgttcttgtcaacggtttataaccctgtggaggtttcttggagggagagaagatgaagctgttctgcatctcttcaaactttgagaagtatgatgtcagccccatcttctggcccacagcatcaactacagaaaaagcatctttaccattctcaattgatttattgtaaatgacgcattctcccaatagaatagacgccaatccccttatgcaaactgttgcagctgggtctgttaccagctcgagcaaaaacgttaggtggtggcgggaatctaaaaagcactgaactgcagtcggacaatcaacagtccatgtcaccagcagttttaaaatgatctgttgaatatatgatttccccagtgtgcttgatttctctttgcttttcatggaagaagcaacagccaggtatctgacaatcctctgaaagagaggctctggagttcccatggacggcatcggtgattcaagtacgattttcaaagcctattgagtttcccaaaaagtcagtcaatgcaggaaaaacaaaaatattgcgtacagaaaataagtttaaagtgatgactttgttaccttttccttgcaccgaagattgtccttgacaacatgagaaagaatgcttgcagctctgcaacatgtctgtttttaagaagtaaaaaaataactgtaagttccggaatgcttttaaattaatatccaacagagagaaacaattttacctcaagatcaccatcagcttcaccagaacaaaggcctcgtaacaacatactgacacatatagaaaaaaagttggataagttttaatacaagagaagtaggtcaaagttggaggaccatgcaaactcgcaatgagaatgaagagtgagatcccttcaaaacaacactgcgaaagccgcagaagaaagaaaagaagatggaaccttccaaatgacatgtgaacatcatcttctagatgatctcgggatgtgggatgtggttgaggtattaaagtcgaagctagcattgtttgaccctcagtatttttctgaaaacgtttagtgaatgagattctagataaagatccaatcacatactatattagaagaagcaatatcacattagactatgaactaaaaatctataggaaaaaaagtttcaaacctcacagaatgtcttgaaaacgtaatcagctgcaacaaactcttgaatactggacgtctgtaaaatgatccggaggatagaattgagtgcaggttctacttgccgatcttcaccaagaactttgctagcaaggatatcacggttcttaggatgtccatcaattagatctccaatgcatttaaatgtctagcagcaaagaatcacaatgcaaaagaccagttagaaaaaaacatcaataaaatacttgcttcagacaactgttcagcaattggctaaaaagaaagtgcaacaatctctagaaaaaaactgctaatagatcactgtaagtatatcagttcccatggtcaacctagaaacaatgttcaacagctgaattctagaatctgaatgaaactattccaacttattgacagttgcgcaaatcaggaatgaaatttcgatatacaatgaaatatgaatactaacaaaaaaagggaaggggctaaggaagaagatttcgaataaagatgatttgcttaccatgcagcgaacagcaacaggcgcccattggctttcaacacccaacatcagtaggtagtctagcagttttttctgttattggatcaaatatgatagaataagaaacatattcgatcctgtccacaataaggaatcataacatttgaatatcataacaaacctgaactaaaactgttcgatttgccagcttgtttgaatcttttccaggctccgtgtctgcacgtcccatgatcagcatattgatggtctccagtgcactaagcagattaacagtctactgggaatttgttcattcagaaggacaaagattaacaaaattgcacaagctggtaaaataaatccataatgggagaagcactctatgatctaaccttttgctgggtgaacttatatgtaatccctcgcagttttagaattgaaatgataggttcaaaacccatggtttcccttagtaatatctgtataagttcaaatattagcatatgttggatctagtaaattaatcagaaaaatcaagaccagaaacaaagcttcaaaacctggttagatgaactgctgcgaagaagattgttcaacaactccagacagtcctgtatataaagaacaagattagtgcaagtgcacgggcaaggaatttgaagtttagcataagcaggcaatcccaaagtatgctgacatatggaaatgtaaaagccaataatgtttaggcctaaataggagaatgggttcttcatttatcctttttatatgccaaatttttaacagattacaagtgctataaatatttttaaaagagcaactggtcacctgcacaaccacatcgccatctgaccccccttcctccttaatgatgctaaaaatcttttcaaaagcaccttcaaagacaacaattttttggatctcctacaaatgtaaaattgatcgatcaatggctgccctcggctcaaggcagaagaaaaggaacagttacaaatataaccaggaggtctcacctctgcttcacgagtcaagtgcgtaagaagcaacaaagcctcgttccggattacctataaggcatacaccaaaaaaaaaattacaaacatgatattgttcccttccagagtttaccgtctcataacctcctatttgaggttgacaggaggttaaagaggtcagagtcttacgtaaacaatggaaagatcatacatatccaataaataattaattatttacctctctatccattagcatatccatgagccgagtaataccgcgaggagtggtcaaaatagcttcctgcaacctgaagagacagtcagcaacagtctctatagcatacagatagaaaaatgacacagagatagtacatcctaagatacatacctgttttgagagttcataagcagagctgtcaaaatctgaagagtgtaatatcgaacataaaagtcttcttcctcctgtcataccaccaggaaaattaaccataggatgcacacataaaaaacaaacaaaactaaaaaataactttttctatttcgaaaatattgagtaaactctaaccagcaaactcaaaagaagagtgatattttcagcttcacgggagagcaagtcggagttcataagagctgcctggacttcagtcttctgtgcccttgcatgatcgattggcgttagagcgccaagaagagtttctaaagcacctcgaacctggacagtcaacaaaattataagtctaaggcacctcgaacctggacagtcaacaaaaatataagttgaagaaaagcacaaaacggtaacattaacaagaaattcaatggataatcccaaagtaaaacaacaagagatttataagtgcaactttcatggttaagaatctacactagaccagaatccatactgaaggaaatttacaacattttcctttccaattgattttcccctggacttgtggacctattctgattctgaattatacatcgctacactattagcaaggactacgaaaagtagaattacaaatgctactcacccaaaactactttgtttggagcaaaaaaaaaaaatccatctttaacaaactttgcttcaacgatttttaccacattttccataaagtgaggacaagagattgtgctatgacgtaaggacaaacagcactatgcacaaactgagagagaacaaaagaaatatggaaaaaaaaaataagggtacagcaccatttcaagatcatctcgttgatcctttaggatgcccactatcacaggaaatcctgaaatgacagaatgtaaattgtaactttagattttatctcacaatcaatcagacacataacataaaacagaaagacacataccggctgctccaaaagctaattgagcagcattactttctgcgacaacagactgaagttctactatagcagttctcctatcgtcaggcaaggtaccattacttatacgatccagcaggcgttgaatgtaactacaaaaatacaccaaataaaaatccaatcctcattacttcatttctcgacatacttacgagccatgatagcctatatctcccgactcatggcaaagaaaagagaagaaaatgtacctgtcttcattagaagattgattgtcgccaaaaaccattccaacaaccccctgtaaaagttcgtaaaacaagttaaaaacaccgggaaactttaataatgctgctgttaaaatgccatggaaatatagtataaagctctctgccatcctcatgattagtaaactaccagtcactctttctacaccattgagaaactactaaaattcatattggaatcaacaccgagcaaatgcaaaacagactcctctcaacaaatacagctattcgaaaacacggaaacaagaaggaaacatgcattcgatccaaaacagaatttaatcaccctgaaaacctgacagctgaaattaagctcacaatcgaagaaagatattcaccttataacgggatgccaaatccatatctcgttatagccaataaaatcacctgaaacaacaaaaatcaagaaattttcaaccaaaattgaaatagcaacaacacaaaccagtacaaaaacggagaatcaaactacaaaaccctagaactccgaaatttatcacagagagggaaaacagaaattgaaaatggcgagaatcgaacagcttacacagactatgttgataagaacaagatcaaaacaaggaagaagaatcctccaggcaatggaaccgtgatagatcgcagcgatctcttcttcacagagtctctcgtgtttttcacctgaccgatctattcaagcaaagtcagaagagctgataaaccgttcgattcgtcacgatgatattgttttttttcttctttaatggtcgaagaggaagattgataacgtattatactcatgcccgcaccagataactagctcttgtgagattacaggatgcttgaatatgggcccatttaggtccagtgggcttttatggcatagccagtaaaactgtggaggtttattttttgtggattgtgttatgctcatagactttagtcatcggtgttcggttatcagttttttcggttctaaaatttagtatccatttgattattttgaaatttttgtttggtttcaattcgattctgtttttttcggtttttaaatttagtatgcattcggttattttatttcgtatattttcgtatatttcggttatttttgaatattttcagtgatttttgagtatttttacttatatatattctcaagtatttttttattatttagtttaaaaataactaatacttttaaaaatataattatattttagatatttttggttatccaaaatattcggttcggtaccgattcggtttcgaatttttagttatttttaaatttttggttcagttgtttctgtttatttgccaaggcctactcgtaatgttttcaacacaaatcttggcaaatattaataactagatgagtatccgcaccacgtgcgggctttcactttatatttcgtaatttaaaagtatttaaatataaaatttaggttatttttttaataggcaagaagacagaattcctatttgatactaagctccataaatcatcattttttttttgcattttgcatttaaattcctaacaaaatattttcttagtaaacattattttcagattttttttcatttgtgtcaaccttaaaccaaaaaaaaaaaagacaaaatgcaaagaagatcggagtacccgctctgaaattcattgtggtagtatttaagtaggaaaattaagcattgattatcgggctgtcgtttcgtttaaataaaaagagttattaagttatagtaaatagacaaatagaaccaaaccttgataagccttattgattttttgaaacataaatgtaaaataattttcttcttttaattttcattgttgccacttttgcaaaaacaaaacaaaataatacgaagtccataaccgaaaaactctatcagtgaggatttgagtccaagaatttgatgctagagttctcaagtacttctcaccatttttaatatattctatagaaaaagaacaacctacggaaactattagctaatccactataaaattatttaatcatattttgacttaaaatgataaaatttaggggaaaatatccaagagtatgagaatcaattaaataatttaatttaagaaaaaaaacatacaaaataaaagaaaattattattcatacaattaattatgtaaaaatttataatatatataaataaataataaatcaccataaacaattaacttacattaattattaagtggacatgtggcaaaagctaagtgatgatgtgtcattcatataaagagagttggccaactttcatatatatgattacaccacatatagataatttataaacttatgatctttatatatacaatttttataaaattacctacatatttgttattattagttaatttgttattctagatgaacactcatgctatgcatgggtttttatttttaaaattgttggaatatatgattatggtcttttgttgattttgatgttcatttgtgtgtgtgttaatttgtaattaataaattcatatctattttatatagttataagtttttatgattaaatttatctataatttgaaatattaattttactataatatgaatatttatatacctattattcaaatatttcactatcatgaacacatacaacaaaattatatgatatattaatatgtagttatattacttatgtattttgaaacttgtctaatttaattttaacaaataattctttattccatatattttttcgtcatctagtacaccaaccacatcatgatatgctagtaatttaagtcaacactttaattttcttcccttgcaaatagccatatagagtctcgtattttgtgtggatatgtctaatgtctcagatgaccattacgtgaaaaaattgtatatcaatgttatcaagttatcagaccgcacaaaaataaacagaaagaatgtcatataataaatcatattcacataacgtaataataagaaaatatccaactaaaattactaaattaatatgaggttagatcgcaaacatctaaactacaacacacgtaaatttttagccattatggattaataactattgataaacaaaactcaaacaataagtaaaatagaatgaaagtagtacttaatacattattatgatttttatttattgaatgtttttaaaaaaatcattttaaaagtgagattaatagagaatttaacacagcaaaagacttttgattttccctcaattagatttaatgatttttttatttaattaatgtagaataacacatatcattttcttgtgtgatgatgtgtcactcatatagagaaaagagttgaccaactttcacatatatgattaataataataatagccacctgacagaaaatattaaaatttacgtcttagcatagtcaacaaaattcaatattcaagaaagcaagatttgaattgaaccaatcaataaaaactaaggtggagttagaatcgtagattaattattcactcgcttacttctattagttctatatgaaaaaaaaaaaatgcaaaataatataacaatgataatggtctaataagacgtcgttaatccgtgtgtaatataatggtcgaagatattttagcgtaaactcatagagattttagattttattcgaacaaagatgatatatagttgtaattacctagacttgaggccgaatgtttttacctgtcataggtttacggaatactcatgcctatacattatttcttcgctcttggatgaataggatttaacccggatacttatgctaattaaccaaaagagaaagaagaagacatcgttagtgacagagacttaacaaaagacatatttagatgatgtgtttaccattggcacgtaaagtctatgcttacgtatttgtatccaatgcgtcactttagatgttattttatgagttgattggacgaatatatggtggtcgaaatcaaagaaatggtatatgtaagaaaagttatatccacaatattcattgttgacaaggctaactagtcgtttttaaatgtaatataacgatcaatagacgtaattgtttaaaaatatatatgttagtctataataatcatttcaatttgcataaatacggaatcttgaaaagattaaatttactagtttataacttctaatatttaacaaattttgaaatttatcaaccttgtcgagtttttggatgtaacttgcttcaagttttttagcttgttacaaaacctattgcaaattttcacacaagacactaatgaaagaaagttaaaagtttggaacatgtttaggccaagcctaaacgataacaatcacaactaattatatagtgacgggaataaaagaatatgctttgatgaaaatgaagtctccaaataaatccaatatgagtggtaatacatcgctggggtctggggatgaggcatgttcgttgcacgtcttggagtctcttaattaatatttttattaagaagatacactttgaaagtaatgtactatataaagttacatcatccacatgtgttatgtgtaaacatgtaattggattatttagattgattctatattgcttttactttttctatcagttaggccataaacgacgacgacaagattgcacatgtcttttgcaaatattcaactatagtaagaacttgtaccacacaaatatgtgtgatgttcagtttggtagatttttcatattctagtccttgtctacataatgacaacctcggttttgtttgtatgaacgacccatcgatatatatatacattatatacatgatggatggttgatttatttatgcaacataaatgatttaattttgaaagaacatttgtagttaaacttaaagcaatttgaatttgacagtttatatttttactaaatttgaaacagtgagcgacgtgcaataaaaaatttagacaacgattaagatcatctccaatggttcgtaactttgcattttaacaatgattaaaattaaaattttggaacatgacacataactgtttttattacttataaaaaaactcttaactaagaagcaaatcttagtttttaatctgttttaatttatttttcagaatttaattctaagatattagcctaagttacacttaaagatacattatgggaagtgctttaatattttagagtttatggatttgtaaacagtaaactcatagaatacttacatactatgttttaataaaatttgcattgtggtgaaccggatcatccaaacaaggccgtaatcaattaactcataagcaacgctccaaattccaaacataaatctattctaaatctctgcaaatttacgtcttggagacctaggttatcatcattccatccaaccactatagcagagctagcaaagtatatatgatattttctctaccaaaagcatttgaaccaagtgcctccaagcataaaatgcaagagtaccactagaatacaagcctgttgaattaaaatccatggtacacatgattttcttgatttcttttttgctaaacaagataagataacttttattttataactatagtatagaagatgctttcgttttacaatgtcgaacaataaaacatgttggtggtcgctatcgctattgctaactattgttgtgaagcgaagacgacctaattaaaaccacataaaccaaagtaccaaagctactacagcctgtctggaaaacaaacgagacgacgtcgttttccaagttaaaatcgtaaaacggcgagaaaacggctggtcgtcacttcacgatgcgttggcacttaccgttaaaacaaaaacgtcgagtcacgtttgcaaaacccgacgcgtcaactaaacttcaaccgtaggatttctttacttaaaaatccaacggtttcaacgcgtttctaaaatctgaaacgctgaaacggaaagtttcttcgtaaagtcccgattctattttttttcctgtggagaacattaaaaacgaaatctagtgtttatttatctatctatcgccttttgtcttttcgtattacgagattcccattacttctaaatttcattcattcttttttttttctttcttccacacagattcgtaacgagttcttcattttcatatatctccgtttctgggttttttttttccctttcaagtttcaattttttcttctgggtttttaatttggtgatcaaacgtttgcattagacgaatcatgtccgatggatacatcaattcgaagaagactgatgatatttgcgaagatgtttgtggacaggtttgattcttaaagatatatttttttacacacttgaaaaatcatgtttttttttctttctgaaaaaaaaaattgtaactttttgaagaatttaatcttgagagttttttttttctctgaaagaaatgatttttaattggtcagattgttttctgttgcttgaaaagatctttgaatttttgttaatttgttccatctcttatgaattgttttttattattttgtagggatcaaaagcagcaaaaacaatctcaaggctaaaatgtgtgcttaaaggttttgatttaagaacatacttgttcctctttgtgttgatgccatttggtatcttagcaatttatctacacggccaaaagttcacttatttctttagacctctttgggaatcacctccgaagccatttcaaaccattcctcattactataatgagaatgttactatggaatctctctgtagtcttcatggttggggaattagagactcgcccagacgggttttcgacgcggttttgtttagtaatgagaaagatcttttaactgttagatggaatgagctttatccttacgtgacacagtttgtgattcttgaatctaattctacgtttactggtttgcctaaaccattggtgtttaagagtaataaggatcagtttaagtttgtggagccgcggctaacttatgggacgattggtggacggtttaggaaaggcgagaatccgtttgtcgaagaagcgtatcagcgagttgcgttggatcagttgcttaggattgctggtattcaagaagatgatttgttgataatgtctgatgttgatgagattcctagtgctcatactatcaatcttttgagatggtgtgatgatattcctccagttcttcaccttcagttgaagaattatttgtattctttcgaatactatgtcgatagcaagagctggagagcgtctatacaccgttacagtccagggaaaacgcggtatgctcatttccgtcagagtaatgttatgttagctgattctggatggcattgtagcttctgtttccgttatataagtgagtttatattcaagatgaaagcttatagtcattcagaccgtgtcagattctctcattacctgaatccaaggaggattcaagatgttatttgcaaaggaactgatttgtttgatatgttacctgaagaatacacattcaaggagattataggcaaaatgggacctgtacctcggtcttattcagcggttcatcttccttcgtacctactgtataacgccgagcagtacaaatacttgttgcctggtaattgcataagagaaaaacagacagggtttatatgatgattgcttttaaagtgttcttgtatagttctaagcttcagggcctttgcatcattcttgagataaaaagagcaaaattttgcgcgaaagagaggatattgaagaacgtagccaagaagcgtatataacccgattgctggatatttttgcgatacaggagggtttgtgagaacaaaaagagcttactatgagttagagcagcacaacaattctcaggtttttttaacaatgggaaaaaatgttgttgcctaaggctgatttggtagtatagatgtttcagtatccatttgtttatataacaattttcttcgcggttcgttgttctgagtttagttctggttatacagttgcttgattattcttattctgtttccatttatctattaaagccttctttgctctgatcatttttgactcagtatgacataaaacatcagtttcttgcttccatgtcttctctgcaaaaagtattcttctttccaagtttaagctgtgttgttattgtagttgtcagtttctggattggtatgtgcttatctctttctttaagtgtattttctggggtcaagcaatactgagaagatgctgatgaattactttttgaatgccaacttagcaatgaatcaataagcaaaaagtggcaaaaagagtcctttgctttcaagttaaatgtgttatctttagaaggaatcttgcactaatctgccatgtgtctctgttgttcatgaaactgctttgaacagattctctctttgaatttcaaagaggaggttaccttaatgaatacgtatagtggcataaaagccaatctcaaaagtggactttacaatttcgtaaagcagcattttgaggaaatttaatagagaggtgactgaaatttactgtttcttttcatacaaatcatcttaatttgccattgtaataccataatctgaattacaaatgcaaagaatataatttggctaatcatgttctttatctttcactgaattatcagaaactgaacctaacaatagatagatcagccttttagtattcagaccagagtttaacatctttcataggcaccaacgaagacaaataacaacatcagaaactctgtgatctcgtagtcttcatatctaatcactatcccaatcctcatccctctgttttccactcttactctttgaattgttgataccatctcttgaactattgttcctgaatctcgattgtttagatgatgatgctgatactgttctgttttcatcctcgtcatcatcactactcgaaatataattagccggtggtgcatcttcttcatcttctgaatcccacattgtgttatcaagatcactcaatacatcgtcatcactcctcacttgagctcgaggtcgaggtctaggatcggggcttcttctcttaaaatcctctcttggccttctggtgtttgtgtttgatgatcttgctctatcaaatctctttggaatttcatcatcctcagaatccaattcaccgtcatcgtcatcatcatcactatcgttgggtctcctctggctatgtgtatccctatcatttcttctaaagccatgacttgcatctccataactacgcaattcaggagttctgcttcttcctgcaaactcttctcggttccaataccttatcctaccagattcttcttgctctgcagcttcctcttcctcccactccttgtctgctgcttcttctatctcagctatgaatctgtctagctcctcctggtcactatcttcatcgcccggttcagattcttctctattgtcaacactagtgcctcgttctgattgtttatctccatggaagacatacggtgttccttcctttttgtcgattgcattgaaaaatgtcgaggccactctgtggatgctagccattgcaaccggatcttcagggttaacacccattctccgtagctgctgttctgttttctttatgttcagcttctgagattcaagcgcttgttcgaatcttgctttgaataaagcctgcaaaacataaatacttattcatacaatgccactacaaagcaactgttgaagcaagccacacttcaatgcttcacaaatcctaaatcagatcaaccaaagtctaattcataacactgatatcaactaagtatcattctttaaccaccaaagcctcaattataaggaagaatcaagaaactgaaacttaaaatcgaaagatttatactgctttaccttccgtttggtaagggtgttgacagggattaggttcttgggctgccggtagtttctaccacggaacataataatagtttttacattatgtatgttaatgactaccccgccactcagtctcgctatcatgctcgccatctctttaatcttttccttagggaagttatcacaacaaacttgcacagtctcatgaaacttccagtgcatatgcatattttgtaccactcctccaaagactccacgaacaccaacaggaacatagtttttattcttgaaaccgattttcttgaacgcttgaacctgctcggatgtgaaaagctcgggatcatgcaccggagatggcagctcaggaagatcatacttcttgagcttttgcaacaaaagcgcaactttcttcttcgcctgcatcaagagagacatcattaaattcaactctctgacacacttcaccgcaaaacaaccataaagaatccaactttcttacacaaaccacacagtctcaagttttcacaataaacaatcacacataaagtctcaaactttaacaaaatatgaacacagaagacaaatattcatggattagtatcaatcaatatttacccttttgagattgtaaatgagcctttcttcatcagtcatgagtttcttcttcaacttcttcgctctcctaatctctcttaacgtcttaccagactctttacgcattctactctcaactttgctcctcatactccttcctctcgatgttgacatacctcgagaccatcctttaaacacttgattcatcaacggctgaaacgaattcgaattaccttcacttgagttaccaatgctcgtaaccggattcgatgacgaaaccagattccttcaagatcaaaatcggataataaagttttaagctttgaggaattaaacgaatctgggagatgggtattggataaatctcaataatcagagagaaatcagaatcagaaatggagttagaatctgaagttacctaacacaggaatcggattggaggagagaaaataaagaccatttacaagtcctccagcagtgtctcgagagactcctagagacaaacatttcgcttctgcaaacgaagtggcaaatctttcgaacaagagagatcttctcaagggtttcagggttttagaagacaatccaataaaattgtaatatatatgcttaacctctagagattgaacatcaaagtcgttgtagtatagtggtaagtattcccgcctgtcacgcgggtgacccgggttcgatccccggcaacggcgtagtttttaatttaactctttttcgacatttatgcaaaaacgtaaacattattaatgtttcaggctcaatattttttatacacgaacaatttcttgtgactgtgatctaaatttctaatcttaatacattatacttttttccatcataaacactttcctctcgttttctttacagattacacaacgaaatacatcatctatgagcagcaggagaagaagcttccttttgtttgtttctccgatgaatcagcagtgttaacggtctgacgagaaacgtctccgtctctgacagacatcagagagcaagttccgggagattccggtgataaaactatgttttctgatgagaagactcgtcgattcggtggaggaatgatctgtggtgccgaaacagtggtgaggtaacggaggagcatttgaattatctctgtgaaatttggccgttcgttaggatcttctttccagcatgaagttacaatcatctctaagtctcctggtaaatcctctgcacttggcctcaagttctatcataaaaacaaacacaaattagtcacaatgccggtttcattactttgaattcatcaatttggtaaccaagaaatgacaaattttgatacacgaatccaaggatcttccaaataagtaaagatcaaatgcagagaggccacagcagagatacaagggagttcaatctaagtttcggtttggtttttcgtgtcgatgatgagttcgtctattcggtcttagtttgtaattcagttttgcttcagaaccgattgagagatgaattattaccttgaatgcagcagcatatgctgcttgtagatttgacatgccttcaaatggtaacttgttgagaataagttcccacaagacaatggcaaagctgtaagcatctactttatgattatagtgtttcttctctccttgccttaacgtaaccgtactgtagagctgtatcattcattaaccaagatgtccgataagacaaccgcgaaaagaaaagaaaaatcccgggttagtagtaatatagttacctcgggggccatccatcggtatgtaccagtctctgcggtcatcatctcggttaatgattcttctctagctaaaccgaaatcagcgagtttcactgtcttatgatccgctgataagatcaaattctctgcagatgcaataagatcataagctttccatacatacttagaagtcacggatttagatttctttccatttacctggtttaagatcgcggtgaatgataccgtgggaatgtaaacattccattgcacgagcaatgtcaagagcaaaaccaacagccaaacgaatgtctaaacgctttggccgtaagctgactagatatttacgcaatgtaccgcctagtagaagctcagtaactataaccatcatgggttctttgcacgctccaatgaactatacaaattaccaaacgttgttgattacaacccaatactctctgattagccaaatgaacagagttggtggatagaaaaaattgaaaaaccttgactaaattcttgtgctggactttagacaacatagcaatctctctcgcaaaccggttatctcgtttagcaatctcttcaggggactctcctcttttaataatcttaatcgccactgtttggtttctatacctaaacaaaacaaaaaacacattttcaatccatcaaacaacaatcttcaagcatctccagaaacagataagcttcaataaatactagaaagaaagattaaaccaattagcctaataagtaactgaaccagacaataaaagattctcttgtgcttcatatacgcaaagagtcaaacttttttcaagactaagttcttttttttcaaacttaaacaaagatttgaaatttctgtagcaagcaatgattatagataaaaagagacaacttttaacttttgattcttagtatatatggatgataaagattgtaagtcaaagcttactttccctcataaactttggcatgagcaccttcaccgatcttaggaccaacaaagagatgacgaggatcaacaagccatttaggatccaattcaaactcttcgttcgagtaaaacccacttgcagatcccattttcccacaacaaccccagaacaaaaatcacaaaaaccctagttggctaaagagagaaagagagagatatgtcaaagctgggccctttttgattgattaatcattctgtttggttttggaattgagaaactatacaacaatcagatagataaagaaacaaaaaagatgcttttttttttggtggaatataaagagagaaaattatcaaaggattccccgaacacagaataaagaaagaaacacgacaatcaaaatcctaatttcgtcaactacataaagaaaacaaaaacattgaacggcaaagatgggaatttgagagaagaatgggaagaagaactgaagttgacactggaactgatggagaaatggtcaaaattttgatgattcgtgttggtttggttaatgattattttttttgaagtttcttattttaggggttttgagagagaaggaaaaaaaggagtaaagaaatcgaaagttgtttgctttttccgcgtaggcgtcagtgaggggtgaggtgaccagaaatctcctctatctcttaagaaaaaacacttacgggtctttttcatccttttttttagtgtctttcttcttcttaaaaatacaatcataattcaaaactatttgtaatctattttgtattattgagaaataatagtacatattgaactaagtgggtggtttaagaattaagatcgatttctagaagaagactagaagccattgatataatgaacatatgaatagtgaagcaacaactaaaataagaccaaaaactgaaatgtgaatagaaaaatctcgtcggtgaaaaagaatgaggtaggtgggatccatttacctagcttacgactgtccttgtgtgtgtaccttcgcagatatctatttttcatgttttcaaacccatttttatactctttttatattaatcaataaaattattttgtcgattatgaattactcattgatcttttttttggtcctttgcttataattttgttgaatggtaacattgtcccataatcaaaatcaagcttgaaactaaaccaaattgtgtcgtttgacccaaataatatatggttttattatatatttccagtttctactttcgttaacggatgttataagtttctttaaagtattatgatgatatgtttattttggtatggtcaacaaatttctcatgttttcaaatattagttaatatttaatttatgttttaaatggtcacatacaaagttgatatttaaaatgtctacaatttgaaagctgattaataaaatcgttagaggtgataatggacgttagaggttccattaacgactgataaagacatgtttattttgacttaatcaacgaattctcatgtctcaaaagttagttcatgttttaaacgaccactcgggaaattaaatgacatttttttgcttaactcctaactgtgacttttgtattgcctcaacgcgtgggccagtataactaaaataagtagctccctcacctgctaatttcatatacgtatactcaaaactagagaagattgatatattccaatgacaacataataagataaaccaaactaaaccgagtcaaaagcaagattacatcccattcctgcattgcccataccgaaaccaaatgatggttatatagttccaaaagattattacctctccatgttttcttttcttcctttacttctataatatggctaccaaaaataaagtttcttcttaaaagtgtaaaaagaggagggtggttcaggttcttaacctgaccttctgtaaatgctgtaagccacggcaacggttgcgacagctgaaactactgctgctcccaagagaacctcttctttccccatcgatttcaaccagtttagcttcatgcatccttctttcttgactggctctgcagcttgttcttggcaacatgaaactccgtttgcaccttggcaacaacctcctgtgaaccctttctgctccacaggttcgcgttcttccaccattacactgtttccgtttgggattttatgctcatcctctttctcagcttcctcaccctcgggtcttagtctcatctggcctctgaaatagaaattattttcgttaaacaatgttggtcaattgaaaacacagcgttaaatgaagataagcaatcagacaaggtatgaacctgaaacttgttgactatggttctagaaataaagtgataacaatattttattagataaaatgggtgagtaaagggttatgagcttcctagttgggcaaacaaaaacctcagcgaaagtaccattacacgcagaaacttcttgactacattgcagtatcatactagttatacatatacggagttgcaacattcattagcaaacaatagtttttgtctgttgaaaaaccgtttcagttcaaacacgagggtatatgtctagtgtaaggtttactacaaccatggatatcgatataaaaagtacaatgtacacgaggaaatgtaaagctgttttaacagagacatatctgcaacaatctagaaacaagaagttggaaaacagacctggaaaggttttgaatgatttctccttttgcaatatgctgatcaagcattgcaggcacgtcatcaggagtcacatagccatacctgcataaaaccaagatcgttatgcataatatattacattcaattacttttctgaattatatatgcaagttgaatttgacattttcttaccaatggccagaaacatttccagctgaatcagggctgaagacaatcaaatttccagcatacttgtgcccaccgatatgagaacacggcaaaacaaagattttgtctgaaagtccacgtgaacttatctcctgctcgaacttctccataagaactggtccacaaacaccacatctcttgtctcggctaccatgagcgcacacaaacacaaaggaaccagtcaactcttcctgaatcccagaagtccatgtttttcctttcacaagcacatcttccacaaaagcatccacatctgtgtcctgaatcgccctttaacaataacaacaagaatagaaaatgtacaaggataaataacaagatagctacaggatccaaaacaacgtagagtaactaacataaacacatattaacagaatgaccggaaatcggcttttcagatccaaaacttgagtttaaacatcatcatctctacaacttaaagacacaaaatctgagaatctacagttcttaaatccctagaaatcgaaatacgaagcaagaattcgaaacaatgaggtcaagtcctagtcaaaatctttccctaaagagaaaaatggaggcaaaactagctgagaatcgaatctctgagggcacaaggataagttagaagatagctacagtatccataacaacgcaaagaacaataacagagtaacataaacgaatatcaacagaatgatcagaaactagattttcagatccaaatcacgagtttaaaaatcaccatatctacaacacaaagacacaaaatctgagaatctacagctcttaaatccctagatatcgaactaccaggcaagaattcgtaacaaggaggtcaattcctagtcaaatccttccctaaaaaaccaaaaaatagctgagaatcacatctccgatgaacttacttgtatctaaccatctccgggaaaatcaacacatctccatcagattcaccaccaccaccacacaccgtaagcttcgtctacaacaacaacaaaaaaacactcaaaacaatcagaaagctaaacaagattcttcttcacacctaaaaaaacatttgtgtgtttgttacctcaacagcgaaatcagctttacgatccttaaacaacttcgcgaaacgctgaggaagtccttcagtttcaacacgaggaagccaagtctcatgactcttgtaacaaaggaaaacatgacgaccgtacggaccaacggaaccggcgagagtaccactgtacatctccgatcgtttaaatccgtaaagctcgtcttccgaaaccgggactgcgttaacgttctctgctacttcttccgccattgaagtcttcttcctcacaccaaaatctagggtttcacagaagcaaatagaagaagaagaagagagagagttgaagaagcgaatcaatcgaaatggagatgtaaatttcgttatcatttaaataaattttcgaaaaagaaacattttgatttgtgctaaaaaatctgtggggaatctgaaaccaaccgtctctcacagctccacgccaattgggcctgatgttatagtgactggacggttacataagtcttttaccaacccccagctcacagaatggattcgtacctaccaaccaatctctactcgcccgtccaactgctacggtgacagacggttactttagttaaaattagataatactcttttgattgttttgaagtgtttatgctcaactaattaaattatcaattaggaaacaccacacgtaattaaattcatttttgcaagttatattgtctgacttttattttatataaatttttagactattaaagtattaattacacagatttttaattaaaaaataatgagaataattattttgtcttttttttttcacaagagggatcatttttattgagcaagtcaaatattattttgtctttacatctctaatttaccgtttcttttaagattctttttctctgcttttttctagatcccttataggaaattttactaaagatgaacattaatgtttgtaaattcttttacttttaagattttttttttaatttggtgcactgataggtattttctttcgaataacaaaaactaagagaataatcatattttgtgtttttactctaattttaccatttttttagattctttttcaattttcagtaacactaatctgtttaatgattaaaagaacacatctattgatgattaaaatttacatttccttagttgcaaattaaaagacacttgtattggaaaaactagatacaacctcaccacaatgtgaagaacacaacagtcaaatatttggtaagaccaaacacatcagtaacacaaaaatctagacacaaacctcaaaagcaaacataatacgccggtatcagattgaaccaaccaaaactgatagtgaaagaaatcacaaatcagaagaaatcaatttccaaataattaccagaaggcttcacatccacagtaggaggcttatcataaccaacatgtccatgtccttgactaaaaccatgacgaacactgtgagcttgatccattggtttaaccggttgaggaatctgtggtggactggtgcatctgatcaaagcccaattcacactttggaaaaacggatgctgcttaatctcagtagctcctcttctataagccaaccgatgctgaggctctttcactagcaatcctctgatcaaatctctagctgcaaagctcacatttggatgctcgggaaaccgcaatggctgtccaactacgttaaagagtgtcgctctgttatcgcctcctctaaacggtgttatcccaaatagaagctcatagaggaatatcccgaatgtccaccagtcaaccgcgcttccatgaccttctcctttgataatctctggtgctaggtactcgtgtgtaccaacaaacgacattgaccttgcgctagtcggttcagctatcagctcaggaagcggtctgatttggcggctcatatcgttcgacttcttcctgtgctttcctttagacaagaaccgaggagtgaaacacactggctggatgcagtcaggctgaacaatgcagctcgattggtctacacatgttggttggatacagtagcttgagcttttggactcaagcgtgattgctgcgaaccgaaccaacgttggagagactgcacatctcaaagagaggtcgaaatcagatagcattatatgtccatcttcacgaactaaaacattctcaggcttaaggtctctgtatatgatcccaagcatatgtagatactccatagcaagaagaacttcagcaacataaaatctacaaacaagacagcaaaaagatcaaaactttcagctaataacgaaaacattaaccgtaaagtctcgaatttttacctagcagcttgctcagggaagtactttccacgctgtttttgtctaagagaatgtaaatcaccaccaggacaaaactccataaccaaacaagaattcatctctgtttcgaaatgtgagtaaagcgtaggcaagaaaggatgatctaacgattgaagtatctctttctcagtctgagctctaacaagcttcttcctcgctgcaatagcagctttctccataactttcacagcaaaactcactccagttccaatcaactcagctaagtaaacattaccaatatcacctcctcctaacttcttaatcagcttgaaatctttagcctcaagcgacgaaccaacccgagaacgaacctcctgaatcgcaacccaacgcttatcgttattatctctatgtggcttgtaagctgcattactcagaccacttgagctactctcatcactaacatcactccctatacttcctctgtatatcattacaccattcttctccaaatcaataccacctataccaatagtgcttatgcttgcacattcactgaattctgtgttggtaaagctttgttttgcttctgtgtaaaacgtgttggttgggctagagtaaaaccttggctctgattgtttcttcttacgtataatcgaaattggtgtctcggattcagctgaaacagaggacacagaactttctataacttcaggggaagttggttctggttctgggattaataacgtcttcattgatttcttggtgcctcttgaatcgattgagaaagatgtaatcgaacctttggatttagattgaaagtttctggatttggatgatgaaccaacgtaaacgactgatgaagaagaatccattgaaggtgttcgacaaaattcctgaaagaaaggtttttaaaagttaacttcaaacccgaataaagaaatcgaaaaaagtgaaacccagcaatgattagggttacttaaactcaatcaacgaatcaatttcaagtaaccgccgagacaacgtagagagaaagaaaaagtttcgatttttttttcccgcaaaattttgaagttccggtaaaagttgcagaaacatagaggaagaagaaggaaagaaactataacctgatcatagacaaatcagtggtttatgaaaatattttctttctctttgacgagttttgttagatccgatccgattagtgtccgagagagaagaagaagaagaagaagatgtttctttctttcgtattctttaaatttgctttcttcaggtgaatgaagaagataaagagaaagttcgatgtttcgtcgtttaatgggaaagtttttttaagcaactttttaaactctcgatcttgcgatgttccctcaaaagcaaatttaattactgtaattaagtagggagccgcatctaagcactaattagtaagattatattatacactcgttgtgtatgaatcttcgtgttatgtttttgttatgtctaggctataaagtttgagtattagtatagatttagtagtaggtccgtaaaaaatgattgtagggtcacgttcattttggtcatattcgacgaatctgaaatccaaattttaaaatatgaaatcgactgatctctaggctacgaatagagacagaaccgcatcatgcggtacggttgtaatagtaacaaaaaatctatatatattttttgttattattagaactgcatcgcactttatgtgcagttaaactgtatgttatcattcagagttttactaaatgttctatgtttgtgtaaataatccaatttttagttgaatgtggtttcattttacggttttgaaaattgttaaggattttaaagtacaataataaaaaattagtttgaaatttttataaaactgagattagctattttttatgatgtataatttgtttaagctaagaagagaaaattcactcttggtgttggattaccctacgcattaaactcttaaactaattatttgtgcatgagaaaaaaattgtgttcttaaattaagttaaacgaaacatagatgagagggtcatgactcatgaaacaactgacaaggttatccattttcatattttcgtgatttgaaaattctatttcgaatcaatatctatgcaatgagattatacaacatggaatcataatcattagatattaattgcaccaatgcaatcttgttggtagattttaattaaaatatttttctatcaggagacatgtcctcctaagaattcgagatggctggtacattgaaccactgataataaatttattaaaacttaaataactatgcatgttcttctttatttctagaaataattaattttactgtttaaaatgactccattagttaaaccattttacgaggatgaatctaaaaattattcaacaaaaaaaaaaaacgagaaatcatgttaacaaaacaaaaactgaatagtgattagtaattaattacacttaaaaattgagttaacataatgtaggaagtaggcggaagttacgaccgaggcgcctcaatgcctcacatggacgcacgtggactaccggcaacagcacgtggacgacggctgtcgtcgtcctccggcgtattttattattttgcgcttctaatatcctcgtctcgggtacaggtgagtattttaactgaaccaagtcaaactaaaccgaactagtctaacccaaaccatgtcacaatcgttgcatgttgatgtttgattaataaactttttactaaaccaaacgatgaagtttatttggaaaattgtttggtatataagagcacagaaaattacttttgaatgtttaaaatctttgggaatcaactccaacacaaaccaaagtaaaaccaaacaaactaaaacctaatacggcgttgatcatcaaattagcctttcaagcctcagtctatcttgtgtggaaggagcggaaccaaagaattcattcctcctctcagaaaacttccttaactattgtcaaggagattaaggttatcttgaaggcgcgccttgatccgttggctcgtgcccaacggttagccagaccgggatcgtcggttctctcaacctggtttaggttgttcgggtaaggtctctatctccttttttccttcctctcttcctctttcttttggggcctgcgtgcctgtgttgggcttttgccttgttctgttcaggcctgtgtgcctttttagccttttggcattgtatgttctcttttaaaggaaatttaaaattaaaaaaaaaaaaaaaaaaactaaccgaacaaatttcgaatcaaccaaacttatatccatactaaacctaaattgtcaatgcaaccatacccataacacctttttattatcttgcccttgcaaacttcttgtctcttgggaaagaataatggcgtagttatatcaaaccaacttacccttttgtcaattacataaaattttacgagtttgaatctgaatagtaacttaacaacaatattagtataaacctcactattttatccaactcggccaattatcaaagccacataatatactcaataattaatattggataaagtgtaattattagataaaatagtgaggccaataggtcattaaaagattgatgtgacgaatggccgtaatcactctggtggaagttgggttgaagttcgatcatttaaatttaaaacacttatttttttattcgaaatatttaaataaaagagtttctaattttaaagttaacagtgacccggcccgaactctacgtcacgtcatgatatagactgataatggaatgcaaagaatcaggtaaggtaatggtgaacaaatttagaagagatgatgcaaagtaggctcggacatatcagccgaatctatcaaatcttcaccaaacaaaaatttgaggcgagtagagtcttcttgagaagaataggggtggcgctttggtctatgtggcatcactaatccgtgggagatggttcttgtcgtttgtacaggaatggcaattggaagtagtttctctggttgtccgtagatgctcctgtaaccgtcgggtttgtgttttagtctgctgttgtcatcgcgtttacgttagtttgcagagaagttgtaggcgttttatctagaggttttgtggactgacttctaatagagttgatgggactctaactctttgaagttgtggaaatcacgcaaatttctgagtttggcaactcagaatcggtgtttcttctttcgtctttgttttggacttatgctctcctcttttgatgatttgttatcgtctgtttattctgtagatcttggttattctctgctacttgtattctttgtaatttctgttgaaacttcaaaaatggtataaatacttcaccttttaccaaaaaaaataataataatatgagtcaaatagattatacaaactaggtgcggacacatcaaccgaatttataacatcgaattcgaaaccatacagaattatgagtctattagataaattgttaaagttggccccaatatagacataactaaaacggtttttttatttataagaaccatatgtaagaaatattatttaatatttctctcctattatatgatcttgtaattatctattttctattgaaataatgttattatttaatatatttggtaaccaattgaattggtaataaagaagtttttcctaatcaatatctactttgatggacggatgagatctaatcttaaggaaaccctaatgaggaacaagtcatctctctacctataaatatatacctttagaccatcataaagatatcataaaaaacgcaacacgttaaagctaagtttattggcaaggtgagagaaacctaatcctaaactaaagatcaagacttcatgaaacctattaatgaagacatctctacgacaataaagagaggtaatccgataaacctcctaatgattttattatgtgattaacctagatgtttaaagatcttagggttcatgtaaaattaacttacatgtggtatcacagcatggttatgaacatctgttatcatggttaattaaccatgctctgataccacatgtaagaaaaaatattcaaacatcaatcaaaacaagtagactgagctagcattatctcgtcaagtgcgtcgaaaaacatttccgtgcataaacaaggcttgtccaaatctgtctatctcccacacgtacagaatgacaaagtgaggatttctcctgctcctacattttaatatgctagtgacttgttgttgtcctttaacaacccggattttccgaatatcacctgcttctctggtgggattcttcggtttatccgcggctattttctccttgaaactcgccacgttttcagataacgactgcactgttttctcaataatgtttagctcacgaccatcaacatccacaacagagatcatgattatacaccaaccctgaaacaaatgtataacgtcctgattatcagatacagctttagacgaagaaaaaaaacaaagacataatgtaagagcctgaagaaaacattaccgggtgttgagcaagaaactgttcctatggaacaaggcacttctgtctctttggctctggttccgcaagagacattcaagatacagtttcagtaatttcaggtggtggaagctcttcattgttagcaaaaaactctttctcaaaagaagcatgccaattaaccatagacatcaccccaccatccctccatttaacatcatggagagaatcccactgatgaacgagacagaaaaaaccatcatgaatggctgacatataagcatcactcttgctcaccttttctttcagatctttaggtgccttaaatacttctgaatactcaagaacaaatagagtgaatcgtgggaacttactatcagttggattcgtaaactcaaatccatctctttccttgaaccctagccaaaaatcattcccataccaagccccaaactgtgttgtgagcttgatagttctaaattcttgacactcatcccttttggaagtctatagtccagaagatgtggcagaacaatgcgttgaccagcatcagcatcatcatcatcaagattaggtccctcttgttgaatccgagaacggaattcagtagcctttcgcatgtaagcagcaagagtagcatcataatcaagattagcttcgtcttgttgattcagagaacggtactgggtaagcctttgctggtaaaacgggtgaaaggggtctgaaatacccataaagttgtatcttgcgtcacctacaacaagatacctcatcaccttctcaaccaccaaccctccagtggaaatgtaactcgccatcatctcgatattatttctgatgatacctggaggtggctcagtgacttatgtactaacattccttgttggaatgtgaccaaaatcttcaacgatagttccattttgttgaatatgagaatggtattcactaagcttctgcttgtaatatccgtgaaagggatcttcagggttcctcagaaagttgattcttg

SEQ ID NO: 474 - DNA, 84702 bp, Arabidopsis thaliana
gatctttgacgttggtcattatcctcttctcaaacgtcaacccttttctcgcaacgcaacgtgctacgttcttaacaattcgttcagactctgctttatctgagatgatttgcaaatccatctgtgtcgaagtggacatttttttttctacaaacaaacaaaaaacctttaaatcagacccttggaatttcagtttttgacttaaataaaaaattgccacaagtaatccacttaggcttttggagagagataagaaacaccgacaccttagccggcaagaaacagtcccgcgataaccaacctaaaaagaggagaacgaacgatttggagaaatcgaaacaaccgacgagaaacgaagaagattaaatcaatataaaccctaaaatctatacaatatatatatatatatatataaagttgaacctttaacgacacgtgtcttaggttttccaacgggcctttattaattgggcctctattttcagtccatattaataacagttgatgaaaacatcatctacaactttgcttcttattattttatttttttcaagaacaaaagccaatattctttttccaagcttctgcattatgaaataacacctccttggttctttcttagctctgtagaggatatatccatacggaatgtatctgctgaaattgaggtaaacattgtacttatttcctttggaatctcatgatcgtcaagaacctgcagaggagcaaggataagtaaggcataaggcataaaatctcatagacaatgcttgcatgatagtacaaatgtgttgcttgagattctagtgttgagatcaaaccttgaatacactatctacattacggccaccaacaaggaacttgcaacctgttcgtttgcaatcacctagtacctccaacatccttttgtggcttccttcatagtactttggctgcaagaagttaaaatttcttattatttcttctttaaacatcgatgatcgcaacagtttagctctatttgtagggtttaaagagagaagcaaaaagaggaccaggctaaaggtacatacattaacaatccttgctgcagtatcagcaccaattacaaaactgcttcctgggaagagttcagctttcttgtagaagaaaggctgatttgaaactattaccgtcttttctgcaaaccggataccaaaccaatatcaaaacgatggcatgatgagatgtaagaaaaagtggtgcacaagattgaaaacatgaataactagtgagtgagaaatgaagatttcgccgtaccaagtacttcaaattgtttgacacgatctttaatctctgtaactgtaagcgatggtttgtctgcattcagtgcagatatttcaaaacatggataccctccttcctcagaaacactgcatcaacatatatgcttgtgagattgtttacattttgttatccgatcaaggaaatagattcatatcgcacaactaaataaatgatcaaattactaattaccttgcataatatagcatatcagattaactaagaaacagagaatcaacaatgagtcaaagaaaataatgattaaataatgaagacagactagcttacctcatagcagcttccaacagcttgagatcaccgtcatgtaatgggttaaaagaaccaggcagtataatctttctatctttatccgacccgtatgattctgctataaaggtataaaactacatcattaatggccaatgcaagaaacagttgaaaaaaccttcaaagtaagttttattgagtcaaataaccaaaatcttacctttagaaaatggatagatcttagagcatatttgtccatctataagctgttctagttcttcttcttcactaaactggattacagactcattaagcacctcagaatcagtcaagccagagtcaagtgtctcagaaacttggcatgccttagccatagcctaaagtaataatgaccagaaaaaggttttaagaactcatgagtatctcaaagtaaaatgctttttgaaaatgttatcccttaggcaggtacaaggttgtaactatctttctataacacacctgaatcagtacagagcttgccactttatcttcttcctctcggcttcgttttccctaaaattttccacaataagataacaataaagagtaaagcaagacatgagaaagattgttgcaatcacctttgttagagtaactgaagtttcccatatccggttggaagctcttatcgacaaaaagaacctactcatcataacaaacagagttatatgagtataatataaaatctaaatcccttgctatgattgtatttcttcagaacatgacatataacctatgatccccacgctttggacgagaagttgctaacgttccagtaaaaccaacaccaagaaccgcacatcctttccaccaaattagcaagttataaccaagatctctatgtctaatcccgtacatacccgagtaaagcatgatatgaaagttaaaaccaccactctcaccattgaaatcaactaacaaaacgttactaagcaacacaacaatgttaaagaaggaaatggtaaagttaaaaaacctggcttagaaagcttaagagcacgattataagctaacaaagccatttcattcgccattgattggctacagtgttggttcggaacctaagaggatgataaaatctggttatagtcgggaaagagaaacgatttgatcattagattggaggttttgagaataaaccctgccgagtaattgaaccatagagatcatggaatacggaaccacggcttcgagaagtgtgttcgaagctccaggaactgacattaaccaacctaaagactgaatttgaagttttggattactcgaagtaaaattacatgaatttggtaaatatagagagatataagagagaaacctgagaggcaccgccggagagatacacgacggcttgcgtcggcgatgagtgaattgattcgacgatggttcggatcgcagactccgccattgtttctctcgtcgtctctgtgaaagcagaaagataaattttaaaagttggactttaaaattccaatttcattctcgaagaagctgactttgattcgagagtttgatgttgaccataaatctaattgccaactatattataaacacagagattaaaaaaatatattataaatgtagtaacttttatgagttatattttttataattctaaaccaataatattcaattatttgttttaaactttaaaattcatcaataatgactaataaataatacataaatatttataaaaaaaaaaatcaattaataagaaacagaaaaaatatatatatatataataataattaaatgttgagttgaaaaagctaataaatgactaaaataagagttaaatttttaataatgattaaatttagtataatataatatatttacaaactctacaatttaaatttaaaaaacaaattgctgtcaaaaaaattaaaaaattaaaaaacaaatctgggtgaaccaatgagaggatgacaaaaccctattggtaagaatatatgatactttaaaaatagaaacctggtccataaaaagttaataataaacacttagcaaaacaatgatgacaaaaaaacatttagcaaaataaataatacttaaaaatttacacagattatgttacatgttgaagttactgtattggaattttcttttaacttactacttttatatttcatatatactgtagtgggatttttttttttgaatgttaaattaattaatcaacaaaaaagaaaaataataacaagagtttgagacagtttagctaatttaaaacatgtttaggaactgaaaaaacagagtaatttgaaccttaaaacagagcaaaacagagccactttcacggaggagagcttcgaatgaaaaaccattgagcaaacgtgaactatatagtgggattttggttacgtaatgtagagaaactaagattttccaaaacaaaagtagaaaggaaactaaataatgtggtggtggctcatctccaccgtaccatccaattaaaaaggagtcatgagtacttcaacaaaagaaatctggaccgtgttagcttaagagcgacaaaacaaaactagaagctcttctgattcagtgatatcctataggagctggagcttctttcagctcatgaccttggtagtgaatatcctgcaatttatacaaacatattataagaattaagcatcgatctttaacttatataatttccattcatttagagtatacacttacggatgcatagtggttaacgtcacggtgatgcgcctcatcagcacgaaccaccatgacaacatcacgaagcgttgcatcagcttcaagcctccagtaatcaacagcgatagccggtgcaggaacattttcgatgttaccgttatcgagttctttgagaaactcagtgtaagaatgtattgcttcttcctcaaggtatccaaccatacgatgagcaaacttgggagagattatgtatccgattaaataagcgttgaagaaaaccccttgaacagagatcacaagagctcgttcgtaccatttgggtttcgctacttccatgaatgtcattaagtgcattctctcattctctgcttcttcgagaagggctttgatccaacccccactttgttcgaaacgcctgagagatttgaagtgcataagcatccctccaaccattcctggaaccgctgcaaccgtctctagcataatcgctcggcaaccatacctcctctgcgttaagtcattgccaagaattagtccatactaaaatcttctaaaaatgatagctagctaccaaatcttctaaaacagttttcactagttaaagacttagttagcggttggaacaatagaaacctaagagtgtacctggaagaaaagatcggtaggccatcgaagagatttaaccatccaataagctattttgtccggtaaagttgaaggaacatgatgcttcttcaaatctatcgttagatcagctttataagtctcccatggctaccattattcgacaaaaacacaaaaaatacttataaatcgaccaagagtaagtaacaagacaccaaaacatgtagtaaaaatatgctatgtacccgaaagcaactccatttccattcagttccatcttctttggtgattttcattggcttcacgccccaataactaactattaattgttcccctttgttaccttgatcattaaccttgacgccgtcaccggatccttcctcttcttccgatgttttcttcttttcaaatgtcatcttgctgaaatctctcagacctcccactgccggaaccctaaaatatttcgctggagcaagttggtgaaatagaattccattaatggatgtcgcttgctttgatgcgtcaaggagagagcgacggagtaatgtagtgatcatttttcggattcaagggagatttgttttggtttttgttgataaggaaaacgtaaaaccctaaagtttggggaatcaggggattaaagaggagaagaagaagacaaaatagttctttaacaagaacagtgtggacgatgtcaaaacattaactgaagatatgtgtccaactagctcattaggccttcaatatagcccatgcgcataaggcccattgggtctttccactattgagaagaaaactttactcgagagatacacagtgaaagggtttgttttttttagacagaaacattgttcttggtgataatttgtttagtttgtgggttttgttagcttccaaggatcctatcggatcgggaagtcgtgaagatcatttgtccgagtgaaactgttggtcgttatgttaccttggagataacttgggaagcaaatcaaccataagagtatgtaaaaaatgattatgacttgagaacacacacaaaataaaaaccaaactcagaaactctttttatatctttttacattaacggcgttgtataaacaccaactcgaaatctgaaggaggcacaaagtactctatacgaatattgttctgacatttcaacaccggtgggcgtttccttggagccgccggacactccggagtctttgctcctctcgccgtgggagtgatacaaattccatcttctgattctctctcaggcttaatgagtttcgtcttcaccggctttagtgaagcccgaatcgatgttttggcgaagataaacttttttccatcggtgtctaattctctgctaacttgagattttttcgaaattcccatttaaaacagttggagattgagactagtacaatgttttgaagatgaggaaacaagaaaaagaaaaacaaagaaggaagaagggataagtgtaaagtaggtgaaagagtttcttcttcttaaaggaaagagttttgccttttcaatttggttgcttccccaggaattaaaagagaatgaagctttcagaggaagattattaggtgcaagtagaggaaagggtacaattggaaatgataataatgttcagcccgggaaagctacgggtagtcaataatctttctttttaatatttggcgccatggttttgagactattttaataacagtggttcctaattttttatttttttttggttaatcagtgttcggttttaaaaatactaccgaaattaaattacctgaaaaagtatttggtttgatttgatttagttatcggttcgttttagttatcgattttagaagaattttggtatttttttcataaattttgatataatcaggtttattttgataaattctataaaaatgacatcaaattttgttttaatgataaaaattagttcaattaacataataaacttaaaaaataaatgggaaaaatgttaaaaaaaaatcacgaatttttaaatttggaacgatttaattttgaattttccggaagacaaatagatcgtaaacgttttgttgactttcgaaataaatgacatgtaaagtcatttatttaatacatgatctccaaaccaaatgggccatcatatatgggccttacaataacttaaaatgtatctttgaagatgaacttaaatgagtctttctctattcctctcagcataagaggtcaaacaaaaacattttcgattttggggaaaaattaattttcccgcgtcaaatgagagaccacaccgcccaaaaaatccagtatcccgccggattcaggtaataaactttttctccaccggcaaatatcaaaccataaactcatatctctccgccgcttctctctttacctcgattgcttcagagactctccgatggaatcctccagatctagatccgtcttcgtcaacatcggactcagagaactcaacggatttcgaggttatttacatacaaattccttcttctactgtatatctgagtttcagcttcttcggattattcttaatcgaacttttttttccttggtttcagtacggaagagaccgttcttcgcagactccgagctgatttgcagagaaatcgccggcgtagccgtggaacacgacgggatttggactccgccgttggctgtttcgttttgtaaggtatagtccaaattctggttctgttgattactcaatgtagctagatccaatctcaacgctcgatgaaatcttttttttgattcttttctggaatctagtagatttacagaaatctataccccacttttggtcgtttgtgatttaggtttaacgattttgtacagactagcaggaattcgcaattgttcgccgtctctgatgaagacggccatgtgagcttgtttaattcttccagtaagaagtttgcttcttctgcaactcaccaagagaatacaggtattgtctcgtccctgttagaaccctgattttctctggagtttaagagattactgatttgtgtttgtttcaaatgtgtagagaaagctagatttcgtgactggattgctcattataatgctatctttgacatttcttggatcaaggtgtgttatattatgtctgcgaatgaaacaagaatttttttgtggatttaagaagaaactcatttgatgtttacttattgcaaattttgttgcagggagatagttgtcttctgactgcttctggtgatcaaactgtaagttgtgtgactcaatgtttttgattgaatagtttttgaggacgaagtttgtgatactgatatttatatatgcttgaatgcagattaaagtatgggatgtagaggagaataagtgtactggagttcttattggacatacaggaactgtaaaatctatgtgttcacatccaacgaattctggttcgtgtcttgcatatatctgatcttgtttaacttatttatgtatctggtcaagatggttctgactcttgttgtttacagatcttcttgtatctggttcaagagatggatgttttgcgttgtgggatttaagatgtaaaagtagctctcataaagaggaattttgtatcaagtaagtcctctaaacttagttgtgatgattttttttggtttttattcccgttaatatcatcttgatagtcttacttacattcacacagctctactggcatggttaaaggagctcatctatctccactttcaaaacgaatcagacgtcgcaaggtttgattcctgctaagtcctgactcttcacttctaatctatttgtcctatcttctctgctaatgggttcatgttttcaggctgcttcgtcaagcattacctctgtgctttatgtcaaggacgagatcacaattgctactgctggagcacctgataggtacttacttgcataacatttattggattcatgtgaagctagtccaactccttaaagcatatagaaatgttgttaacgttctttatatgtttttttctgccattcttttagtgccttgaaattttgggatataagaaagctgaaagctccttttgctcaagcctctccacaatcagacccaacaaatactaaggtaagccaagcatcttattcctagactcatgtttcttctgaatggtttcactgtgaattaggcactgaatgatttgaatggaaactagattgacctgtatcctggtttttaatttgtgcaggaaaagagatcacatggtatagtttccttgtcccaggactcaagtggaacctatctcacagcatcatgcaaggacaataggttagacttttaagattcttactttataacttttcttagtgagttagtcctcgtcagtcgtcaaacagtccagctctaaccaaatatattctctctttgcagaatctatctatacaacacgctgcggcttgacaaaggacctgtacaatctttctctggctgccggatagattctttcttcgtaagggtaatgcctccttcacaatcttcacttcaatcacaccattgatttgcttttacaacatttttcacctgctcactcactgtctaaatcttgctctgcagacgatgattagtcctgatggtgaatatgttttgagcggttcaagcgatggaaacgcttacatatggcaggtttggattctgtttcttagtttaacaattctcttataaacgaaagattcgagagttatatgtaaatgctcaaagcaccattgtactttcaggtcaataaacctcaagtagatcctataatcttgaaaggccatgactttgaagttactgcagtagattggtaactctacttaaccaactctttcttcactgcattcaactagcagacatgtcgattcgatgatacataactaaactgtttccaaatctattgttcaggtctccatcagagattgggaaagttgcaacagcttcagatgatttcacggtaacaaaacatttcatatatgttgacacaagcaaaaggttaatgaattgtactgattccatggctcttcataattaggtacgactatggaacatagagaacaacatatgtacaaacgcaaacgcaacagcgtctgtgtccagagttaaacgcagagtaaccgcattgtcaaacactgaagccaaagaaagacttgagatgaacagagaaactgagagtccccaaaagcattcatcattatcatcagatgatgattataataatgatcagtcaatgcctatcattagaactccagagtctcagaagaagaaaacatcatcatcatcatcattgtcatcattatcatcagaagaagatataatatgcgagagaacaccagaaaccacattcaacagtccatcctctgtactaaaccctccttcctcagtcaaaaggcgaaccattagagattattttctcgtcactccctaaacactaatctctttgccaattcttgttcaaaggttattgtatagaaattgtaaggtttattagattcgggttgatatctgatagttttgtaggaagtaaatcagaaactattaaaagcaaatggcaatatgacaaaactaataccaatctttccaatttgatatatttcatttaaccgtaacgaagcagggatgtttcatgtaccatgtcattctttatgtgaacgtaatttatgatatgtcgttctaacaaaaggtaaattctaaatccgaaatactttaatctaacatccatataataaattagaccgtttacatacaaaacatgttaaaggaaaatattacataggtcataacaatgaagtataaaggtcatccaaacatgtcagaaaatttacacaaataatttatttgttccattgctattttcttaattgctcttctaaattttatcattggttgcaaatactatgatcttaaaaaacatgaaataattagttgaattattagcaaaataaaataaaatatagttgacacttgacaataagagtggacatcactaaaactaatcgtatatattgggttcgatgtatatgtataatgtaataagaaaataggtgtttaacaaaaataaagtaagaaagggtgtgtgtgtttttttggtgaaatgaaaggaggtgtgtagccaaaaacaaaagaagagaagaggtgcattatttctaaataaattttgatcaaataattgtgcttatgtaatgattgttgaggacatatcacacttgacttgcaatcattccgtcgacatttttctgtattatacatttcgtcaacaaccaatccacaaaaccccaacctatgataactaaatcacaaaagtacatttggttttatgggttgatacaaacttgagatcaagctaggtataaattaatctcaaaagtaatcgcaattaataggattcattcgttagttaatcgatcatatcctgtataaattttgttgtaacaaccatgcaattttctctaggatttaagctattgtcaaatttcctttcaaaataattatcgaaaatttttagttcgaaaaatttaacgtataacatcacttttaattttcattattcgtatacgctatacttacatttaaaccatttatttatttatttataaagtttatatatgtatatagagaacttaccaggttttgttatcccaattgtccaattgataattaaagtataccgacttctagttataggacttctaggtgcatgcatgatacatacatgatgcattatgcatatacatgaattcttctaaaatggatacataattaattagcacacacactatcttggcttcttcgtttcttggacgtcttggctttttttggtcgacccacattagcttattttatatacacgataagagacatacattttcattcgccaggcctgatcttatatatttatgtatagccgtatagggatatttgtatgcatgcgtattcaagtgcttcttcttttccgatctgaattggtccttctcttttcatattttcttcactttttctttcaattttctattatttttatactttctttgtacacatactatatgaagcatatctgtatacactgaaatctaatcaggaaatacgtaaagtatcgttacaagaaatacgtaaaataatgcttgccaatgattgattatcttatctaatcattggtataatctatatacgcacttgctaccaaatattgcacttatatggaatatgaagcatatatatgtttatggaaacaataatgccttggtatcatcatcacttatatatatcattttaattttgtaagtgcacttggattagaaaggatatataattatatatcaactactttgtttggtatatcttttaggtcttaatttcgttggatgattaaagttgtagctgaccaatactatgctaagtcgctaaatattttaattataggaaatataagatctataatacaaccacaagagttatccaacaaacaacaaccttttttgtgaatggtatctatattcgttgaaaatgacggtataattttaaatagaaattgattacagttttttcttttctttgttatgcactatagaaacttttttttttttttggattcaagcatgtggctcaaccatcagggtatgtcaaattttttgaatgaacacatcaactaattaaaagaacgtaaaagttaataactatttttcagaaatgtaaacagtaaaatcaagacgttaacagttaaattcaatcaagcaaaatgacagtacacatgtcggatttgctcagatcctcaatagttctgatgttcttgtaagtttgtatcccaaaactttctgaaatttagtttaaacaatatatttaagtggtccaaagacttcacaaacattttttttttacggaataataaaacgtggaaaggtcaaaggtaaataaataatactaatagcttactaattaaggtttatcattagttttaaataaataatactaatagcttactaattaaggtttatcattagtttctttataaaatggttcggactcctgagggtatatggctgtaccttaatttaaatacatgaaagtattggtttactatcatttgattttctttcattgttaaattatctcatatattcttaagttacataataaaagagtattttttcatgacaaattatcgcttttatattttacatacttactgaaccgtatcatatcacatatataaacaatattatatactaatggctcgtttaatttttttctttttaataaattagttgacaaaaattataaattagttttttaaaatttaatagaaaatacgttatgctgtcaaaattaaaaataagatagaaaatatgttgtatatttagttatttactaaaagcaattgaatggagtaaaatttgccacggtcagagttattctttcttaagttcactattttaggtcctcaattaattgaggccaatttgtctttttgtaatctcattatattcatcttctttctctttctcatcgcaccaaaaatgccttttgcccctctctctctatatccaacccatgtctcctctttatctctctaactttccccttagagagattcctctttctctcaaactagggtttcctctctgaaaacaacaaaaatatcccaataattgcaaaatctacttgaagatttttcattctcctttcttataattaatgcccaagagagaaacaaagaagatcaaaccttctcaagaagttatcaaggaaggaccttttcttgttgcgatccatttaaaggtaagaccaagagtttttcattctgtacagccaattcactcacacttgcataatatatatactttctatatatgttgattgattatataaatttagagagtttagatcatgaaaatttgatcactggtcttgaactaccaagttataatttggacgaccttttttctttacaaaagaaagaagaagttacaattgaaagtgaaatcaggaattcgggacttctaatatacagtgaaagtatcctatatagcaggtaataaaactcggtcataaattcaagattcaaactaatatgtagtacatgtggggaactcagagtcagagagacagagagtgctttgatgagaacatgttgtttgtttgtttagaactaatactagctctaaaacgtaaaacctgtgtgagtaattcgaatttccgacacccattttcttcatattactatgaatatcatatggacgtttacattttaatgtgtaatgttacacaagtttatataatttcccataatcgtcttgtgtgttagattcaccaataactttttagtatggattattctcaatttcccaagattttataattatgtaaaattaattcattagacaaggatgtatatatttgtttgagatatatttgaaatataaatttaggtggtataacatctttttgacgcagaaagaacactatgaataatgaattttaaggataataagataggaacatgcatcatacgtcttctaagttatattgatgatgagactattatttctagttaccattttacgtagaatataatgaattttgaggattaaaagactaagaacatcatacgtcttgtaagttatattgtattgatgatgataccattttattgctactttgctagttaccaaattcaaaatggaaataaaacatttgaaactgtatcaatttttaaaaagtgtacgtagacatattgttgataagatattgataattgatgtatatagaagaagaagagactccagagaattacaatatcgatcgatatggatcaaaattcatatcaatcttatactgtagtttcgagaattactaataagatactatgatgtgattaaatcgtttttgccatttttttgcaactgaaaaatcaggggatatatatgtcgaactacacaaactcaccgtgtgcagcatgcaaattcctccggcgtaaatgcacgtcagactgcgtattcgcaccctattttccgccggaggaacctacaaagtttgcgaacgtccaccggatattcggggcaagcaatgtgagcaagatcctccacgaagtggctccccatcagcgggaagatgcggtcaactcgctggcttacgaggcggaagcacgacttaaagatccagtgtatggctgcgttggagcgatctcggtgctccaaagacaggtcttgaggttgcaaagggaactcgaggagacaaatgctgatctcatgaggtacgctggttgtctcggtggtgaaacgacgtcggcttatggtggtcggaggggttgactggtcaacgagagttgattagtcatcatcactctttgagaaaattagcggcggagaagtataaagagagagaggatggttgatgtgatggtaagtgttattagtcgtatgtatatatgtgtaaatatggggacatgcatgcatgtatatttatgtttattttcatgtatatacttatgcgtatgtgtaatttaacttgtaatttttttttcatgggagaggtcaaggaatatttttgatgatgttgaataactagatcttgctcatgctcatatctccataactctctttaacttgatctagctccactgatttacatgtggcccattggtcattattcacaagttttttagtttctgctaaaagatttatgttctaaattatgtatgtacacatatttcattgattaatgacagattttctagcattttataaagttgcattcaacgaattgtgattgcaatattactattgtattatgatattcaaaagaataaaatttcatgtcgacggttttgtatagactcataggaatgtaggctaataattggttgtttgattacacacactagtcactggtcagaaacacaaagttgctaatattttaagttaattgagtgattttatatatttgtcgacttgaaaaaagtttaaataaattaatcaatttagaaacaccaaaattttgtagctttaatttaggcacatgtcttcatagggaatctctttttaaagtcggtccttttataattttatgtcatttggggcgaactaacaaccacatatatttacatacaaatcaactaatcttgtcaaaagaagaaaataacaaatggaacttttctttttgatgagtaagattgcttatagttttttaagattgagtatgatgataccctaataataagttaaaccaaaagctcaattattcatgtatcttaagatacggtatagtttcgggtagggctaagcacgattatttgttactcgatcctgtatccattatttgcctcatatctgttttgaaaaacaagtctatatccttgtcgatacaagtaataattaatataatttatatacttttaaatacaagtcaagtagcaaataactaaacaaaactcatatataacccgattgttttatcctaatcattttattgttaataataaaaattagtgatgccaaaaccagtaacactattacttttgtactagtactactttttaccacttattttttgaaattatttcgttatttttactgttatgtcgtttttttttgtaccactctatttattggttacaaaattgcccaaagaaataccaaatgacgcatcatatttatgctgtaatactctttacatcaattgtgcttggaacaaatagcgacaattttaagagaatcaattgagttagttaacaagcatcttttgtccaaaaaaaaaaaaagttaacgagcatctagtcgaatgtgtatatattgttcacatgttgatatattgaatgccaattatgcaggacaaatagtcatacgtagagttctttgacttccatgcgtggattaacaaattacatgtcgacgagacagggggattcaagatttgtgtaccaaacaaacatgagtcagtttcagaaacagtaactaaaggtacattcatttgtttaactctttttaaacaacattatatttttttattatcacactatcactatctactgcagaaatatgattgttttgccatgtgataaatcatatcaaattgtactcatttaaagacttttcctcaattattccttccatcactttcattctccctaaaatctctcataatttttcttttctcatcgatgatatctttttttatacaatacctaaataactaatcatgaaataaagtgtagtagtttgtgctaattgatggtattgtgtcactataaatgttgatttcaaagaaaactaaacaatgataacaaatccttatattttcaacaaaaattcttatcttatgcaattgagaaagaaaaatctatagtttattttttctcacacattattcttacaattaaacttttgtatattcaagaagtggacttgtgaccatataataatcaagagaaactattgtactagtgtccccatgtatagaaaacctactgttttagtacttgctatttgagcaaatagacataactttttacaggttaaatccaagtttgaaatcaatctcatcgttaaaaaggtgaagatcacacaaagaaaacgtcaaatggatcatactgggcccattttgcagaccaagagaaagtgagagagagttgtcctctcgttatcaagtaacagtagaccaccactaaaccgcccaatagcttataatcaaaatagaaaggtctaataacagaaacaaatgaaaaagccttgttccatggactgcctacccgaattgattgattcgactagtttttcttcttctttgattaagacctccgtaagaaaaatggtactactaaagccactcgctaccaaaactaaaccattccagactgtaactggaccaatatttctaaactgtaaccagactctaaacatataaactaattaagaactataaccattaaccgtaaaaataaatttactacagtaaaaaattatactaatttcagctatgatggaatttcagctcttaagagttgtggaaatcaagtaaaattaaaatcataataatattcttcatccttatttttgtttcacatgcatgctgtccaatctgttattagcatttgaaagcctaaaattctatatacagtacaataaatctaattaattttcattactaataaaatgcttcatatatactcttgtatttataaatcatccgttatcgttactatacctttatacatcatcctacattcatacctaagctagcaaagcaaactactaaaagggtcgtcaacgacaagttatttgctagttggtgcatactacacacggctacggcaacattaagtaacacattaagaggtgttttcttaatgtagtatggtaattatatttatttcgaaacttggattagatataaaggtacagttagtgaaaatatttggttagcgggttgaattaaccggatataggagtcatatatacaactgtgaaaaaaggataaatacaaaaagggaagatgtttttccgacacacaagctaattaagtgcatcgagaggagagcaattgtaaaatgaatgttttgtttgtttttgtacggtggagagaagaacgaaaagatgatcaggtaaaaaatgaaacttggaaatcatgcaaagccacacctctcccttcaacacattcttacgtgtcgtcttctcttcactccatatctcctttttattaccaacaaatatatttcaatcccatttatatgtacgttctcgtagacttatctctatataccccctttaatttgtttgctcttagcctttactttatagttttatatcatatcaatcgacatggcgaatgtggatcgtgatcggcgtgtgcatgtagaccgtactgacaaacgtgttcatcagccaaactacgaagatgatgtcggttttggtggctatggcggttatggtgctggttctgattataagagtcgcggcccctccactaaccaagtatttttgtggtctctttagtttttcttgtgttttcctatgatcacgctctccaaactatttgaagattttctgtaaattcattttaaacagaaagataaataaaatagtgaagaaccataggaatcgtacgttacgttaattatttccttttagttcttaagtcctaattaggattcctttaaaagatgcaacaatctaattgttcacaaaatgagtaaagtttgaaacagatttttatacaccacttgcatatgtttatcatggtgatgcatgcatggatcatatctagagatttatggttggatatatatttaacattttgatattagcttttaaaaaggtctgaataaacaacacttgttagataaactcgatataatcaatacatgcagatcttggcacttatagcaggagttcccattggtggcacactgctaaccctagctggactcactctagccggttcggtgatcggcttgctagtctccatacccctcttcctcctcttcagtccggtgatagtcccggcggctctcactattgggcttgctgtgacgggaatcttggcttctggtttgtttgggttgacgggtctgagctcggtctcgtgggtcctcaactacctccgtgggacgagtgatacagtgccagagcaattggactacgctaaacggcgtatggctgatgcggtaggctatgctggtatgaagggaaaagagatgggtcagtatgtgcaagataaggctcatgaggctcgtgagactgagttcatgactgagacccatgagccgggtaaggccaggagaggctcataagctaatataaattgcgggagtcagttggaaacgcgataaatgtagttttacttttatgtcccagtttctttcctcttttaagaatatctttgtctatatatgtgttcgttcgttttgtcttgtccaaataaaaatccttgttagtgaaataagaaatgaaataaatatgttttcttttttgagataaccagaaatctcatactattttctattgtaacgagttttcttgtattaaatttagaagaatatacaaaactaaataattaaatcgaatcaaaataaatcacaatcttagactcctagtacggacttgaattaataattttgattctctgagttcttgaattaataattttgggtcggttcggtttctctattatcttattgggccaaatcggacggcccattatctagctccggcttatcggacttcctcttccccggcgctgtaaattccaagtccctccgttcacgtctccaaactagccgttgccttctctctctccagccaaagcgatggcctcatacgctacgttactggagaaaactcgcgtacctcaaccttctatacaaagattcgcagtaatctccgtcttctccaagttacgatctgctccagaacaatttggatcagaagccgaagccggaagagaagctatctccttctgcctcacttctgaatctatcactgtcgttgatcaatccgttcatgagctatgtcgattagtatcagactcagttttagacctctctcgtggtttgctagaacttcaatcagctctcgaaggatgcgattcgaaattggtttcgctgttcgtgaaagggttagggtttttgattcgtattggttatgaacggaataatgggaactggaagtttaattcgacggagaatcatccgtttgttagggtatgtgatttcattgatgctttcgttgttctattgggaatttttggaattagctagtctttgatgtttcttgttattgttgttgttgtggtttcagattcaatctagccgagtggagacacagacggagcttcttcatcaagtatcactctttgtgatgcataatcgaagattaggaatggtgggagtatgtgaattcttggagccgttcttgaatttcactatactgcggattccgctttcagattcgtcttcatcgttgtttgcgagggagttgatttcatcaatggcttccctttgttgctcatcccgccacgaagcactaccgatattcagattgcttatgcgatgtctaaaatatatcccgggaaataatctggaagtaattgtcaagatcctagtggatgcctacactgtggttgtgagagacttggttggaaccggattggtatgtgcttatttcatcatgcattcatcttaaactttgtgctcattgtctgatacccatttaattatttatactagcaggaagtaacagaagttcatttgctcggtgtgcaactggtggatggcgtactttttctttgcgcttctcctcatgtacaaacaaccgaacaagagtctgttatcgaatctttgaagcacttgttggctgttcagaaagaccttggattagcatattcacatgatttatccttggtggttctctcgctagttttcatgcttgccaaatctactgtcgagcatgaacaactctgtattctaaagtttctgctttttctgctcaaatggaaaactgaaagtggtatatttgtgtctccatctttttattcattaccctcttgctatgtgtgtatttttctgttgactgagaattgattctttggaatccttttgtagaaaacttgtcggttaaggatgcggctggttcaagtgtggagtctctattattgttccctatcaccgcactgatgtcttctccttctaaatcaatcaaagtagcagcaagtaaggttctttccatcgtagaaaatttcttggtaacagtgtcaaatgcaccaaagattgaggtccacacaagtaagggagattcaccactcagcagggtgggctctgtcgtatttaggttcatgcagcaactctggcatcagaatgattacacaccttccacgtcttccttcctcagagtggcttacaccaatggaagtgaaaaacaggaaacttatctaggaccagtgacttggaattcactacttagggaacacgctgaacggttttgggataaaaaaaagttgtctgcgtcgttttgtctttcacaagagatacctattttacttggtgctgttgctggtgtcatggtgatgcacccgtcactaggagctgatgctattggttctttgactattattggtggcattgattctaagatgagtgtcccgctgttgctagctgttctatatttcagcaacttgttatctcgaactaacgtcccttgtcagagtctattggtgagaccactctcattcattttatgtatcttcaaatccaagtgcttgtctcttctatctattttttttccttagtctagttcccattttatttcttttatgtgcagtcaaaacttctggggttgctcccatcactagctgcacaacaggtgatgattccacttgtagttcagactattactccaatgctacgcaaggatgccaaagggtcagtacaccttttctgatcatttcttgtgtaccatatttttttaatcgtttttataattatatattgatttggaagccaaaaaattagtatgtgatgttaaatgctttaatctacatttaccaatcttgttgaattgggtttctgagctagaccttgtttccatttctgttctgccataaaatggagttgacatgactaggctctgatgatggtttattttttagtctgttgtatgctacagctattagattactttgccagacctgggtagtcaatgaccgtgccttttcgagtttgcaagtaagctattcttaccactgaaattttgttcgacattgatattgtcaccttgctcatgcttatttttaaatatgcaggaggtgttacgcccgcaaggatttatagaatatatttcagagagacatatctgcattagtatggctgcttccatccatgatgtatgcaagagacaccctgatagaggagtagacctaatcttgtccgttcaggtatagtttaaagtaatgtttgcgctttttgctttgcctgtttttcaaaacttttggaatgccttcaaattttccactggattcatactttgataggcctgtatagaaagccaaaactgtccagttagagcccttggttttcagagtctttcgcatctgtgtgaagccgatgtcattggtactctcttaatacttacttgtgttagttaattcctttctatgttactcagtttttatctaataacttttacgtgtctatccagatttctatactgcatgggatgtcattaagaaacatgctcaacatatcaaactggatcctctccttgcttataggttagcagagctaacatccctaatcatatttataggcacagttgaggtgtctgaagtggtgcatggacattgttttttgaggtgcctgaaaacatatttgatgtataactagcatttttttggtgaatatgttgcagtgtatgccatcttctaaagtggggtgccatggatgccgaagcatatcctgaagatgcagaaaacgttttgaacattttgtgggaaattgggagctctatgcagaagcctcatgattcccaatggacaaaggcaagagtctctgccatagtggccctgggtcaatatgaggtaaggcttggtctcttgtacgtcttcttttaggcgtgttctaagccatctttggttctaaactattaatatcaacacttgtatctaattacgatccatatttttcaggtatcatttatggaaaacaagttttctgacttcaacaagaattgtacatatttactcttctcggagacaaatgcggaaattctgaatgctttagaagacctttcaatcaaaatcatgattcacgagcacaggtatagagcttgtaatctactaaactttttctggtttagattcccatcagcagcatattaaaactacttctctttctgacctttcagcgtccggcgtagatatgtaagagagaagaaagttcctggtagtaagattgaaaagctgcttgatgtgatacctcaggtcatcttccctgcaggtatagtttgactttcagctaaaatactccttaaattgtcgccacaattagtgagaaatgcaagtgagtctgttggaataaataaataaaaaccttgagatgggaggtatgcctaaacattttttacttgtgcttctttttgcctaataacttacttaacttgtcagttcttgctgtgctttgcaacttgtgtttcttataagataatgtcaaagtatacggttgcatcatgaaatactcagttcgtttcgttttgttattatggatagaccttttcgcttaatatgaagatcatcacttatgtaaatttctttgtactccatataaactaaatgcagcaccatttgactcacagggaaagaaataaagactggagaactacctggtgcggcattactatgtctatcttataaccccagagatgtgaagtttgggtcatcaagagtaagtattttaactttctgctaggaggtatcctatacttttgcatactgactttcatattttttaatcgcagagctttcatgatgttcattttcaatacgaggaggcatttagagtagtagtcaaatctctccagctctcaagaaatatttcccttgctcttatttccttgcaatcactgaaagcttttatgcggcgttggatgagagcgaatatattgtccattgatgcaacgactaaagaattatcatcggataagacctctaaagctacaaacaacatcatgaaggtttgagatagtgtttttctgttgcaggttaattcgaatgtttcattttaagtgttcaaaccttaattgagaactgttgtgttgttcatgtagagtttggtacatatggctgaagaagctcttcccaggtgtgcagaaaacatagcactggcgctgggtgcactatgtgcagtaagatttcatagaaatgtgcttccatatccatagtgccactttctcaatgtatatctaaatctgtttgttgtttcaggctttgccagctgcttctcataatattaaagcgtctgcatcaaaatttctgttgagttggttgttggagcatgagcatgaacaccgtcagtggacggctggtatttctcttggattgatttcgtcgtccctacacgtaactgaccacaagcagaaatttcagaatatatctgggcttcttgaggtactacttatacctatgagttaattgtgggaaattattacagtgctaactcttttattacttggtctttctcactccttacatgatttattttcacttttaagtaagtatgcagatgaaagaataatttatcatgtctttcaggttttgtgtagcagtaaaagcactcttgtaaaaggagcctgtggggttggattgggtttttcatgccaagatctgctcactcggactgaagcctctgcgagctctgatatagacagtgactcctacaggaaccaagaagaacggctcttgggaaggatagtgaggttgctatcttctatattacatggtttcctgcacactccgtgtgatatcctagaaagcttgtctgcactgttcccccctggagaggaagacaacgttataggtttacctcagctgttggatgagagttctgatgattttgatgatgatacatggggtattgctggactcattataggtttggggatgtcagttggtgcaatatacagagctgggaagaaagacgctgttgtaaagattaaaaatctgattgtatcatggatcccatatgcagattctctgaagcaaacctcgggttctaatagtaaggtatcagtgagactgttttcagtcggttcctgccttgcactcccaattgtgataactttctgccaaaaagtagaactgtttgatgcacatgaggtagatgatataatcggttgtttcaaggaccttatttccgagttgctaatcgttagaaagtctggtgctttacgtaagaggttgttgatggcttcctgtattggggcgggagacctccttggttctgtattgaatgaaggtatccaccctgttaagattgagtctgtaaaagagttactagaactgttcaagaaatgttactctggactttacccaccggttgctcactttggaggcatgctcggagttgttaatgttttaggagcaggtgctgggaatttggtgtattctcatcctcgaccccgtgctcctccagccagttctgaggagaacgtaagttttctggtctatctttctcaaagatcattgctgatttattcccttttagataaatgtgtatgggttcctaacaattcatttatttgctacaggaaatctcttatgtatcaggtcctttgctttcaaacgcatattttactcagcagttgacgccagttgtgcaagaaatatttcttatcgcacaaaataccaaggatcgccagctccaacattatgctgcatgggcaatctcaattcttagaacttacatgcggtcaggggaatcgtcaagtctcagcaatgaaaaccaatctgatgactctgaccgtaattccatctctcacaatgttcctgaacataccatggtcatgaaacttgctcaaggcctgacaaatccaagttttcctttggcgggtagccctttgaatattggcacaatggcaagtgctttgcggtgtttgtctcatgctccgagattgccaaacttggactggggagcaacaataaggcgtttaatgaaacaagagactcagactgatgtaacgcaatcaggcgatgttcctaaggaaataactcttagggaagagtgcttcaaattttcattagcccacgcaagcgaatttgatgaacttctagcttttctggacgaactgtcggaactatcgagattcaaggcactagaggagagtcttcagtcgtgcctgctctgtcatctagggggtttaatgagaatattctcaggttcaagaatgaataaattgtttgacgatgtctcttgctttgtagtctcgctatcatcagaccaaacatatagctgtgatcagaagagctcactgagggtctcttgttggaagggtctgagtcagtgtcttgaagaaacttcacttgaatcttcagaatacgtcacaaagattgaaaaatgcatagagttgctttttgctgtcttaccagtagcatcacaatctcctagagcagatcagatgggttcggtgaaagagtggtcagaggcagttacatgtttgcagaagtcgcatcgggattggttatacaaattcctacaggtatgtaatctgcttcatgcatctcttgtttgccagtttgtaagctacgtatcatcttcgtcgtttaattgagattttttctcgtatgcaggtttcaaatcttgaacctggaaacgaaaagactaacttccaaggtgatctaaagaagatccaggcaaaagccaagctagcaaaacttggctcagttccattttccgagttaggaaaattgaaagctattatattaaattgtgaagagtcaggtcagttactatcatctgtgtttatatgtaagctagatacaatcaaagatcattatacaattaaagttctttgtctttgttagatatctgggacgtgttgattgagatagtagcggctctgcatcacgctgaaggaggaatcaagagacagtggctcattgatgcagttgaaatcagctgcgtttctagccatccttccactgtaagcctcgatgtcaatatctcatccatcaaaagagattattctttttttctatgttgaaaccgatttttctccttctacaggctattatcttcgtcggccttctttctagtatctgctgcgaatacatgccgtttctcaatttagaccgctccacggtgttgagcgatatgtctgttaccgtaacttctctcctttctgatccaagctatgaagtggtcacagagcctttcatctcgtttctatggacttcattggaacgtgtttacagttttgcaactgaatctgacgctaatgcaaggctaagctcacagcaaattgcgcaaagcgagagagataaagcaccaatgcttgtgaaagtgatgcattacatttgtgtagccttcagagatcatttgcctcttgagaaacagcttagacttgcttctatggacatgtcttaattccttaaaacctattgtatagtttttatatttaggagtattttgttgtatttttaatttttagcgggaatttcattgcccacactgttgtatttttgaaagatatataagaaagtgaatatgaaggttgaatacaaatttcaaatgaggtacatcgacatagtagccaactttatcataattaaagatgtctatgattgctgattaggagaaaactaattgaagaagttaatgagtatgaaagcaataactcgtgttttcccgtatcttattatgtatctaaacaatgtactatttccagatggggtttcagaagtgttgtctttcatttaaaaccatggctttcgaataataacttaaaagttgttaagaaaaatgaatgctgcctttttttcattggtcaacaacatagcgaataagagcttcatattttcgtattttttttttatcatttaagatgtgagtttttttgttctgattatttttgttgatgctattattatgaaattttcatatatgtcttttcggaaagaattcatcaaaccaaattatgatatcattttcttatatatttatatgaaccagaataatatttttatttatcatgggtggcattggcaatcgcaattcccaagcaaagccaataataaccaataagaatcgtaagaccatccttattgatgagttcttagtagaattcttaacattttggatagacaaaataatatttaaatattaaatagttcttaataagaagagaaagtgtatcaataatctcttatttaagagccaattttatttttctaaaaacccttttctattttttatttgtattttattttatataatattttaagagtttttctaaagtttttaagaacctattgataatgatgctctaaaaacatctttaatggaaggttttaagatgaatggattcttaaacaaagtaataaaaaaataaaaatttgaatgaaagaagaaaaagaatgaagaaaggcttttagctaaaagcatcaagaagaatttttgatactcaactaaacccatttaaatgacttgtctctcatacattggttcactttttttctaaaattaaaattttagttatataataaaattacaataaaataattatttttgttgttgttaagagtctcttagaaatgcttattgtcgaggatggtctaaaatagagttggattaaaacactaccgtcttgctcgctgacatgcccatattccacagccacaaaatcttcaactgacacgtggcataactaaagcctctacatatctcaggcacgtgaatctactttgtgaaaacactgaatccaatgtttccagtgtgtgcatagagttttatttttagatgtcaagatgtttaacttggttggtataagatatccttctgtattagttcttactaatagcaaatatgagatcttacaagtaaagatatcttaaatagtcttattaggtatacataaatctatcagaaatggattaaaaagaaaaaaggataaaatcaagtaacatttgtggaaaatcaaagataataaaaatagaatttaaaaatagaatttctttttgataatatcttatatatatataattaatttaacaaatagtttttgttacattttgttgatgatgcttacccatataaatgttttatttataaataataatacaacttttttattctctaatagctcgttaaattttttaatttatccaatcatatactttattcatatcaaccgacttttttaagccaccttctttctttaaatagattccatcttctctcgctctccaatcccaatcagctccattatcataagcagtatattgtttaaatgcggtaaaattttgataatgtctatagtttggtctttgtttcaaagtacacatgaaacgagtcgtaccccaaatgttagcgcgaaaactattcacgtaatcatatcccactggtattatttttggacctattacatcatttttggaataacacctcatccataagtttttatgagatttgagttcgttcacgattctaattccggtgccggatacatgaccaaaaatgtaaatactaaaaacaaatagaaaaactgaaaggattttcatttattttttttttgtttagggtagatgtttagatgttttgttttgttaccttgatttttgtgtttctctggtactatatatacaaacacatatctgtattactattatttgcacgatatatctttctttattagttctaagttataacaaatatgatatcttacatataaagatatcttataataaacgtactagagtactaggtatacataaatctatcggaattgaattttgaagaaaaaaagataaacattacgttggcttactttatatgaaattcaatgaaaatcacttagccaaagaaagatagaaaaaaatcttatgatatactctttgtgtacgtaatataactttgtttataattatttatcaacgcaatagcaagcattgccactaaaccaataagagagtgatcatgagcatgttgggaacaacactatccacttgttcgcttacgtggacatttttcactgccacgagatcttccactcccacgctgcataaccacaatctctacatatcttctacacgtgaatctagtttgtggaaatctaaaaccaaccaatctacactcgctgacgtgtctatatgttaatcttcccacaaaatggagtaatgaacactttactatataaacggcgtctccaattcaacaacatctcattctcacttacttcttttctttttttgtgttcttgtttagaagaagcaatggccacttcagcaatccaacactcttctttcgctggccaaacgaccctaaagccatccaacgatctcctccgcaaaatcggagcctccaatggcggtggccgcatcatcatgcgtcgtaccgtcaagtctactcctcagagcatctggttccaacctcacactctctctattaaatgacctaatctttgttattcttgaaagagattttccatttattacaaatgccaaccatctaatttagtacccaacaaaacatttgtgacaggtacggaccagaccgtcccaaatacctaggaccattttccgaaaacacaccatcatacctaaccggagaataccctggagactacggttgggacaccgctggtctctcagccgatccagaaacattcgcaaagaatcgtgagctcgaagtgatccacagtagatgggcaatgttgggagctttaggctgcaccttccctgaaattctctcaaaaaacggagtcaaattcggtgaagccgtgtggttcaaggcaggatctcaaatcttctcagaaggagggcttgactacctcggaaaccctaacttgatccacgcgcaaagcatattagctatatgggcgtgtcaagttgtgctaatgggattcattgaagggtacagaatcggaggtggtcctcttggggaagggcttgacccgctttacccgggcggggccttcgacccgttgaacttagcggaggatccagaagcgttttcagagttgaaagtgaaggagcttaaaaacggtcgtcttgctatgttctcaatgtttggattctttgtccaagccatagttaccggtaaaggtccgatcgaaaatctgttcgatcacattgcagaccctgtggctaacaatgcttgggcttacgccaccaacttcgtccccggaaaatagagtttgatcggataatttatgtaaattatatcttttaaacatttatcaatgcattaaagttatccctatatttgatacatcggttccattttttttttttttgctttggttagaattctcgtttgctagcaacttggcagtacgtttaaaaggctaagacattcgaaacataagacactgaattacaaggcagttataaacgtgcttaagtttccaaattcaatagttgagagacattgaattacaaatgtttgtttatctacaactgtccctatgctaaaactgaatgaaaaaacaatgtagttgcaagattctaaatctagggaaaaaataatacaagtctaccaaaacactgcataaactttcaaaatggcttccgattctggattccacaattttttttctaaatgacaaggaatcaaaatgtccagactatttacaacagaaattgaaataattatagcagctaatgactgaaaaaaaggaacaaagatctgctggtacaaagacccaaccaaatgttcttggaaggccaaatgtaacaatacacttctttttttttttttttgtcttctcttttctttttcacattctactatcgaaaaaaggaaaacaaaatacttagatatgtatatatcttttgctaccaacaaatattaacgtctcacgaattggcttaaaagcctaagtcggagaaaaagatcactaaaataccagatccaagctcaaaagatatgtttctgagacaaaaatattacctcactgatgaatttgttcagattgttcttcatcagttcctgcagttgcaatcacctcagaagctccttcgatggactcgtggttacttttattgttatcattgtcgctttctttggtctcttgtttatccaaagtactgtcgttgtctccagaaacatttgtattctctggttcttccgtagaggaggtcttgacttcaactgctggttttgggtcattagagacagaagcgcacttgtttttgctgctaaggttgtcacgagaaacagagagactattactattgttattgttattgttgctctctctgttgctttgacgtgttacccacacgagctgcaacgtgtgttcttgccaacactttgcattagcaaacgctttctctgctgcgctgcgtttcacaaatgtgacacaagctgcacggctttcgttctgtgtttcatgatccttgccactatcaatcgatgcattgtcttccagttccacttttgagacttcgccgtaagatgaaaaatgttcctttacgacagcaacctggaggtaaaaaataattcaaaactcagtaagtgagtcagtgactaaaataaacctataatttagtagtctttaatctagaaagtgagaaagtttggcacattcataaagcgtggtatttaaacaaagggaaagaggacatacatcagctaacccagttggcaaaggaggaaccactttgatggtcgtggtgcggttatccaacttatacctatttaccataggagcgttcaaacttgtggtaaacgaatatggtctttgcttaaagttttttgaatcgggtgatggcgtttctgtgcttagtttggcggtggaaagtggtttcaggataggcactttcttatctgtcgatgactctgtttttggtgatgcaattgcagctcccgaatcagaggctgtgtctagtttaacacgcttagcatctggctcatctgcttcctccctcttgacaacagtaccctgagaagatttagagcaagataatatgaatgttgtccaagtaaatactttcaactccatctatgtgattttaagtaagacagagtcaacaattttgtttctagtgtagaaatcattagctgaagacgtccaaaagaaaatataatatatcatgatgcaagtaagtctactcaaatctctgtgcgaaccgaactcagttttatattataatcagaagtcagatttccaaaaggcacttctgagattcaaatccttctacttctgctaaactttctagtgactggaaatttgtaattgtccttttaaacggtattaccaggattgaagaaaaagatttagagatttagttacttgttcttacttgtttttcaagtgtagccaattttttgcggtactcgttacgcttctgctccagcatttcctgttttttacgaagagtctccttcaaccgctcaagagtgtctgcttttttctgctgaagcggcgtaaccttgggaccactggtggtcaccaccacaggcttaggctgttcagaggaggatggagctccaccagtttggaaggtagggaccttagcaattgaagatacatggttgcttttcgatgcagcagcaataggaaattggttctgtgctccagaagcagtcatactacgacccttcatagaagcaccactgccagtggacaggccattatcaggtatactatctctatttgcccaccaaagtttgatgaagcggttacccatcacagcatcaggtgccctgagggcagattcagcctcttcacgttttgagaactgcacaaatgctctctcactatttactgggatgtgaatgtcaataactttcccaaatttctgaaaatgggcaagaatgaggtcccttctgttgctctcgtgtggaacataattcacaaatagagtccgcattgccttttgagttggtttccttgtattgttcatcatatcatttgaaatattcgatgaatcaacaacttttgcgacactttcaccaacatggttttgtttaccgtgtcgagatgaattaactgagacctccttcaattgatcttcaggaacagctgatgaatttaatactgcatcagctttctctttggaatttgcttgactattagaacctttcattcttccccaaactgattgacttgtgcttctagagtctctaataccacacccattttcagcggcgtcttggttactgtcatccagtggagccacattctcatcaaccccatgagaattgagtgtagatattgcacctgaagtttcaccagtactattattccacaaaggttgatcaggatcgtaaaagtcagttccaccagcactaggatatgcatccccataacccaaaccatcaacagccattcccccctcgttagtcctcccatgagctcctttaggattcatgaaactggcacccccaaactgagcgggcacttgtttagaagaagctgccagatgaggtgcaccagggactgaaacgggaaggttaaactgtgatagactctgcacaaatggaaaatgaaaaaaaaattactcacttagagaagaatagtgtaataaaatagtagtcataagaaatttatccttcaatacagagtactagcaattcgacaaccaagatttcattaacatgcatctaagaatcagaatatagtttgactgtttctgagagccatgccaggtacagctaacactgaaaacataataatttaatttaatgtcactaacaagaacagttgaaagggataaagtggtcatgctactagcaatatatgcaagaaacatcgatgtgctgagatttccagcacaaaggaggatcatgcaaatagttatcaaatatccagtagaacctataggtattattgtgtttttcgagataagtctaatcccattgaagcaaaaattaattcaagaaacatacctgaacatcgtcaacaacaatacgattcattccatgctccattggacacatgtcccctctgaggcagaaaccacgttcctcaaagtctctgcatcgttgccgaggaatacccatgttaagtggcgcatttaagggcggtctaagggacccttgtaagtgatggaaaccatccaagccaccattaggaactccaggaatcattccaaaaggaggccatggtgcactttgagcagctgaaacaccagctagtccccttcctccaaacataccctggcccatagacccgacttgaaccatatgagatgagagatcaacaggattaaacctggaatcacgctgggcccaagaaccatagtttcctctacctctaccaggaccagagtcccttgaaaacattgggtttgacctcattctttggttatcaaactgtacacgttgccctgatccagtcccaaaagaccgcttttcatgttcactaaacgaattgccattttcataatgtctatagtttttcctgtacggccgtgagaaagcctgatctgaagaatcttgttccaaagactgagacctggtctcttctttcctacggtgcttatggttgcgatcatcatcctcctcctcactgatctcatgctcctcctcagggtcactcatacaatcaggtggagataacacactttgctttggagaggaaacagaaagttccatgaaaccacttcaatattgcagagcttcttgtctctcatacaaaactctgatacaatttcgcatccatcagatcaaagagtataataccaaaacgaaatcctaaagcaatcaatactcaaatcctaacgtatatactatcgattaagttcataattcccacaacaactcgaaaacactaatcaattaagactaactccagaattctaactacaagcagcataagaacttagggtttatacgaacctagagagctttcagaaatcttcaaaaaaaaaaaggaaataaatcttacaggttctcttggaataatcagtgactctgttcgctcctcttcacagacaaacaaaatcggtttcggctccgacgacgacgaaaacctaaataaaaaacaatggatggaacatttggggaagaaattggacaaaattggaggaatcgtcaatgaagattgaatccacggcggagatttttggccgcgccgtcgaggtttcggaattagtaggagaatcaacgtcgccgatagcgactggtctcgtcgttagggtttgatggagctgtggaatagctgagaaagagagagagagggtagagagagaaagaggggcttatttgttattgcaagtaacacaaggaaaggcgaggaagacagaaactagactggaaaatgttttattttctaccccaaaaattctttaattttacaaattgacccaatatttatttaagtttacaaattgccccaatatttctttcgtattcgtaatttattatgaaattataaaaatttaaaactcgtccggctttgaacaaagcggactaaactgttagcaaagtaaaccactctgtttaaagttatgtaaaagcggttcaaagttagtatttcgtggatttgttcaattttttctaatctagattgttatagattatagtttatgaatagtaaataaaaagcggctataaccgtcacaaccattcatacctttatgattatggtgctgattgataaagattttgggaatgtgacactattaggcacttttggaaaatgttttgacgttttaggcacttccaagagtttaggcactttactttacttttggtgaaaaaatggacaaaattacccctgcgattttgacgtaaattaactaaccttccttttttattgtggctgattatgttctttttaatatagaccgttgaattaaaaatatatattttcagatctatggctaagatgaaataaaaataaattattctctggttatctaaatctgataagaacatctctctcttcttctctacaaagaaccatgtcttttctatcactctctctaaataaatccaaaatttaaatggcgagttgaagatttgtaagtgctgagtgtgtgtgctgagagcaacgatggagtttgtgaagatagtgtaccttatgtatttactttacggagaagcctctctagatttcgattttgtgtaggtttgttacctttatttaatgaacacaattttgttttctttttttattttgtgaaaatatgattcacattagcgaaattgtgtgttgtgaagacgacgagatctgatgcatatgatctattctcgtagcctcaatctactgtcttgaaggtaaagatctctgcaaatttaaacaaaaatcaaaaaataaattttcagtgtacataataacaagtccattcatatgtgtccatagagaaactttttttactgagtcatatccattctataccaaatttttgtataaatctgctccttctacttcattcacccaaataatctctacgtagaacgattctctccctgaaaccatataaatatatcgtaatcataaaaaaaaggggtgataactttactaaacaataaaacgcactcgcagcaaatcaaagacatagttgtccattgacaagtgtccaagaagtcaagtccaaatggtcatctagtaattaacataatcaattcatatcaatacacacgataatcatcagttaaaagtacaccgtccatttttctttgaccaatatttgcttgtgtatggacacaaccatcattataaaatggatccatactatacatagaatattttatctagtgataaaacacattagtagtaaacaaagataatattgtccatagatgtttgtccgagcggtgcaatccatatggtcattgtttgactcatatggttatttgttctatttattttaagtttctgaaattctaagatctagcaagtaaagaattggaagaaaaataaaagcttcaattaaggtttcagagctacaaaactcataaaattgaataatgagtgaagtttgggcagaacccatgatcttaaattacgtaagtaaacacatacaaagcaaaaaatctatggtacagatccttaacccaagtcgtgattgtagcgaatccattatcttccgcttgattttgtattcgtcgacaaagagagagaaagagagagagaagagaaatgaggagagagtgattttgtgtttgtcgaaaagggagagaaagagagagagaagagaaactaggagagagacaaagattataaggaaagagaaatagttaaagggtaaatagctaaatttatttatacaaagtgcctactttttagaaagttcctaaacgtgtaatatgttttataaaagttccctataatgtaatattctcaaagatttttactataaacgattgattgtagagaattttgatgttactatggctatagtgttaaaaaaatttttaaaaagtttgaaaatttgtttttcattataatattgccatttggaagttttattttcatttacctttattttagtctatatatcgctcataaatttcagtgtgttgaattataaatatttgttgttagtgtcacctagttgtttatacttgttaaaattaattatctttttctattttcaaagatagaacaatttatttgctttttggaggaatagttaggaatcaactatcatattggctatctacatgaattgataagaataagcgaattggagagttataaaaaaagtcatctcaaatgaggcaatcgaactcaccaaaattatcataaaaacttcaatatctcatcttttgttatgcaaggtgcaatcgaactcatctctatggatggaaacaatcctttttcgctctagagaaaaaattgtgttgcgaattaaaactcttgtttcacatattttgtctatttatttgaaaaagtttgcattttaatatatcaattactcatttttcttgattttgaataaatttataaccaaagatggaaaaaaaaccttcaaaaacagttggcccccaaaccctctaataatattaagttggtagtacactattaatttattatatataacggtgggcacgaaacaaatatgtgattttgtctgcctaaatcatcactttttggattcgtatccgctcaataatcaaacatatatctgttaaaatcagaaattttaactgaatattcgatcacgcagtaagaattttaatatcattataatttaaaaacattgaaattcaaaactaacccaaaaaagaaatgttacatcaaaactatttcttcttaatttaaattcataaaacttcacatagatataatacttttacaattcataaatataattatatgtatatatatgtcatgcagagtgttatatatgtctcttaaaattttttgtatttgtgatttattaagttttcaatggatatttacttttataagtttattaatagaaagatctaattatatagaaagatctaattattcagataaaatagaaatggttaacgaattcaacatgtattatgtcgaactctaggatattataatggaatctcgaaattatatcttgagaactttaaaacaaagtaccaacatgttacaaaaacaatattatcacaagtaaacaaaaattccaacagaaaaatagactttttttaatcaaaccaatacatttgaacaagatattgaatcaagtttgaaagattttttatatattaaattctgtgttattcaaatggtcatgattttaaaatatcatccaaaattcaatgttatttaatatgaatcttgcttaaaataattcaaaataatacaatcccttattatatataaaacccatatcaattctagtgttaattcaaattttcacttttatggtaggaagtaacaaatatgcaatgcaagtgattgaaaaaagttctattaattggtaatgaactcatacactagcaatgatattttgaactttagacaacaacctaagagtttaaccacacagttgtgaatttgtataagcgtaagcacttcgtttatgaattgctttacttggctacactcactaaaacaagtcttctttatgccaactatgtagttttttttttatagaccactcattggcaaaccattatatttattgttcgtaaagatttaaggttagaagtagaaaaaaatgatgacattgatggaatgaaacgtcacctctaagtatagagtagaagacatgataaaaagagagaaaatattaagttttcatggatgaaaaataaagtctttagtaattatatgattaagaaatagtaaaatcaaattcactaaactcttaaaaaataaaaatttaaagcaagatacattagagagacctcatcttcttcttagtttgtcatcatatatgctttggtttattacatttggttatactacacataataaattaaaatattttaaaatttaacaagtaaatctcaccaaatctcatattcttcttagtttataggattattttgttaataaatcctataaatcaataaaatatcttaaatcatactaaactctattcaaatctaatatctactagatgaactaaaattcttggtctaatacaccgccttcaatcaccaacatcacacctcaaacttgagttatgatggaatcttgaaagaataatgtaaatatatctgttgatatcttttgagaactctaaaacaaaatcacaacagattacaaaaacatttttaccacaaaaaaaactctacaaataataataaactaatacatttgagtcaccaacatcacttttcatagataagttatgataaaatctcttaagcataatgaaattatcttcccataactctaaacaaaaaattctgtagattacagaaacattttttatcacacaataaacaaaaatcccaacaaaagatagacccctttaatcaaactaatacatttaatcacccaaatcactcttcatcgtcaaaactcggtaactaatcctttaaacttgcagctcaccagctagtctttaaagtgaattctactatttaaaaaaaaaatcctagtataaacctacaaagtgaaacattttccaaactatataaaatctccaactttttttgttgtccatataaaacaatcaagtataaacacttttctaaagaaaatcttaaatatttgtttccatgaaaaatttccaactaattaactttgtctaaataaactttcaagttgcgaaatttgtgctcgaacagtattggacttagcgataattttgtttataatagtaaacggtcgttggcgacataattttttgtttatatagtttccaaaatttctatgtaccttaaaaattagaaacaaatgtattctacatagttcgtatttaagctttttaacttttctattgtgagtttgtgactaacttgtataaattttgaaaacgaaataaacggcaaaacaagtcgttaaaagccgtttacgattactcaaccattgatcatgttccgatttgatgaccagtttctttaggaaaaaaaaaataattggagattttatttgggaacaaaagaaaatatgaagttttcattggaccgaaaaagaattaatttggaggtttaaatgggaacaaaaaaagctggaggttttactttggaaaacgtttctacttggagattatttttgggatttttccaaagcaaatctatgtgattttgatatgggcaagtctctaaaatataactagaatgagattttgtttcaaaagtaccatcactagtttttttttctcaaaaataccactagatgatatttgtttttaaaaataccccaaactaaaattaaactttgaaccttccaaactaaatcataaaccctataacaatcatcaaccctgaacccaaaattttaagttatcaatccttaatagtcagttttagtgtttgtggtgaatttggactaaaaatattggagctatacttttgaaagaaaaaattaataatgatagttttagaaagaaaaaaaacttagtttagtggtattttagggtatttctcatttgtgagatttcaccagtgtaaaaaaatgtactaggcagtcttcggtcgagtaaagtcgcataagttttgtttaaaagcatattttctaattttcaaatacttaaatttaaattatgtaatacccagtggtaataataagtatatcatatattatcaaaaatatcaaaataaatgaaaatattactaaattatttttgactacaactattatacaattatttttaaaacaataacaaaaacaaagatactatattgacaaaacaaatcaagtaaaaatatgcaaaacatagcaaaaaactttataattttagataagacttacataataaattaatatatttcatataattaattaaatgacgtgtaaatttgtttgtttctaagacttttaatttttatagcaaacactatgagaaatgatatattctttaaatttatattttttctttgactaatttgaataattaccttacaaaaaatatttttacaatgctagttatcaattgtataatttctttagtcatagaaatatatatttgcttttctaaaataatcctttattaaaattagtaatctattgaataatttccatataatatgtttacaaattacaaaatctttaatcaatattgtataatttctacataatgtttttacaaatgtcaaaatctttaatcaatagatatgacacgtatctattgattaacaaataataatacgtgtatactgattatgattatggtagttagcaactttgaatatataatatgatctttagtcatagaaatatatatttgcttttctaaaaaatcctttattaaaattagtaatctaatgaataatttccttataatatgtttacaaattacaaaatctctaattagtattgtataatttctacataatggttttacaaatgtcaaaatcatcaatagatatgacacgtatctattgattaacaaataataagacgtgtatactgattatgattatggtagttagcaattttgaatatgtaataagatctttagtcatagaaatatatatttgattttctaaaaaatcctttattaaaattagtaatctaatgaataatttccttataatatgtttacaaattacaaaatctctaatcagtattgtagaatttctacataatgtttttacacatgtcaaaatctttaatcaatagatatgacgtgtatctattgattaacaaataataatacgtgtatactgattatgattttggtagttagaaatttttaaaaatatactttatataataagatattaaaattagagataacaacagaaactaaaataaagaaaaattaaactcaatttaaaaaataagaaaaaaacaaagatttatttcaataataaggaaatggattttgcacccaaaaaaaagaaaatgaattaaggtcatctaaaaaagaaactagaatgccctaatataaatggtgttattgagtccatagtctcaaagatctcgccaacatatctatgcgacttttcttcttcactctttcccttgttttggctgttgataatcgtctcctctgacgattatcaaaatttgttgatcgatggatgacgactatatgatgttagatgatgattacggcgaggaagaggatgagaattactcggaagatgataattacagcgaggcagaagtcgatttgcaacccgtgacctcgacaaaatctactagccaggtgataaaaaaggaatctctagtagcagcacaaaaagaaattctggttagggttatggaattgttatcggttaaggagaaccaagctaggactcttcttatttattaccaatggaacgttgagaagttgttctctgtgtttgctgatcaaggcaaagatcgtatgttttcttgtgctggtcttactgtttttgttccttctttagttacttcgaagaagactatgaaatgtgatgtctgcatggaagatgatttaccaagtaatgtgatgacgagaatggaatgtggtcataggttttgcaatgattgttggatagggcattttactgtgaagattaatgaaggtgaaagcaagaggattctatgtatggctcatgaatgcaaagcgatttgcgatgaagatgttgttaggaagctagttagtcctgaattagctgacaggtatgatcgtttccttattgaatcttatgtggaagataacaatatggtgaagtggtgtccaagtaaaccgcattgcgggagtgcgatacggaaaatcgaagatggtcatgacgtcgttgaggttggatgttcatgtggacttcagttctgtttcagttgtttgagtgagtctcactctccttgctcttgtttgatgtggaagctatggaaaaagaagtgtgaagacgagtctgagacggttaattggataaccgttaacacaaagctgtgtcccaaatgtagcaaacctattcaaaagagagacggttgcaatctcatgacttgtaagtgtgggcagcatttttgctggctgtgtggtcaagctactggaagagatcatacttatactagtattgccggtcatagttgtggtcggtacaaagatgaaaaagtgaggcaattggagagagctcaaagggatttagacaggtatacacattaccattaccgctacaaagcacatatcgattcattaaagctagaggataaacttaggaagagtatccttgagaaggcagtatcaaattctgaaaccaaggatcaaaaggtgtttaaagaatacagctgggttacagatgcagtcaaccggttattcatatcgcggcggattctttcgcaatcgtatcctttcgcgttctatatgttcggtgaagagctgttcaaagatgagatgagtgaaaaagagagagagataaagaagaatctgtttgaagatcagcagcagcaacttgaaggtaatgttgagaaactttccaagattttagaagagccttttgatgagtatgatcatgaaaaagttgtggagatgatgagacacctcaccaatttgactgctgtggttgataacctctgcaaggaaatgtatgagtgcattgagaatgagttattaggtccaatacaatttggaaaccacaacattgcaccttacagatcaaagggaatagaacaagcaactgagttttgtgctgaatcttctgattgtggttcaagcggatcttcgtagaataagaagttacttcaattatctttgtttaactatcttttttatttcatagacatatgatgcagcgtagaatagaaatggttcttggttgttatggttggttcttggttgtctattcttaatgcgaattgttttctgattagttcataaaaagtcacatatccctctagctcatactatgttagaaaggcgcacatggcgggtacgtacgagagagcattcaaatgctgataaagagctggaatgttatatgagtcattgctaaggaggactaggtcatctgtcgaaaactgctcgcaggacgactcagcttgtctcttaatagtagaactgatgttcacgagttgcttggtgatagctaggaggatgcaaaactatatatgacaactcactgtcaaatactttacctagtttatttcctagcatcattcttgcaagacaagttcacattatgatatcgagattcggatttggattatttaaaaaataaaaataaaattaaatagtatgataaaattatattaaaagtttttaaaaataaaatctgctgcgttataaaaatgatatttacaatttacatattaaaaagctttactattaagtaattatgttatatatatactgtatattctttatttttataataagatacttattaaagaaaaagtttattattatttttcatgtttacattttttagtagaagaaaaatataaaaatatgtaaaaatattaaaaattacagataatagtagaaatctaaaataaggaaatcataaattcaataggaaaaaaagagaatttacttcaaataaaaataagaaaatagttaatttcatcttaaaaaatcaacaattacctacaacaattctctctatacatctcgccagtgtatgaaacttgtcgtctcaacttcaacaaaacatacgctcttgagagtctcttaattgttttgatcgatggatgacgaatatatgagcctcgaggaggaggaagataattgttacccctctgaatttgatgatcatgatcagatgtgttccaacgcggaagagtccgatttgcaacactcgagagaaccaacgagccaggttatcacgaaggaagcacttgtagcagcacagaaggaagttttggtttaaggttatggaatttttatcggttacggagaaccaagcaaggactcttcttattcagtatcaatggaacgttgataagttgttttctgtgtatactgatcaaggcaaagatgttttgttctctcgtgctggtcttactgtttttgacccttctttagttaatacgaagaggaagaagaaggagaagacaaggaagaggaagaaggaggagaagacgaggaagaggaagaaggaggagaagacgaggaagcggaagaaggaggagaagacgaggaagcggaagaaggagttgaagacgaggaagaggaagaagacgaaaaagacgatgaagtgtgatatctgcatggaagaggatttatcaaaatatgccatgacaagaatggagtgtggtcataggttttgcaatgattgttggaaggaacattttaccgtgaggattaatgaaggtgagggcaaaaggattagatgtatggcctataaatgcaacacaatttgcgacgaagaaggcaactagttagcacggagttagctgagaagtttgatcgtttccttattgaatcttatgtggaagataacaatatggtgaagtggtgtccaagcacaccgcattgcgggaatgcgatacgaaatatcaaagatgatggcgatgttgatgaggtggaatgttcatgtggacttcagttctgtttcagttgtttaagtgagtctcactctccttgctcttgtttgatgtggaagctatggaaaaagaaatgtgaagacgagtctgagacggttaattggatgaccgttaacacgaagctgtgtcccaaatgtagcaaacctattcaaaagagagatggttgcaatcacatgacttgtaagtgtgggcagcatttttgctggctgtgtggtcaagctactggaagagatcattcttattcgagtattgccggtcatagttgtggtcggtacaaagaagaaaaagtgaggcaattggagagagcccaaagggatttagacaggtatacacattaccattaccgctacaaagcacatatcgattcattaaagctagaggacaaacttaagaagagtatcctgaagaaggcagtgttaaattctgaaaccaaggatcaaaaggtgtttaaagaatacagttggattatagatgcagtcaaccggttattcagatcaagaagaattctttcgtattcttatcctttcgtgttctacatgtttggcaaagagttgttcaaagatgatatgagcgatgaagagagaaatataaagaagaatctgtttgaagatcagcagcaacaacttgaaggtaatgttgagagactttccaagatattagaagagccttttgatgagtatgatcatgaaaaagttgtggagatgatgagacacctcaccaatttgactgctgtggttgataacctctgcaaggaaatgtatgagtgcattgagaatgagttattaggtccactcatatctggaatccacaacattgcaccttacagatcaaagggaatagaacaagctgctgagttttctgcttcttccgcttgtggttcaagctgaattttgtcgaattatttttattatttatcttgttttactagtttttgttttataaacagatgattgatgcagtagaaaaatattttggtttttccccgttaaggttgtcttttcttaatgcgattggtttttgatagtttatttttctgattagtgactgcatgaagaaagtaaataaacagcatgcagttcttgttttgaagaaactaattattgtcctaattatcatttatcgttaccactatcattagtaattaccatgtgctctctaggagcctagagactcaccaccaacaatgagttttgttttgtggcatgtatatgagaaagtcacagaaaagagaagatgcttttaaatccaagaaaagaatcagagacattggacttacctgcaagtgtcgagcagaatcctttagtctgctctaagctcgtgtcacttctctttaccatcgagatatcaaaggacagaatttctgaaggtgcatcagatgtgatccttggaattttagtagcagggctaaccaataatccatatgttctatacgggcttatctctgcgtttcttccttcttgagaagaaatggttataggattctcgattttcgatgtggcgagtgccggagaattcttggaccttttccttatgtagttaaatattgtttcatctgagaatggtctttctgtttctgccagattcatgggaggcaacagatagactttaagcaaaggtgtataaaagcaaaagagaacttcattatgaatgaagaagattaacgcaccagttttctctgcaaagcttgcataacccgggctagtaatttgctgtgcgctttgtttgatgtctttagtatttgtaggtaagtcaaacacagaatcatactgaaatagaggatccagttcaggagaattattctccactaagcttttccttttcagaattgattttcctgatgctggagaggaggttggattcaaagggttcaatgaaggaaaacacttagctttttcacgtatgtggtcaaagactgtatgttcattgataatgacacagtcatcttcttccattgtcacatagggctctttctctgcaaagaattttgggtttagaaaaatggtgaatggaatacaaaggacataaaagaaaaagcttgtgacagatttaaatttttattgagcatctataaccttcttctgaatcatcatcgatgagcttgaaactaggcctgaagaaggaaattgagcagttaaaagaaagttgtaatcatgagacattttctgagtaagaaagtatttaaaatgaactcacatatcatcttttttatcctttcggtttgaaggtccagatgtaactgggttgtcatcatctgctatgcaggcacttgccataggaggataatactgaggcatcctgttttcgcttttgtaatttactttgttgttgtttgccttcttcagtagaagtgtttcgtggaggtcaataccaactacaataacaaaagcccagaagtaaatacactttggttagttactttctgtttcattctctcacttactacatggtcatcaagttttgcaaccaaaccagaggagttatttagaggacttaactgtattcttcaaagatgagatcagccttcacagtcacctttgtttgttgatgaggcctttccaagagtacggttacgctatagggactagaggaaggcaacaaagaaggaatgaagtattgcaaatcttaaataaagttagacgaagatttgcatcgggatcacaatgatgataaagtgaccgacaggtcaacatacctggagaagtcctccattctgctgccattaaaataccactgattagttacatttacttgaatctcttaaagaggaggattatgtgaaacacaggaatgttttaatagaagaatttttggtttatcgttggttagtgctcatcaccttattttctcatgaaagtggataagattctcttcctctgaaccaacaatctgccagaaaaggatacagattaatagcttatctagtagttatcttttgttcatgagcgaatcacaagactatgtatagaagtggagatgcaggtacaacatcttcagtagagttagagtataaatgcagaaagttgaggcaactaaccaagtcagcgtagtggcgttttgtggattggagaggttgtgatacccgtgacaatgtgactgctagtttagatatcccttgcttctgacagtccacttcctcgaccttgatttcaacttttggaggtagtgatgatagagactccttgatggtatttccgaaaggatattttcggccggtaacaatctctatccttcgcggatcagcttctgcaagagcttcaaatgacctgactcccatcgaatgaagtgcctaggaaaagaatgtattcaggcaaaaggtaccaagaaacaaaaaccactgaatcatctggaaaaggtaaggtgcagagaacgagcttaaacagagattaaaccttagctgtaaccattccaatgccaggcaattgtttcagcaaatatggactgtcgtcccagagcttttgatagagtgattttgcaagaagagttgagctaagagttcctttataattctttttgtatataaagtactctttcatgcatctggctattctggatccgttcgagcaaatagagttagcatcctgagacaaaagttcaaatgttcatatgcagagctaagaagtaaccgtgatcaagtgataggagtcatgaatataatactgatggacctgagtcatggataaatcatggactgaaggatccccagtcaaccaatcatttgcaagcacaaagagtttctcttctctggtttggatacgttttttccgctttcctttattatcgttgatgtggaatctgagccgcccttctttatctgcatttacatcatttaaggtcttcttctcattgcgtctgagctgtatcccttcatttttcaagataaacataaattagtatatccgtcaagtaacaacgagttatgtaccaaagcagatttgacatacaagatatctcttcagcatgacatacaatatgaagagcctcatccaagctatagctcgttggcgtattaataatgtacttcattgtttcaaactttagataatactttgtcatcagccttccgggctctacacaaaagaacgagagtgcattataatttgaaactgaagatatgaaatcataaatctcaataccttctggtttcaaaacaaaaccgtctgtgtcagtccagatcatctgatattgtgaaagctcattgatcttctgaaggcaaagctctggtaggacataggacacatgagaactccaagaaggaaaaatgagtaaactaactaagttagtaggcaccttgcaaatgcttctctacccgatctttaggaattccttttttaatagcataattctccggattctgtccatacaaacttccaagttagctatactatttatgataataaagaagttctccgacaaatcattgagagacatatgaacgtacctttttcattctgacatacaggtatgagcacttcatccactcaattgcccgtgtaatgtcagagatagtaagttgcactatttctgcggttaggtgctctattaagcatggcagcaatctggaacaaaataaatagaagaatatttcttgaagccaacatagcttttaaaagaatgttaaagaaagcaaagggttccaaaaaaagaagtttattgggcaatacttactgtgactcaacaacttcgcatccattcaagagattctcatatagatggacctgtaatcgtttataaattacaatcagagaacataagagaaaagtaaaattaaagtaagatatttagccacatagaaaagtttcagtaaataaccgtctctcttctcgtcataataataaccattcccgtgtcatcaaatggaggccgaccagccctgccagacatctagaaaagaaagattacttatcctgctagaaatatatttaaagcacattccagttgattgtgcagataatcagactgcaatataacatttaggatacacatgctcgaataatttacctgtagtagagtggaacgatcatattccatgtagtgacctttttccttgttgctaaaaggaaaagaaatgtcagtatattactggaaattaactgaaattccaataaatacttaatgggcatatctactcaaagacgtacaaatgttgagttgatttaatgaccactgtatgtgcaggcaggttgattccatgggcaagagtgttggtcgtgcagataacttggatatctccattcaggaagagcccttctacgaggctgcggtccttttggcaaagtccaccattgtgataaccaactaattgggacattttggtaactattcatcttgcagacaatgctgaagcaaatgtacaatcaacaaacttagaagagtgaaacagaccataccgccttggaggatatatgattgcatttgtttgtcactgcacatcggcgaagcctcccttaatcgttccagttgttctctgcttttaataaatggatttgagtaaccataggtcattgcagtctgagctagcttttgtgcagcctcttgagcgccttttcgtgtcgagcagaaaactaaggcagattttccttttgagtattgcattaaaatgtctgaaaattcatagattttttctcagcaaattattataagttacaacctaatcaagacagcaacaaaaggaagaatataatgataagagcagcttaccataaatatagttttggaggcgctggatatgagaaaataaagaaaggaaaacaagaattaatctagtttctgtcgtgaaatatttgagtaattgaaaaaggagacaagagaggttacggctatctaaatccaagatgcagaaactgtataccttttcaaagaggaagtcattcttggcagcagcataacctgtacaaaaaagacagttaacattttcctccaattcataaaaacaggaaagtcatcaacagctaaattcatcatcttaacatttaaccaaacaaataaaatgacttttgagatgagaccggtaccaaaaactttcgttgtcaacttaacaggtctcatttcttcgccaaacctgtaaaacatgggaaggtaaacaatgatgaaactgaaaaaaattacccacataaggacatagttctgtgaaaagcaatccataagttacctcttaattcctgcagtaggaaccttgagccattcagctgcaatagatgaacaagtattacaacgttagttgtgttgaagcaagtttgtttatttttttacttcgaagcaaagttaacaaagcaaaaagagtcatacaatctgcagagtatgactagaattgtgagctacatcttacctagatcttcaatgtttgggatagtagctgagacagccagaagacgcacagaggctaaagtacttgaccttagttcatgattgctagaaagaatctttaatctactgactattgcctcaagagcagctccacgcggatcattcagtaggtgaacttcatcaatgagcacaagcgcaatatcgctgaagaaacctaatcctccactggtaacacgataacggcttactgcatcaaatttctgcaggaaacatgtaaactacaatgatccactaaggagatacaagcatgtagttcgtgtaaacacagaatgaaatagcagatattgcttgtgttctggctagaatcataagggggatcagaagcagtaaacaagttccaaacagtaaatacagacaacaaagtgaatttgatatctaacctcaggtgtggtcaagataatatctgcgtcttgtatattcttagtgctgtaggtttcattatcacctgtcagctccaaacaactgattccccatgaattgaacttttgattccaatcacgcagcttctcctgaactaaagccttagacggagatatgtaaaccttgacaccaaaggtagaagaaaccccaaaatagacttataaacagctgcagtccaatattggttattgtaaaacgaaggcatcaagccgagattcagaaaagtgctcaaaagcttactgttttaagagctcctttagcatggagaaaacttccttccttagagatggactttgagaagagcctcaaaatgcaaagctcaaaaagtacagttttaccacttcccgttggcgcagaaataatcatgttgatatcggagtgaaagcaaagcggaaagcactcgctctgcagcgagttaaagtatctaaacaaaaacgatccagaagcaacacaaagcaaagtttagattcacaaacagttatatcaaaggaccaaagaaaagaaaatcatcatcatattccataacatgtatgcaaccattcctttagagttaaaccagcagtagatcaacaacacgataatgaccaaaagatgaaaacaaaatctcaagtttaaagagatatattacctgaaactgaaagctgaacggaaatttccaggcaaatctgagacagatttgagcgtgtgtgtatccatgaccaatgctaatttgaggatttctacagattccaatagcgtgaaaatcagaatcctaaatctccgatagcaatcacttcataaatctatccgtacatcagaaacatcattaacataaatccaatccgacatctgctccgatcaccaattgaaatctcaatttcgccaagtttaaactgagaaagatattacgctagcgaaatttcagagaaacgtgtgaggaagttacggaacattgaacaagtcggaactcacaaagtactccattaaaaccgatcacgaatcaagcaaaattgaacagagaaacaaaaatctcaccgttaaatcaccatgaaaagcttgcgcgagaccaaacttgaagagcaacgatctcttagagagatgaagatacaagtgagagagcggaattcaaattcaagggccgttgttgtgaagaagagcaagctaaaattactagttaatggccgaaaacgctgcgtcccatataagaaaacatcacgcagttttgatctatttcaaaactaaagatcccgaaacacaaaacgtcacgcagtttggatctctccgaaaatttaaaaatcccaaaaacaaaaaacgccacgcacttttggtcatgtaatacaaaacaaaagggaacaagttttttggcggtagccaatactttgcaaattacagaatgataaaaaaatttagatctgttttaatccggtttttgcttcagattcttttgtttttcataactttcatttctaaataactgcattcaaagtaaatcctaattcactgataaatgattgatacaactttagtttcaactagtggaccattggaggaagaacggcaaggttgttctctaaggctccaaggtcagagagccagagttagaaacaccaattgtttgctatgtgttaatcagttcctatcatctgttacgttgagccatttgaacctcattctggccaatggggttatcgagggtactaggatggaggatcatgaaatgttccaagaattgaccccaagtcacaagagtttcccagctttcttatatcaaaagacacaaactctcacatctctttatctctttattacttttacaaaatcttacttattttataggttggatggttgctcaatacagtcaaagcaaagaaacaataatgccaatccattatcactaacaaaacagttggttttaatttaagtgccatgattaaaaacagcaacgtacaaaaacaaagagtacttctcattgatcaggagctttgtttcgatctcttcataagctctatgaactctctaaatgctgcattcataagcaaaaaaataatcacattaatcttctggtttttcagtacgactgaagcataagtgtctttcaccaagtgactggaataaagaggacagttaccgttatcagagtcgtgaggtccaggggaggcttcagggtggtactggagtgacataacattcatttccgggaaagatagacccgcacagcttccatcattgagattgacatgtgttacttctacgcctccgggaagtgaagctggatcaaccgcatagttgtgattctgccaagaattacagaaaaaaagacaatgatacaccatatttagattttgtcaagcttgtaacaatgttcctagcacagtcgttttatcagataattatccgaactttgaatgtggaagttcaaatccttagttggtagtatgcttggaattaaatggaacattttgaggttgggtattggtacctgagcactgatctccacctgaccagttctgttgttacgaactgggtggtttcctccatgatgaccaaacttcatcttgaaggttttaccccccaaagcttgaccaagcaactgatggcccatacagattccgtaaacagggactttaccgagaagctctttaactgtctcaacagcatatggcacagcagaagggtctccaggaccgttgctgaacaaaatcccatctggattcattttcagcgcctcggcagctggaaatgtggacggaacaacagtgatttgacatccgtaagatgaaaggcgtcttaggatgttttgcttgattccaaaatcgtaagcaataacctttgaattcaagagacaaagtatagaaagagagagtaagaaaagtatagaaagagagagtaaaaagcatcgataagagcaaaagtagagaagtaatactcactttgtaggatttcccatctcgtgaattcgtgttgaaatcccattcagcgtttgttttgtcaacccattcatagggagatttacatgaaacatcacttattagatcaatacctacaaagattcaaagattcaaaaaagcagacagaaggagttcaatattccaagtgttatattataattgccaaaaacaggaaatggcaggagaaatctgacctacgatatcccatgaacgagacatttgcagaagttcatcatctgttttggactgttctgtgctcaacaccccgataagactaccatcttctcttaaccgacgggttattgctcgagtgtcaagatcatctgatagtgtttacaaaaacatcccaaaatagagtaatcagagatgttttcaaatgcaactttatctcatgcacaatctaaatagtatgttgaatacaaggaacttacaaactcccatgatgtccctttcggttagataatcagcaagtgtcttcgtgcatctccagtttgaggtactgaacatttcacaattcaagaagtcagggacattaaaatggaggataatggaaagacacatcaaggaaaatgcttacctaatgcttaggtttcttatcaccaaaccagtaagaaagcattgcccagattcttcatcatctacaacaaacatttacaaatgtaataagaaacattgagaacataagttcctagtgtatacgaaagtttcgaaactgccacttaccaggattgacaccagtattaccaatttgtgggtttgtcattagcacaaactgcccagcataactaggatcagttaaaatttcttgataccttccaaaaacaaacaaaatctaagattcagtaagctaaaatcaacaatctttgaggtgatataatgaaatcaaagaacaaaacataccctgtcaaggaagtgttaaacaccaattcagcaatacgggttccaggagcaccaaaagacttagcaggccagatagaaccatcttctaacacaagcctagcattgtacgaagtccaaggtttctccacaacacctacgatgtgcaaaaatcaaaactttcactaaaaggttttggcactaattcttaagacagagactttctcgatcaaacgaaaaatccaagctttaccctttattcaagaactaaaacccaatggagacaatacacaatttcatcaattttgaaacggaaatgaaggcaaaatttaccagaagtgggaaaagtgagtggagaagtggagcaacggatgacagaaaccctaaatccaccgccgcgacggtcgaaggaaggctgggaagataagctcgtaggcaaaacaaagcctagagtccttgttgccatggccatgttgttttctctggaggaagaagaagatcgaagaagaaaacggcgtcaaggttttttagggttggtgggtcgatagctctttttttgaaattaattcgttgttattattacagtatcttgctttgacttttgttgacttttttctctagtaaatttggtcacataatcatagttttgttgctaaataaaaagggatgaaaatcatagttttgtttattataaaaatagaataaagtatcgaatatatgtctaaatttaatatttaaataattatatatataaatagattttatataaattcgaaatagaataaatataaggttaaataaaagtaaaaaaatcatatatttatattttaataaggtaaaaatgttttaggatattagtaattaaacgagttaaagaaatataagatttaagatagaatgttgctagcattctatcttgattttttgaagactgatttcagttagaattgtggcaacaaatatgaagattccagtacttaggtcatatggtaaaatcacgcgaattcttaagttttacaagatcgaattcggtggttctctttgtaacttggctttctttgcttagaagcgatccaaaccttttttagtagtaatgttgtatttatttttctgtagattatttttatatgtattttgtaatctttgtaattatgttaaaaattaaaattggtataaaatttaactttttaacaaaaaaaaaaacaatctgaaaaaaaaagaagaagataaagtcgtcaaattggtataaaatttaactttttaacgaaacaagaatttgaaaaaaaagaagaagatagagtcgctcttgcaagtgtaatgatagactcgtgtagagaaattagcgggaacagaaatataaacgacgcataattagaaagtataaattaattaattttgtgtcacatatgggccttttataaattaatatgggcttgcccaatgaaagaccatctctctcactcacacaaccacactcgtaaagattggtgtgattaataatggcgctttctctcagccagactcgaccaccaagccttagccatagccatacccttagcgtcatcgttcctaagagaacgttcgtttcgatccgatgcggtccacgagacaaccgcggaccacttctcaaaggccgaatcctaagcaccgaagcaatccaatcaatccaatctctcaaacgagctcatcgaaccggtgtctccctctcccttaccctccgtcctctccgccgtctcataaaatccgatctcatctccgtcctccgtgagcttctccgtcaagactattgcacactcgctgtccatgtactctccactctccgtacagagtatcctcctcttgaccttgttctatacgcagacattgttaatgctcttacgaggaataaagagttcgatgagatagatcgtcttattggtgaaattgatggaattgatcaaagaagtgatgataaggctttagctaagttgattagggctgtggttggagctgagaggagagagtcggtggttagggtttataccttgatgagggaaagtggttgggggtctgagtcatgggaggctgatgagtatgtcgctgaggttttgagtaagggtctcttgagactaggagagccagacttggcttctcaagtctcactcaaatcttcaattctaaaaccttgaattttcgggttttcggtttggtttggttcggtttttgattaagttcatacacttttggcaaagattgcactatattctgttgctatggttagttctttcgatttggttcgagctgaaatcaattcgggtagcgaaaaatttacgaaatggttcattgcgatatgcgaattggatcggaagtaaatagtttatgcattgaaatgttgtggcgtttacaatgatctgttttgaagattttagacatatggggtaaaaaattgtttctttgattgttgtaacccttgagcactgactcttacggggcagaaactcttggattcgaaatgacttcaagaaatgagtttgtatttgattttgacgattaatgcaaagaggccataagaaggaagatgcaggagtgccaccaacaaatacctgcagatgcatgaattaaaatattaaggataggcgtaatcattctaaggaatgaaacattatgatataaaccaatcctgactagtgtctagtatgtaaatgttttcaaggcttaccacactggagccatgtctaatgacaggttgagaaatggatatggccacctaagtcaatcgaggaatacaagtgtaagattaatcaagacggtaagtgtaacatacaaaagatgacagagaagagttttacccaacggagataaacatgtggagaatccactggaaaagaacgaaacatcctgtccataagatgaagtaagagaacctgaacaatggaaatttctgcaaagcaacatcacaaaaagacctcaggttcaacacattaatgaaaacgaaaactcgtcgtaaatgcagaggaaagaattgttttaccagacggtttagaaacgtgtcaataagcagcaaaacgaggttgcttgtgtgcaaattcacagtcatctgaaaacacagaattttgacactagagaagttgagactaagttcaagagggtcaagtgcaacgtagaaagtgccatcagcagtgtacaagctttaactaatatacggtaaatggcgcgaaaacttacgaaactcatctcatagtcctgtaaagacagaaacgggaaaatcacggtccaatatatactgtctgtaagcacagctgctccagcacccatctgtttttcaacaaaccaaaacacacaagtatcagtgatcatatatacactaatgaaacaagaaatctgaaagttgcaaactatacatcataataaccaaaggaatctgtctacctgatatataatctggaagagatgaacatatgactttagtgcttccgaaccagaagtttttctcttctcgaacgaaaccatgttgtcaccatctataagaggcgaacgaaacccgttctctgcatcgattcctacttgatcagcgataagtccagtgttcccttgcttcttgtattgtaaacatccataaattgaaagcaatgatcccatctacacaacacacaagtgacaacaaacattcaaacaaacttgactataaccatatacatattcacaacatcaaaaatcaaaacataccccgaagtagattgctatcaaagtgaatgtccacctaccaatcaaaacctcaatcatatcagtctcaaaacatcaaagatattccctttccacacaataaagcagagatctttaaagagaacttactgagtataatagtagtaaatacgccatccacgattagcaaaccgggcaatattgttagcaagaaggaaacaaaacccgagaacccgaaaacccaacaaccaacccggatggattcgttcaaaacaaggtctccaaacatcatcaatgcacaaaacatcattaccattaagtgatggttgagtttgaactgaactatcttcatacttccataagactaataaagaaacaatcattggaactattacccatatagcacatagtaacactctccaattaaaccagtaatcaaagctggtgaattccaaaacattctcaagattcattttttttttcttgttctcttgttgatccgtctgaatattcggatcttttagatccgaaactcaatgggatcaacaccggacttgaaaacccagatcaaaaactgtctctgcagaggagttaaaagtagcttaattgatttacatatagagatattagtgttaagattaagtagctttgattcttgatacttacgttatgttaagagaaatgtagaagcttgtccttgttcttgttgttgtgtgtgatggagaagtcaaattgaaacttggaaggtgatgagatatgagatatgtataaatctgaagaacaatccaatggcggtgtcagaggcccactggaatcggagaacacagagtggagacaaggacaggtgggaccttctccgtttgtccaacgcttagttgccaaacgacgtcgatttggtttcgtgtgtattttacttaaataggcctaaatcacaaatctcatataaatggaaagatatctacaagcccattattatttttaactatttgtagttaagactaaaattgttaagttttttttctttttttgttggaggaattgcacaaaaagaataagaagtaatggtttattgtatttggttaagatctcaattttctatgtagttagtcaaaatatcattaatgaatatagatcccaaaagttttatgtatttttcttttagttatgtatgacttttcgaatggtgatatacaaaacaaatggaaaaccaaaatataatgtatacaaaactctcattacgtttttttttgtttgtgttttgcctaaaatttctggtattacaatacgacggaccatatagtcattatgacggtaaggtaacaaattccagaaaattacaatacaacggaccatacacatattatcccatattacatcatactaaccagatattttgtaaacaactagtactttttttctttagcatagtcgatataaaattattctttagtgactaaatgtacttgttgtggacctaatggtcgtcttctcctaaccgcaaacgcaattaccattcatatagtataacagaaaatttaacaatatatatagattcttaattaaaatgaaattagagaataacaaaaaaaaaatctgataaagcaagaaaaccttcaatttttgtttagtccaaaagaaaccttcaattaaaccacaatatatattacatgtccaattcttcaattaaaagcacaaacataatttcataaatagcataattatataggtagatataatcaagttcgacttgtttatattgcacggtctaaagacgaccatgagcaatcatctccagcaaagcaatctcgttcatcataacttcatcacatccatgcatcaccatccagctatcagtcatcggctcatcaatctccatggtcacaccacttccagaaccagacgcagaaccagaagtagacgctgatccggaggccgacatagccgccaatgacggcatcttgatccttccatcttctaaacccaagttattcacaccatccacaatatacttacattcaccctcatcatactccgagaccgcaaccattacattcttacctttacctctcatgtttcttggaccaatgtttgcgtttgcatttgcggtcatgaaaggatcatcattgtaggtaacagacctaatgtagttctgaagagtgttgctaccaagtgaaagggaaatttcatcttttcctttagtcctcctcgagtgttgtcgacgtttagtcgcgttccaatggttcttgatcgtattttcagtgcgtcccgggagttttcgagctatctcagcccatctgttcccaatctccttatgggcttttatcagtattatatcctcttcttcagtccatccatctttctgtaacataccacataaaatatgctttatatgtaaataatacatacaatattaaacaaatatttttattttttatatgtttttttctcttttatgtttgttgaattatatgagagaatccaagtgacaatgactttagtttaaatgtcttaccaattgtgaagttttgtccgcaacaagaagacaaaatgccttaaagaattgtcatagacatatatgtatatacaaacaaaagtttaaagtattcatgcatgaaataaaaccgtatacatgttgacaagtgtgaaaaaagtttgttaatattctcttagaagattctcaatgtatcatgtaatgaatttgaaagtatcgaagatgatattttgtttttgtttctcctatgaaaataagaaaatgaaaataaaataaaataagagaccttgatatcgggacggagatggttatgccacctttctctgcactgttttccaactcgtccttgaagcatcttagcaatctgagaccattttttagttccgtgaaggtccactagctgcaccaataacctaaatataggtagaatcattagaaaatattaatattaaaaacaatatcatactagattaagaaaattatttatgagaattccaaaaaattagatgttgaatttacttgtcttcttcaggagtccattgtcctttgatgatgctagctttttttgtgggtttacatatcctcctcatctgaaatctcttgttcttcttcttgatctgctcggtcttgatcattacctggttattttgacgtcgattcatgatggtgtcttcgtttgcgctcaagagtggttttggcatattgaattgattagagtccgccatggcttgattgagggttgactcggttccaaagatgaatccttggttttgatcgttttcccacatagtattgtcatgtgagacatgtgaaacgttgggttcaatagttggtggggtggtataggccatgccaaaaaaaacatggtcgttggatgtgccatgaaaacatgcctcgaaagcttcagtgcatggagaaggagtgatgcccctaatggtttcttttgatggtatttcatatgtgtgaggctgcatatcaaagtgatagggaacaatattaagattttgagtaaagtgataggattgagatctttaatgtgagattcttgtgaaaaaaagatcaggattagagtttaccatcgatggtttgtgatgcacattgtgtacacaagaaaaatcatcggtaagagatggatgaaaatcttttaaagtggagctatcatcgtagataacggctgcgagatacggataatgcattttgaacactgactcgaactccatatgattatgatggcaaaaaaaaaaaaatacaacgtttagaagatggaactacctaaacaaaaaaaaattgagtgaagcatgaaaccctagatctgaaagaagaatgagttggtgatgaacacagatactttttttttttttttggtttaaagaacacaagtcttgaaagagagcaatttaacttgactgcaaaaaaggataacgaggaaagtaattgattagtgaaatgaaattcaagcttgaagatgaatttaaggaagaggaaaaacagggagaagtaaaggtaagggtaaaatattaagactttataaacaagaacaactgtgaagagcgatgagttggcaaagatctaacctttgataacttgggtgagttaaaaagttactttaaaaacaaaatgatagtccaagggtaaattggtcactaaaatttgtcatgtaataatcatgaagtcgttataaggtagtttgtattgttgcggaaaattctcgggcatatttgtgacaagtgtaaaacatgtaagcattataatttctactagccgtgtgattatctttttggtgttgcaatgtcaatctaatggttcgtatcagcatagggtccacaaattagttggtcccacaaggtccaactctaaaacattgaccaagaaatctaagatgatgaaaagtatatatataaattaatgatactacacatttagtttaatttatatcttcactttttagcaataggtagttactttaaaaaaaattaaagtatttaaaaataaatatcatttctctataaatttggtttggttttttgaaaattttaattaattaatgtatgttgagaagaaaaaaatatcatatatttccaactttaacaatttaaaatgatattcaacatatcgtctattagaaataaaaattccatagatgaattttatgttccacaaaaccctttatctaaataatatatgtgatttgtgtagtagaaaaaaaaaattgagttacaaaatatcttcacaagtttgagggtatctttagggtatgccgctatggttttgatttttattcccttccacttgaaaatatatttttttgttgattaataaatttgacatttccaaaaataaaagaatatttaatgtgatgatattgaatgttaaaagagtaatgactcaattatcttgaagtatttggaaaaacggttgaaagatattgcaaaacaataattctttcaggtggaaaatattttttaataaaaatttaagaatatctaaagaattccataggtttccaaaaataaaagtcaattttttcaatacaagaaactcaagacatgtagataaatttgaaattactctactttaaaaattcaagcatggaagtacaccttagaaaccaaataacagtattagatagaaaaatcaattttgtaagccttataggtaatagtaaataccataacaataacgatgatatgatttgaacccgtgcagttttataccaaaaacaaactcgctaccaaattacattggttcaactcttttaataacagtttttaactagttggaatttgtaacctcgttaccaaaattcatcatgtcagtggccatcagagatcttttccaccgtatttttttttcaaaggagagaactttttcacgtttatccccttctttattgttaattaggcttttgtattgttgcatcggtgttgcacagtccgcccgtatgtgaaggatgttctacaagggcgaggcctctggtgtagaaaaggagaatactttttcaaatggtcagaataagaaaataccacatgggtaatataagagtcatcttaggtcaagaggtgattataggctcaattctcctttagtgagcatataatggttttaaggtgttgaaacagtctttcttaaaaaacaataagagagagcaaatcttagatgtaatgtctttttgaatggtgtttgtgttttgtgtattaaaatttagaaagatttaccgaggtctagtgatcaaatgtgtgttgagtggtttggtggagtcactttagctgttaaatgtaaggtgaccaactacgacatgttttagtttagcaaatgggatatgatgttgctagctatagtgcaacaaaatagcttttcgatgtatcacatctattagaagaaaaaaatgcaatgctcggctaactattgaatataatgattctcttcatacgaacacatctaatgtttattgggtcagtgagagagcatccaacttgttgtgaatgagtagtgaaataaagaatttgtaagttggacaatgagcttctatgatttttcagtgacatagtgttattcaataacctaattcattgttagataataattgattctaaattatgtattaaatatggttttttggatctaatatttgtaaccatgctttaaccgatgttcaaaattcaatgttacaaaactatgattttgaatataaatttggcattatctagaacaagaatatttaaattttattgcatagagaatcatttaaaatggggagatttacaaaactacctttttttactacctttttgcaacaatacccttttatattgttcatttttaaaaatatccattcccttgaacagaatgaccaaattaccctcatctattaagaacatgtaattggaaactgaaagtttcccgccaaatttttggcgctaaaatttatttttcccgccaaaaaaaaattccgccaaactttttttcccgccaaaaaaaaagttcccgcccaaaaaaaaatttccgccaaaattttttctcgtaaatgttttttcccagccaaaaaaatgcttttaaaaatccttgtaaattttttataaactcttttaaaaaaccttgtaaagttttttaaaagctttggtagttgctaaaaacccttgtaaatcattttaaaacctcttaaaatctttataaagtctttaaaaacataggtaaatactttaaaacccctttttaaacctttgtaaattattttaaagctttttacaatagttttacaagatttacaattgttttttaagcataagtaattgacattgaatgatttacaagggattttaaaagattataaaagagtaaaacatgatttataatcgttttaaagcttaaagcataagtaagtggcatagaatgatttacaagggatttaaaaagggttagcatggtttacaatcgttttttagcataagtaagtggcattgaatgatttacaagggattttaaaagcttataaaatggtaaaatatgatttacaatcgtttttaaagcataagtaagtgacatagaatgatttacaaggatttttaaaaagggttagcatggtttacaatctttttttaagtataagtaagtggtattggaatgatttacaggggattttaaaagcttataaaagggtaaaacatcatttacaatcgtttttaaagcataagtaagtggcatatatagaatgatttacaaaggattttaaaagtgtttgtatggtttacaatcgttttaaaacataagtaagtggcattgaatgatttacaagggaatttaaaaggggttaacatgatttacaatcgtttttaaaaaaggtttgcatggtttacaatcgtttttaaaagataagtaagtggtatataatgatttacaaggattttaaaagcttataaaacggtaaaacatgatttacaagagtttttaaaaagttttaaaactcttataaagtctttacaaacattttttaactcttagaaaaagaattgtaagtatttaaaacatttacaactctttttgaaccattttaaaactcttgtgaacctttacaaaaggttttaaaaagatttacaagagtttttaaagggttttcttataattttttttaaaatcttttaaaaactcttgtacatcttttaaaaccctttaaaaatccctttaaaatattttaaaacacttttaaaccctttaaaaatctttaaaaaactcttgtaagtcttttaaagccttttaaaatcccttataaatctttttaaacccttttaaaatctcttgtaaatcttttaaacccttttaaaatctcttaaatattttaaaacccttttaaaatcccttgtaaatctatttcccgccaaaaaaaaaattttacgggaaaaatattttcaattttttttttttggcgggaaaattttttccgaaattttttggccggaaaaatgtttttgaaaaaaaaatttggcgagaaaattttggcgggaaattttattttagaatattttaggcaaaaaatattaatattttattttgttaacctaaatcaatttacaaataggggtaaatggtcattaaaaatttaaatagggtataaataaaaatggtaaataaaaaagggtagaattgaaaaggagtagtgtgaaaagggtattagaaagaatttttctttaaaatgatttttaatagattatcataagtaaattatatacatatatgtatattatattatcttaaatctaatataaatcatcgtgttgtgttcttacaaaaagggttctataagatgatgtgagaaagggaagggcgcatggcgagtactcttgatttttggaatatgggaaataattattttgtaccatatccgacttggaaaaacggttactttggtaaatgggtatcttttaaaaaattcaataccctcgtgttacccaattcgtatatttatcttattctaaattcaaatatttaaactttaatcaaattttaaatttctaaactatttaaatccttacctaatttgtttttccaaaaattcaaccaaaaaaaataaatcaaaatataaactaatatattaacaaaaataaatttaagtacatgattttcaaatattatattatataccaattttctctaaaataactgctaagaatatctttccaacactaccctttttaattacgccccttcggccctttctattggccatttcatttataacctcttttaatttttaatgaccattttaccactatttttaaaatattataggttaacaaaataaaatattgattttttccgtcaaaaatcttccaaatataatttttccaccaaaacatttttttaaaaacaaaacaataattcccgccaatttgtttttccaagaacatttttcctgcaaaaagcaaaatttacgggaaataaatttacaagggttttaaaataaaacctctataactccttttaaaattcttttaaaaactctggtaaatattttagaaactttttgtaaggttcacaagagtttttaaatggttcaaaaagagttacaaatattttaaaatattaataaatgtttttaagagttaaaaaatgatttactaatgtttaaaatacttttaaagagctttcaaaggattttaaaaactcttgtaaatcattttaaaaccttttaaaactgtttttaacaaatttaaaaagtttttaaaatgctttataaatatttacatggattttttaagagattttaaaagatttacaatggttttaaaggattttaaaacctttcgtaattacttttaaaattcttaaacaatccttacaaatatttttaaagccttctaaaaactttgtaaatattttctaaagccttttaaaccgtttaaaaattttaaaagtttttataagccttctaaaaactcttaaaaaatctttgtaaatattgtttaaagccttttaaaccctaaacaaatcttatacattggttttaaaagatttacaaggattttaaaatatttacaagttttttaaaagggttttaaagtatttacatgtgtatttgaagactttataaggattttaataggttttaaaatgatttacaagtgtttttaacaactttacaaaaatttaaaataatttaaaaaactttacaagaatttttaagagtttttaaatgatttacaagggttctaaaaaacgttgggagaaagtttttgtagggaaaaaaaaagtttgcggggaatagatttttggtggggaaaataataattcagtttctaattacatattattagatgaatggtaatgtggttattttgttcaaaaaataagtatttttaaaaatggcaaacaaagtttttgttgcaaagggactgtagaaaataagtacttttacgaattctcatatttataggattatatgccattatatagtacattatactgaattatattaatattttaaaattgatatatatggattgggttgtaaatgcgggtatgaaacggatagttgaaacaaataatatttgatacctaatttttaccctaagataaaaaatttgatactactacttgatttgaaagctatgaattcttttttttaaagcgggtacaaatagagtaacaagtggaagaagaataacgggtataaatgtttaaccatattgtgaggcatatcgcatgagggatcatatacaatgagaatgtatgcaggtaaagtatgttcttcatgatgaaaaatttaacttatttttaaaaaattgaataacctctcttatagccttggttaaccactagataaaaagtcttccatgatatgttatttcaattatattatttaattataaattaattaaattcaagtcctaatataatgtagcctaatataatatttaattctaaactatgaattaacataaattgttattggatatgatatttgtaaatcctgcttcaaagatttcaacagtttagtgttgttcgatttttattttaagtatatcattaaaatatgatgttactctgaattcatatattttataaatttttgtaaagagaattatttgaaatcaattttaatagattatcatgaatgaactatatatcgcatatacattaatttagaaatattcttaacagaaacattatcctcacgtatgatttacagaaatgtcatgccgacatatcgttttcactgaacttcttaacctatttaattaattgtccaatatttactagaagattgacaataagttttataactaaaactacaatgcattcagttaataattatttcaccatccacgtagtgcgggtaactacttaatatatataagaattcacatgtattacttattttataaatgacatcaaggatttaaaatttcaaggataataaaacatatggaattagttttaaatcattgatctaatgacttctccgataataaaaatgaaattaaaaatgatcatataatcgataacttataagtgaaatgaaaacattttagtcttaataagaaatcagacaaacatacatatggggtgtggcatgaccttagagaataattttataggcctttgcatgaccttagagaataattttataggcctttgcatgatgtccacttgtacataaaagaattttaattcatgcttaaaacttggcttaaaaatagcatgtttgtcactctactttttaccttaaaacacagcatgtagtccataagtttcttatatatatataaacatagtatcacaattattacaagtaaaacatcatatattatgtagtcatttaaaacaaattctaatgatagaaaagatttaagatatatatattcctttttttaatttatttcttttatatatttaaattaaaaatatataatttgtagagaatctatatttctcaccttctatgtaacaaattcaaattttatatttgtgtgtgtgcctttttttttttattgttattcctaattgtgtgtgtctttctgaaaaaaaattgtttagaggtggccatctctctatacaatattactacatactactccctctatttttttttaaatgatgttttagtccaaaaaaattgtttcattttaagtgatgttttcaattttctatgcaaatattaaatatatttaatataattttgaccagtcatataatacatcatattttcttattggttaagtttattctatttaataatatttttatggaaaagacaaaaaatatatttttttttaatctgtgtgtaacaactttaaacatcacttaaaaagaaacgaagggagtatactactccatttaagaattttgagattaccgtaagcttgttgccactctcgaaccattaattgtgacgacaatactatactgaatttcatcttcttctttctagtttccatattttaaacggaagatgtttaaatacatgaacataagcaatctagtttagagatgtagttcaaaaataaattgtttattggaaaatacaatacaatcatgtaagttcttggtgatttgcttcatttatctctaattttttggagtaagtttgacaagttcgtcctcattagaaattttagtaaagtctttttcctcctttcgacctatgcgatttgtatcttttttcttaatttagtttctctataatttggtgcacaaaaacagaaacaaaaacaaaacaatatattcggtaaaaataagtcaaactaaaaatgtgatatatactctaataatttttttattctcttttttttttgtcaaacaattttttttttttcctattctctgtttcttatatttatatattatttatttatttataattttacacaaattcatgtaattctttgttgatctagcttagtttaaatcttcataggcatcaaaggcggcacttgaggagagcaataagcataattataccggtccaaattttctaggctaaatttaagggtccaaacatttgttttagtataaagacaaggccattttaaagattttaaagactctttagtatgaaaaagggtccaaatatattttagcatgaaaaatgcataattcttagtatgaaaaatgccaatttaaaaaatttgtacaagagcactgaatttatttgccggcctgataagcatattgtgtgtttttttggtctttgtggattcggtctcttaatactattgtgtttgcatgtgcacttgtggccattattaaggataatgctttattggtaaaatttacctataacattctcaaatcttcaacttctccaccatttttaccaatgtcactgtgatggttgaatgaaactacataacttaattaaatgaaacaaacaagaattggcttgctggaacaagcatgaaattgctcttggttatgatgacgtaaattgtagagttgaagataaatatcgaaaagacatttagggaaaataaatcagaagaaatgtgcaacttaaaatatttttgtaagaatattattgaatatttatttattttttctagtgaaggagatatttttattttcttaatcaggaaaaaatcaaaagtaactccatggggttcaacacgaaatcctccatctctctttaagctttagttattgctctttcaatttcatctctcgagatctcaatcggcaagccgacaagttggccaaagagtctttgttatccctatgtacgcaactttattagtgtaatgaaaaattaggcattttgctcaaaaaggtatataggcgtacatgtaaggagtgtctaaatttttgagtaaatataattagacaaagtctgtaagtgcggttgaggtaaaacaaatagcaggaaatgaacgagacaataaatttgttaacgaagttcagtttttcctattccctgggaccaagtccaaattcgacttcactagaccaagaaagcaaattacaacctattcgcaaacgtgtaaaacaagcacatctctcttgatttaccgctcccttctattaaagtgaaactttaaggataatctctactcttaactaaactccctctaagtctagatttaatcaggataacctaaccctgagctaaactcgccatgaaactagacttcaattctacaagtctctgaaacaaccttcacacaccaccaaacaaacttgatcacacaaacaccaacaccgcaaaactacgtcacacaaaatctcacagaaagctctcaaaggtttcttctttatgcttcagctctcttgcctctccaagacgtcttagctcctccttatatagccaaaacgattggctaatcaccataggagaagatttcttttttccataagaaaaagtaaattttctttttacaattttcttttttctcatgaaacttcactttcatgaagtcttccaaatatctttaagtcctttttcctttttgactcattctctaaacacgctcttctcaaatcttctagaaacagacactcatacaaaactgtagcatcctgaattacttcttgattcattcagcaattccatcagacaaaatcatgtattactttttgaatcattcagcatctccatcagcagcaactacatcttcattctccccctttttaactatgtttgtgaactcatctgttctaactccaaaacaacatcaccaaacacttcatcattctccccctgaatgagtcacaatatggtcaaaactatttaaaaaaatattcggcttcgcaatacgaggttgatagcctagtataccacttccatgaaatccatctttcctaacccaaaccagtatgctccttatatcttcatgattggattttcgaatgaacctgaaaaaattcctcttagtatgtccttgaactccacaatgataacatgtaggacaatgaaatctcacatcataagcattcatcaatcaatttatctccctcaacaatctgaaacaccttggcctaatatgcccaacaacaccacaatgatgacaaacatgtcaaaaaactcgctgaggcccactctacaatttttgaactttttctcgtagctgatggagtctctatatcagttctctatcagatgcaatctttgctataattgcagtttccttcacagtttctgatgcagacctgattttaccaccataaacaaactttagatctgattttgaaggatttcctttaaatacaaaaggccacacttatcagtcttgccaatattcaaaatatgatccaacttctttgtgccattattaaacatcctcaaattcttttgagttttttcaagttttactttagcttgtgatgcttcttcttctttctctacagcaaattttggtgtttcaacaagtttaacttctaattgagcttctccttagttaacactgaattctcctcaactaccttatgacaatgctcatataaggctttctaattctcagcaaactcttcatcactaatacttgcagcaacatcatcactttgatcattatcacttccagtttcaggtcctgtggtagacactattgttgaccctgatgcagactctattgtagactctgaagcagactcaaaagttgtatacgccacaaaattcttcagatcttcttcttcatctcaatcagtttcagaatcactagtgaagacattgataacctttttttatgcttgtgtagattggcacattcagaacgaacatgtccatatcctttgcatttaaaacactgcacattctttgataaacttctcaactcttcatcaattttatccttctgtttgtaaataggttatatttgctttctttttctagtgaaatcgaaatctgaacgtggtctcggggagtaggaaaaactaaacctcattaacaaatttattgtctcgtttattttgtacacttgattattgcttcttctgcacttacataactcagtttttattttaatagtcgaaactagtctcaacgatgtttagaaatgtggtttaaacacttcttgggagaaacaccacaatttaacatcaaaacatgcatctagtgtagtaacgctacgtgcatagatcagaattttaatttctcttagattgatattcaatagaactgtataagatattgcgctgaagaagaatcttctgactatatgcatacttactgacatcaagaagtgcataccaacttcatcaataacatcatgaacggcatgaaggtaactaagtaccaaaccaaaacataattgtcaatcttttcacgtctaacacaaacgatacatcctcatacttcattttgtttcaagaaataataaatcatatctaattactaatgcatactttcggtgtctaagtttcgggcttataatattaaagatgaaagttagtgtctcttagaaattcatactgcaacgttaaaatccaaaacatatatttgtgtggatataaattttgatcactcgagaaatatttcttttaaggatttaaactttcgcactaaaaaatccatatacaaaaataatgagaaattagtattttcttgatttgatgaatgaatgtaaaggtgtagcatatagtttctaagttttgaagcaggtatcctctgcgtccaccttccttttcttttaatactcttcttcctcaatcttctgcattaaataccttaattacatttgattatccggttataatttgatatccaaattttgtaatggtttattgactataggtttttatagaccgtttaacttagttatctcgaactaaacctattttaagagtatatccgagttaatatcatttttaaactgtgatatatgtaattccgttcgagtcggattaacatgtcgagatcagacaccaacaattcataacataatatacctatattttccaaatttgagtaatttaattaattcaccctagataatttgaaggggtttttcttttctttttttcagaagtaatattaagggttatatacgtaaatctcagcaaattacagtcttgtgtttttttcatgtttttttgcctaatgtaaactctaaaatctttgaatgtcgtacatgtttctccacaaagatttttttttgcgatataaaagattacatactaatttatgcattaagaacaaacaagtttctacatcaattattctacaatttacagctgttgataatcagatttttttatatgaaaaattgctttagaaaaaataataaaacatgaagaactatatatatatatatatatcttttaattatatatattataaaagctttcagtttttaataagattcgttaagcttaagtggtaaaaaaaaatacttttaaacttggaaacaatattttagaactcttaattaattaattacacacgtaattagttgttggggtcacatagtcacatgcgtgtgttgttccttctctcaaggtcccccacacacatctaattgatgatcctaggcttgtcactcttatagccactcatacaaatgaagcttaagccacttgacattgccattaaactccataagctttgttttttttccacttacaggcttccattaaatcttccattacattacataacagaaaagcaaaacacttttgccctttttagacatttgcttattgtgaaggtgtgaagagtccacgtttctagtttatgtttctttgaagattcctcttctccacgcgcctctttacgcgtattctattaccgacttcttccttagttagtgtgtacgacaaacaattacaatttctttttcgattacaaaattggaaccactattcatatatttaacactaggtttttaagtttcatcgaagcttcaggcagatcactaaagtgagtctaaccttagtaaataaggttttataagcttgcccacacgtagacagtagactcaatgtgggataaaaccgaatatgaaactgtagtaagaaaaaaaacttttgtaaagttacgtcatgttttttaaacccaatactattgtatcaccacacgtatttattcacatttttccgttaacactaaaaatcttttatttttgaaagcgtagccaaccaatattagataaaattactgcataactcgtttagtgtattagtagattttttttagtgtctttaaaaacacgagttcaagtttagataatagagaacattttgatagagtatttatactagaattttcacacatatgaaaacgaatataattttggaaattttaaattttctcttttcaaaaacaaattaacagaagatgttagtttgtaatatgttggtaattgtgattttcaaagttttaaattctggaattttcaattacaattttctacttggtgtacataaagcttgtagtaaatttgttaattcggaagttaatggattttttgtaacaagaaaataaaaatgattagtacttgagagttgacattagccagtagggaagtgcatataacgcgcttaagagggaagtaattaagaaaagagtcgtttccacttaattaaatcgtagccacaaataatggggtttcttaaaaatggcttaagtgtacttaaacttttgtatgatacgccaaattatgtgccctttcaaatatggaaactatttagttatgctttaacgagtaggttttcaatcactcataacccttgctataaaatctaaaatatatcatttttattttattttgcaaatatgaaaatctaatggtcttattagctccatagatcattcacctcctcaaagataacatagttattattattttttaaagttacttatcaaataaaagtgcaccaattcagatgtttggtatacgggtccggtaccatggacttggcccttgggtctacccatattcgactcgtacccaaacgtttattttgttcttttcaattgaactaacaaactaagcatcttaagtataaaaaaatcgttaattgtaatgtaaaagccaaaaaccaacagacaaatattgatttttgcgtttgtgcttaacataattatttaatgaaaaaattatatgttttaattttataactcaaaacctatttcttaaactgatgttgaattgtcgaaaaactaaattaataatgttggcagatatatatggtcacgtcaaagtctatctaatcaggacttttgtttttaatcttgataaacgcatgttatcgcattaaaaatgaaaagagatgggatgtggcaacaaaagcaagtatttgctacttgaagtgtgaaggaccatacatttgattaattttggatgtgtttttggttaggaattagtcacttttcactttaagataatggatttcgaatttggttgggattagagtgagataactttttagagtgtcaagatcgtcgcgtctccatcttaatttgtactttctttgtcatgttcttaatttgtttactaatagagtataataagttcagttacctacaattaattaagttaatttggcgtcattatttattactataaagtagtaaactaatgtacttttatcgatttctttatgagacatgccctactacaaaagcatataaagatcattgagttgttgaagtacatagcaaatttattctaccaatttaattaccatccaatctttttttcgtcaactatgacttgaatatatggacaatatggttgactaaagaaacgacaaggagtctcatgccgaaaacttagtacgtcgaggcttgtgtgtggtaacgatggaagaaatagattgagaaaaaaaagtgaaacggcaagcagtctgtttatgaagtctttggatctcttaaaccgggctttgtccaaaattagaatggaaaaaaaaaaagaaggatcccttaaaccggtaagcaacccgattaaattcaatatgtgtacagaaacttaatttgatttttttataaaatttaaatcaagactaatatggagacttacaaaagttaattatatgaattgtatgttacagattgagtgcgaaaggatgttccacgttcaatccactagcgaaacaaaaaaatcatttatttaactgattgtcttcgtaagtttacttagtaatatcatgttgaaacattaaatctgatatatgtgccactatgtaaatcatttagttaacttataattgaaacaagaaatgttatgtgtgccactatgtaacttttattagtacatatataaaggaaatagcgtttaataaatcgactgctaatctaaaactaacaagataattaattatgatcactaagcttcattctaacaaatcagtttatagaggacaagaaagcttataattactccaccttcttttgtctttttgtttgtgaaagagaaatatctgatggtaaaaaagcccaagaagacctcctctctacacctttaaagtttatgcaaatttagaaacaaacaaaacggaccactatagctaattatcttatatagataagatatgtagaaggagggatatacatatgtataataacaatcttgatatataacttccatcatccatggttaagattgtaacaccatgagttggtgcgaggataattcatatatacaaaccaaaaatcacgcgtatgtatgttattgcatgcatgtcttgcatcatccatgcatgaatgcatcaaagagtctccagtctttaatatacatatctacatggatggatgaaagtcatgaaaccatgttattaaaaccctttttcaaaacaaataataatgaaaccatgttgttataattggttaggtttgaagagatatacatagatagtccccatgcatgtgttattagtagtgtttaggatgaaaataacccctaatacataaattaattttatgattaattaacactctaagattaaggtaaaacataattaattaagactttagattaattaagggttagtaatcacgcggtgaatttagtctctataaaagcagtacctcaccttccacaaccttcaatatcaactcacccacatctttctctcttattctctcactcttttttttttatattcctctctctctaaatctataaaatatatttaaaaacttgatcgtatataataaagtaaataaagaataataacaaaaaaaatggagaaaagaggaggaggaagtagtggaggttcgggatcatcagcagaagcagaagtgagaaaaggaccatggacgatggaagaagatcttattcttatcaactatatcgccaaccacggcgatggtgtttggaattctctcgccaaatctgcaggttcgtttaatttcttcttaaaatcaaattcaattatttatagttatatacatatatggtgtatgaactagggtttcgtcataacatgcaaaggtatatatcctatacgacaaaagcagactttttttttgttaaggtaaaatactttttcttacgtacgttcatttcttttatatataaatctatctacacagatattaattatattttcataactagattttttttttaaacgtgtatatatatatgctctattatattcgttctttgttaaagaatcaatctaaatattaaaacgttttcatgtgttggatacttggatatatgatgctttaatgatggcctagtggtagagtaaaataatgtaaaatacttttttaaaacatcaaaaataaatgatacacgtatttttatactcatatgtcatatgtgctactactaattataattatgtgaatatatatccacgtagtaagagtcatattgattgtgatgattgataatatgaatgtatataggtctaaaacgaaccgggaaaagttgccggctccggtggctgaactatctccgccccgacgtacgacggggaaacatcactccagaagagcaacttatcatcatggaacttcatgctaagtggggaaacaggttggttttaatttacttgtcgtagaatatatataaacaattatatatacatacatatacactatgtgtaactagagaaaaagacaaacaaaggcaaattcttccaactttgaatcgtttatatactctgaagctgccaatatgccacgtaaatctatgaaaagacaagaaagcaagacatttggtgactaaagcaaaaagtgtttatttcctttgtgataagcttgatcgaagtttgttcttagacgtagctaagagtttttgtgcacgtgtcaaattttcttagccactcacattaaacctcgtgggttttatcaaaataacatttgaaaatcgtgcctatttctcctccatgctcatgcgtcagcgtcgacatggctagatttttccccaatatttttatttttatttttttgaagtatataagtgtgtcaaatttattcaagtgatttcccacgtttctggaagatatttttctttaatttatctatgttttttattcgaattctatatttatttgttttatatgtatatagagctggaaaatatggcccaaagtacaaggtacatgattctctaattcaacaaattaaatggtatattttgtttttaagtaagtgcgaatagacttacatattttatcatctaaactagtatagttatatatatatatatatatttttttatagtatagtttcatgttatctgcaattaactaattacgaatttgattcttattatttaaggtcaaaattttatcaagggaagaaccaaaaaatattcatttaatttgtattttcataattcttttatttaaattttcagttattttataagttactctttttgggttggttttaaactagtttcattttcctaatctctacagtttaattgacatctagcttttatcagttaatcttagaagtaccgtttattaacacttttaacaaacaaacaaaaaattgtaacgcttttaagttttaacaacaaataaattatataatttataaggcttatcagaaagaaagaaaaaaataatctagaaattgaaaaagatccaaacattgtacatgtaataatagtacaaaaccaaaaagcctagctcatgacagacacaactgaaatagacgtaaaccttaatgttttggcttcatctagacgtactaactttggtcctatgcattcgcatattaaatctctttaccccacaacaatcattagctcatcataataaactaacactaatagttaaataatgatgtcactaatgcaatttcctcttaattgtatgattaggtggtcgaaaatcgccaaacatcttccaggaagaacggacaacgagatcaaaaatttctggaggacaagaattcaaaaatacatcaagcaatcggatgtaacaacaacatcgtccgttggatctcatcatagctcagagatc

SEQ ID NO: 475 - DNA, 58864 bp, Arabidopsis thaliana
aacgatcaagctgcaagcacgtcgagccataatgtcttttgtacacaagatcaagcgatggagacttattctcctacaccgacatcatatcaacataccaatatggaattcaactatggtaactattcggccgcggcagtgacggcaaccgtggattatccagtaccgatgaccgttgatgatcaaaccggtgaaaactattggggcatggatgatatttggtcatcaatgcatttattgaatggtaattgattgatcggtggacaaaacatggaatattaattgagtattatatatgatttttaggagtactattattagtacgtgacatgtatatgtttttgcctcgttgtagaggtttggggttataattaatatataatgttatctaatatgcaaccttgatacatatttggatctttattgaacccatgttatacataaataaaattgttgaaggggtcatatttccggatatcttttgttttattgaagtaatttttcttaggaatgttcgtacgtaccatgtatatatgagaacatcatttagttttgttttgttgatgacctatgaatctatgattagtttaatgtatatatcatataaaagttgttatttactccctccgctagaggttttcacatatattataaagcataccaaaatataatgtcaaattataatcataatataattactatattggatacttttaaattacgataaaacattaaaagttatacaaaagatgggtttggtaaaatataaatccgctatacataaaaattaacaaaacatcaattttcataaagcaacaaataagtttataacatggtcaaattgtttttgtgcaatctataacatgatcctttaatgaatttgttaatttctgtgaaaaggtaataattgtatttgtaaagtactcttaagtttaagtgactctgaattcagtgcaaatgattgcaccaacctcgtaagatgcacttttcttaattttacaaccataatgtatgcggcggatcttaaacaaaagcctttatccgcatatatatctcatgtcatactcgaccagtacaattatccgttaaccaattgatatagttacataagaatttatagttaaacacatcatataatttgtatacagtttttctttttctggaaggttaaatcagagcaagacgtcaaagcaataaggttaaaacagagcaataattttaggtgtatgatcaaatcgagaagcaccttcaatgttcatccatatatatatgcaaacacatacactgatacacatatgagttaggcatgtatatacatatacataatacatgtaacatgtggatcgatgtgtgtacatatcacatgacgtactcatcatgaaacatatagcacctactcttaccaatcgcaataagacacgtatcacattgatgctcaaaatagaaagtttttggtacagttcacgttgcctttattcaacaatttttatccatttttgggcatcgccattcaacatgtagaacccgacgtgagcctaactccacgaatcaaaaccacaacctttaagatgaagatatcaacttatcttagttaataaatgaatagaaataaacaatggttcagtttgattgatatttctatccatatattcttcaaaaccataaatatttatacttaaaacatgggatgaaaaataagtttcaataaggtaggaacatgtacatatattgagccgcaatgatatagattgactatatgacataagttcgtagaaatgtgtaatttatatttattatatgtataaattgggtagaataatttggaaattgggacatgatgttaggtttggaagtgtaagcactatagcgagacggcaaaagcattaaaagctttaccgaactttttaactttagtctttaagcaacgacacattttgtcccaatgaagcatgtgtaaaggataaatccaagctccacttcctcttctctatgcattggctagaataggaataattcatatatattccaattattattaactttttttaaattggcaaccatgttatgtatatagtatctttattatattcacattgcatgctacactatatatatttcttttacatcttggtgtagaaaagtagaaaactcgcattatgcttattttagattctcaactacaaatttaaattcgaaatggatgtggaattgggccacatgtttatttaattgattaggccaacgtttttatcatgtgggaattgtcgacttcacatgtgaataataaaggaaaaatcacatggcgggtcggtcacaaacatacaagtggtttataatttagaaatgtaaataaacgtgaaagaattgttttttttcttttaaattctctttatttgtgtatttgcttgttcattgttatagcctcatgccttagctgtactttctgtatatagcaaaaaccattttcttcccgtctcaatgagtttgacataatctttattcaatgttgaacagttgaagtcggcgaatatctaagaagattttcataactatcgacttactaaattatatcatgtgcagtaactatctttgaaatcaaagaagatcttccattaaagatacataagcaaatattctttttagtgaatatggtttttaatttcactatactagggtaatatatttttcggttcatgcaatattcattcaattaaactatcatgcctttaccattacaattcacttggttccggttagatcaactttgtttttggctttggtcgattattaacttggcccaagtcatgcattccacgcatgaagcaccctccgaagttcctttcctatgttctctctaatcttgaacctgagggattgattgagagtgacaactctttcggttgagagcaataaactcatttgatgaataaggttttcgacctttgcatccattttttttttcctttaatctagagggttgtcgattcagaagcaagagtcaaaactaaatttggaagtttagttccacctaattcaaacaatgatatatatgttaaaccaaggttaataatgttaaacatagtttcttacactattatgtctattatatgtaggaattgattgattattatttttaattattatgaaaatgtctactgaaaaaaattaagagttttggctaattaaaaagctagacaaaaaaagtttttggccattttctctatagaatttgctctttctgttgttacttacattaaatgctgtcttgcacctatatggcctgaatgtgaggaaggcccatatctattggtgaaagagcccaaaggttaggccattcagtatttttctgttcttgaacctgatatggatcttcttgagtttatttgcctcactattcctgagcctattatcatcacattatatcatacagttgcatcaattcaaagcctaaacaattgcattaacgtgtttctaataaaaaaggatcggaggattattgatagttatatcttattttaagcccaaaagataaacacatttgtggtggttgtttacttcgcgtatgtgtccttaccattcagacacaaagttatactgtattatttaatgtatcttatgagccacttggcagagagatatggaacgtatgaactcgtacttaccacacgtctacgataaaagcttagttttgtctatcgataaatataaattattcgatttgtaacgttttggattttaatatatcatcggaacatcatcctcatctcgaccacacttcccaagaccaaccacatcatggtttttgacacttgacatacgataattcgtcatttcatttttctttgttttaacatgtacaaactatacaagttgttattttgttcctatagtcaaatttactaaagaatatatagaacgatcctttgaaattttagtattatgcggagaagataatttatttgagatgaaaatttattatagaagttgtactgcattaattgttaccattcacaaaaacttaattataaatgttataaatttttttacttgtaattttattgtacaactcttttctaccgctttccactattccaaaaaaattacaacttcaactaacaactaaaaatttaaatttttgtacagttttatgtaatcaaactggatttagagttttttttgtttatctcatgattgagtgggtgattggttgggctgtaactgtaaagtttttgctgtagagattttggtgtagctgtgttagctgtaactgtaacttttattgttgtagaattattgctgtaagtttttttattttaaataatttataaaaaagaactaataaaatataatagttgtaatacactttttttatatagtaaataaaatgccttgcattactaatttaaataaatatattatgatgatataaaagtaaaatatagtaaatattttttttgttatatatttatgttgataattttaatttcttagatttatttaatgaattaaaatttctacaccaaaaaaaatttggctttgagaatttactctcctacaaccttaaaaataaaattaaaaaaaattgggctgtaggtttaaaaataaagctacaacatgattagtacgtaatcaatacttttaaaaaaattaaggatgtaagttagacttatacgccaaccaatcatgcactgaataacatcaactcttatcatttctacacaaattattctaaagtatttgattgaatataatttcagttaaatttgatcattattctttatcatctaaaatatatatacttttaaaaagatgaaagcatatgcatcagcagagaaaaaaaaagatgttcaatgcagaaaaaaatatttaattttcggaattaaatttaaaaaataaaacaaatttaaataaaccccattaaagcttcctaccaaaataaaaacctttaaagcttattttatttatcactaaaatcataaaaccactaattattacctaaatcgttgaatatttcaatttgatgtaattttacttttaacgaattaaataataattataccaatgatgatgggccaagcaagtcgtgcaagcaaagagttaagctaggtcccactctcataataagtccagaaaatggacgatctagatctagtgtagtctctatccaactctaatcttcaccgtttgttattacacaagtcaaataaggataaaactgtaaattcacaacaaaatcgtcgaaatatcatatcattcactggtggaggaaactgaagaaaacgatccgataacagcattttctattttcttctgtgcctcaaaaaatcataattttctcggaaaattaaaaatcatgtttaagattttctcgagaaagtaaaaaaaggaagaagaagaagaagaaaccatgggaagagctttcgtgtatgtaattctcggaggaggtgttgctgctggttacgcagctctcgaattcacccgtcgaggtgtctccgatggcgaactctgtatcatttccgaagaacccgtaagctctcgaaatatctctttctctaatgaatcgattttcaatttttattgtgtttgataacgaaatcatcgttgttgttgtttggtcctgaatcgttttattctggtttttcactctgatttttgagtgactctgtagttgattttactattagtagttttgattgaagatttggtggtttgatgattattagattgaaactgattaggtttgtatttgcttgagcttctgatacttataattagaaagtctcaaacgattaagatataatcaggtgttactaaacgtatttttagtgtgagtttcgttaaagattagggttttgctcaagattcattctaatatttgctttgtctaggttgcaccgtatgagaggcctgccttaagcaaaggttttctgctgccagaaggtaagaaaaaacccggtagcttgcggttttctacatttggagttagggaaagctaagatgtatggaatttggttatatagttcattcattaggctctgtaaaggttactcatgatcttatctgcagctcctgcacggcttccttctttccacacttgtgttggagctaatgatgagaagcttacaccgaaatggtacaaggatcatggtaattacatttgcactttcgatttggagaaactactgttttacttggtggtatgtctacgggattcttttctgataatacttttgtcaggaattgaattggtacttggaactcgtgttaagtccgttgatgtgaggaggaagactcttttatcgagcacaggggagactataagttacaaattcttgatcattgcaacaggtgcccgggtatggcttgcacaataatatttatgttttcgtttatccaaagtaagagtgtgttccggtgactattagcataaacgataaatcactggtttttaacaacgtattatcctctttatgattttgtaattaattggctgaagacaatgggtttttgtaatagttgaatgtctagtagatgttgtgaacattgttgtaggcaaatctgctcactcctgaaaattgccaaaggaatttgtgctattttaaaacatagaacattaaactgctaaagttgtggccttattcttgtcacatttggctcgtgcaactaggcgttgaagcttgaagaatttggggtggaaggctcagatgctgaaaatgtttgttacttacgagatctagctgatgcaaataggcttgccactgtgattcaatcaagctccaacgggaatgcggttgttatcggcggtggctatatcggtatggagtgtgctgcatctttagtgatcaacaaaatcaatgtgacgatggttttcccagaggctcactgcagtaagttctctcgattattactaaacttacgtgtacgagagaaaggttgtgtatttagcttgacctttttagtttcttatgacagtggcacgtctctttacgcccaagattgcaagtttgtatgaagactactacagggctaaaggcgtaaaatttataaaaggaacggttttgacatcatttgagtttgactcgaacaaaaaggtaagatcgtttcttttagcttgagattcaactcgaaaaatgtctggtacgttgcatctatgtatacaactaaggatggcaagaatcagtagaaccacagatacttctggtccagtactcaaactatgaaatcttgagccttgttcaatgtatttgtttattgatatgaggttttttggttttcgatttacaggttactgcagttaatctcaaagacgggagccacttaccagccgacttggttgtggttggtatcgggatacgaccaaacacaagcttgtttgaaggacagttaacaatagagaaaggagggataaaagtgaacagcagaatgcagtcaagtgacagctcagtgtatgcaataggcgatgtagctacatttccagtgaaactatttggcgaaatgaggaggcttgagcacgtggactcagctaggaaatctgcgcgacacgcagtttcagccatcatggatccaataaagaccggagactttgattacttaccatttttctactcaagggtcttcgcattctcatggcaattctatggagaccctacaggtgatgttgtgcactttggagagtatgaagacgggaaatcatttggagcgtattgggttaaaaagggtcaccttgttggatcttttcttgaaggaggcactaaagaagaatatgaaactatctcaaaggcgacacaattgaaaccagctgtgactattgatttggaagaattggaaagagaaggactcgggtttgctcacacggttgtgagtcagcagaaagttcctgaagttaaggatattccgagcgctgagatggtgaagcaatctgcaagtgtggtcatgataaagaagcctttgtatgtatggcacgcagctactggagtcgttgtggctgcatctgtggctgcgttcgcgttttggtatgggaggagacgccgtagatggtgaggaaaaaaaaaactcttcaagtgttggattcattggaaatggaacttgctgttgtttgtagcattggtgggagaaatatagaagggagagtccaaactactcaatgtgattacattggtatacgattattatatgcttcttttaaaatgcataaacgtttccactacaaactttgattcaacgtctttgaagccctttgttacttgttagtgttcataatcttgtgattattggtagagttaattcggcaatacggcaatacccataaaattagaaaaatagcaatgaggagctagctaacaaataattttgcacacttatttaattgttatgacagaaatcataattaataaacaaactaaatgtgattagaacaacaagggcgtttggtctagtggtatgattctcgctttgggtgcgagaggtcccgagttcgattctcggaacgcccctttttatttttttaactcctcaacgtcaggcctcacgggtattttcgtaaacatacaaacgatacaacctcatctatttgtatatgcgcatgatagcaaacgtacgcaatattctattccccaaaataccccttatccatcatttttctatcctctcatctttcatcttcctcacacacaatccaatcaaaacacacagagagaagaaaaactcagaagaaaagccaaagagtgaaacaaaaatggcgtcgacgactctctcaatcgcaacaacaatccgttcctcatcttatcctactctcgcttccatcaatcacttcccttcccgaaccaccaccatcgaattcccctctcgcttcggtggtggttcatcatccacattgacccaccgtgcaacccatctccgtccaatcgccgccgtcgaagctccggagaaaatcgagaagatcggatccgaaatctcatccctaaccctcgaagaagctcgtatcctcgtcgactatctccaagacaaattcggtgtctccccactctctttagcccccgcagcagcggcggttgctgctccagccgacggtggcgcggcggctgtagtggaggagcaaacagagttcgatgtggttatcaatgaagttccgagtagttctcgtattgcagtaattaaagctgttagggctttgactagcttggcgttgaaggaagctaaggagctaatcgaaggattaccaaagaagtttaaagaaggtatcactaaagatgaagctgaagaagctaagaagactcttgaagaagctggtgctaaagtctccattgcttaaggtttttataaaaaaaaaaaaagaagttgttatcttttctggaatttgattggtcttttgtgttgtttagtatagtttgcgtctggaattgttgagaaattgttgtaatttgaatcacatttggtttcccattagctgatttcgccattgatgtgagctttttggtagctgcacataacatgtttgttgaaatgcctaaatgaggcaaatcactcgtagttgcttaacatgaaacagagttaaaaataataagcacaaatgtcactgctacatttttttacttagtattgtaacactcatgaaatatttaggatatattataaacgagatcatgtatgaatacaaaaacacagcatattaacaccaagtttgaggcattgtccacctaagaaaccttgttctttgcagtgcttattgcagtccggaaattttgagcatagaccttccacaaggtaccaccctccttgagctttggccatagattttgcgtgtacttcacctatcgttttccaaagattgttgtaatattagaaaaaaagtcgttactcgtttagacataaaggcaaaagaaaaagaaaattcactcgacaagaatctcttgcagctggtaacaacgcaatatcactatgtattttattttattttttgtgataacaagttaatatcacaatgtattgtgaatcacaatgtattgtgaaaataatagtgtatacaatatgtatggagatatgatctaatgtctgatataaaataagtattcggtttgctagttagtgttgagtgttaactcatgaatcttgctactttggttatacttcagtatatatgaataaattgaattaaacagaaaaaaaatataaacgtttttttggcatacttggggcgagaagaacaatcatgcataagaacacaaggaaggcgcatttgcttgatgaagccatttttggtttttgtattgtttatttttctaatatttgctaatggaacacaatattactcaaaacccttattaatatatatatatatatatctgtatatatagagagagaaatatgatgagttttttactttgtaaataaaattggattcttttcttatttaatctaggatattttattacatttaagttatggttttattttatatatatgaaatttttaataatcatgatatgggatggggtggatttaattagtgatgattataggatttagattcaattttttctattagtttattttcattatgataactttaggtatcctactatattatttaggaagtacattttaaatgtaaccttaacttttgtaattaattacatgacaatgccattagaaaagtttaataaaaaaaatcctttaatgacgtcattaaggttaccaaaatcatttaacgacaatattaatctcttaattatagggtttattggatctacagacgggttagcaaaatatactgaatattcaaatatctatctgttagcaaattataaacaaataagttcgtaaaagaatttcatattttatatacgaaatcaactaaatcttaatcacataaaaattagcacaaaaaaaaagtattcaaccattaaaaaattatcaaatctctgtgttatataagttttgatagtatattcgaataaagtgtaatataccttttcaatttgtattctttaactaatttaagctaactaatatattttctaatcttatacctatcaaaaccgactatcgtttcttatctctatagtatttttgcaagacttttttggtagatttgggtaaaagtgcattcgggtcatatggtacattctctattaaataaatatggtgcactcatatgttattagctaaaatgtttagattataattcagagtcatatcataaataaaattaatattaatcaaataaatggctttttggcaagacggatttggagggacgggtttttgaatcaacattaataaaaaagtaaaatataattaatccaccatttcagtacgagttaaatctttaatttattattttttaagaccactaatattaaacatatcaaatcatcctaatttagaaaaaattatataaaaccaaaattgttatatggtatgtataatgttactatatataaaattaaacaataaaatataaaactttaacttaaaaactgcggtaacaattataaactgtaaatataaatagtttataaaaataaaaatttgcaagttttaatatatattacttttaaaaaataaatcgtcccgcggtataccgcgggttaaaatctagtttaatcattaagattgaagcataaatattattattcttattaaatgatttcataggatttaagaattgctaataataatttttataagatttaatagggttgaagtaaaatactaattaaaattaaatcctataaatattttaaatagattataaacgatatatgtgcttaacataaacagaattaaaagtaataagaacaaatgtcactgcaacattttgcaaattattttgcaacattttttactttttaaaatattgtaacactcatgaaatattttaaattgattataaacgagattatgaataaatacaagtacacatcatattaacaccaagtttgagacatgttccacctggaaatttttgttctttgcagtgcttattgcagtccggaaattttgagcatagaccttcgacaatgtaccatttgtgagcagcgttaacttcgaccatagatttcgcgtgtacttcacctattgttttccaaaaattattgtaatattaaaaaaaaaattgttgaacataaaaggcaaaaaaaaaaaaaaaaatcactcgacaagaatctctttcaatgggttacaacgcaatatcacaatgtattttttatttgtaaaagcttaatatcacaatgtattgtgaaaataaagtgtatacaatatctttaactatatgtgtggagatatgatacaaaatttgatataaaataaacatttggtttgctagttagtgttaactcatgaattttgctattttgagatataattaaacagaaaaaaatataaacgtttttttggcatacttggggcaagaagagcaaccatgcataagaacacaaggaagacacatttgcctgatgatgccatttttggttttgtattgtttatttttctaatatttgctaatggaacataatattactcaaaactcttatgaatatatatagagaaatatgatgagttttttcttttgtaaataaaattggattcttttctactttaatctaggataatttattgcattaagttatggctttattatacatatatgaaagttttaataatcatgatatgggatgggatggatttatttagtgatgattataggatttagattcaatttcttctattggtttactttccttatgataacttttttgggtatttaatcacaagattgaagcagaaatattatttttattaaattatttaataggatttaagcatagctaataataattgttataagatttaataggattgaagaaaaaaatactaattcaaattaaatcttataaaacccaaaatccgaaaaccgtctcttcatcaacaaactcaaaatctatgaaaattatctattcaaatcataaatattcaaatatacgaagtcacgaaccctaaataaagatagggttaatttcctcatcacatctagatgccagcactaaaaacccctttaaaggccttattgaaacgatgttactacaaatggagttaaaagcttagatatagaactgatattattaagataagactgaaacagagaaacaaagagacaagcaactctcgagagacacaagttgtccctataactataaggaatctaaaccattgtgaaacggctgtccaaagaaaataattctcatatctaacgtccttgccttctttaacacaaaccctaatatatagaaatggaaacaaatcaaatgactttagaaagtagaaattatcaaaaagtaaaaacctatcatccacagtttcataaaggcataaagttaggtttttacttttgcatctttcaataagaaaaagttagggtttatcttgtttttcttcctcatcttcttctctcgtgcagcccaaggaacgcacacagagacacacaaacaaaaaaacaaacaaagaagaagtaaaatggcagctacgactctttccatcgcaaccacaatccgttcctcatctttttcttccggtcttgcttccgcacatcacttcccttctcgacccctctcgatagaattcccctttagctttggtgtttcttcttcttctacgctcagccaccgtgcaatctacctccatcctatatccgctgtcaaaactcctaagaaaattaagaagattggatccgagatctcgtctctaaccctcgaagaatcccgcatcctcgtcgactatgtccaggacaagttcggtgtttcaatactcttttcagcacctgctgcagcggctttacctcctccccttgacaatggtggtgcgacggcttctgtggagaggcagaccacattcgatgtggttatcaatgacgttccacgtggtaatcgtattgccgtgatcacagccattagggctatgactagcttgtcgttgagtgaatcgaaagagctaatagaagggtttccgaagaagtttaaagaaggcgtgaccaaagatgaagcagaagaagacaagacacagctcgaagaagctggtgccaaggtttccattgtttaagttttaacaatcggagtttttaaaatatgatgtgttttcttttcttttctagactttcatagatccatttatttgtttcaagagacacatataaggtgcttttttcatttctagtgtttgtcttattataaagtttgttgtaattctcaccacaaactctctgtttttctcgcaacctctgtttttgttcttgttaaaacagaaaatacaagaacacgtttaaacactttaatgtcttcattgataataaacttgataatcttactcaacacaaagacacacatacatatagtggtttagctccacttgctacactacacatacttagactctagaccgcatcattgtcctaagacttacatgacctacttagctatgttggaactcccaactccttaattcactcttacacaacatctttagactctatcttagactaacaacccaacactcattaactaaacatatttgagcctaattcatctgcagcccattacaacaaaacacaaagcccaacatctcttctgttgactttgttccttcctcttcatacgtcgttgaccttcttgtcacgacatttttttcttttttaaaaaactatatattatgaaatccgagtatacatgatttgaataaaagcgcgggtaggaaaactgagaaaactattgggtcaaaattgcattatcatgaaatcataaagaaagggcgtttggtctagtggtatgattctcgctttgggtgcgagaggtcccgagttcgattctcggaacgcccctatttagtttttttcaactttttagatcgtatatacacgcgcatgatagcaaagtctgcgcattacttttaatgacaaaaataccccttatcttttgtttttttatcctcctcatcttctacaaacacactcacagagacacacaaaacaaatcccaaagcttcagaggaagaagaagaagagagtgagaaacaatggcgtcgacgactctctcaatcgcaacaacaatccgttcctcttctcctctcacttccgcttccactcatcacttcctttccaaacccaccgcaatcgaattcccatttcgtctcagctcttcttctagccaccgtgcaatcaacctccgtcctatctccgccgtcgaagctccggagaaaatcgagaaaatcggatccgaaatctcctccttaaccctcgaagaagctcgtatcctcgtcgactatctccaagacaaattcggtgtctccccactctccttagcccccgcagcagcggccgttgcagctccagccgacggtggcgcggcggctgtagtggaggagcaaacagagttcgatgtggttatcaatgaagttccgagtagttctcgtattgcagtaattaaagctgttagggctttgactagcttggcgttgaaggaagctaaggagctaatcgaaggattaccaaagaagtttaaagaaggtatcactaaagatgaagctgaagaagctaagaagactcttgaagaagctggtgctaaagtctccattgcttaagtttcttcaacaatcggaaaaaaaaaaatgtgatattttcggaatttatgagtctttttgttgtttagtatagtttgtgtttgagttattgattcagcttttgagaaattgttgtactttgaatcaatttggtttcgtattacagttttagtcttcaacaagttcttcctctagatgcacataacctgtttgttgaaatgcctagctcaaaaaacacacaaaacagaataaacttgcttttgcataaaaatctgatatatctttataaacttgctttgtctataaaacataagtttaacattttgttaaatagcgtatgacaaacgaaatcgaaaaggaatatttaaggaaatctaaaacattaatcagacaagtctaaacctttttcttctcgtttttatattctccagaggaaaaaaccgaaaactttacgccgcaggaaacgaggaagacggtgtttctagattcgctgcttcttcaggtgattttgattcccttgttcttccaaaggtgtaaactttacgtgtttttctcgtgaaaaataaaaaccctttttttcaattaccaagtttcttctgtttgtcttaggtttatgtttggtttctaatcattgtcgttgtctaaatatgtagagaatcaagaagaatctttctggttctatggggaatattctaccgactgggtctagggtttctgagaacgagggttctgatgacaacaaattgaaggagcacgatgttaagatggagaatgttaaggaagactctgaacaaattggagataatgtgaggagtggggtttcttcattgagagataattttgaagaattagaaaatgggtttcatgtgggagattttgtttggggagaagaagccaatagtcaacaatggtggccaggtcagatttatgattctttagatgcttcagacttggctttgaagacaatgcagaaaggtaaattacttgtggcgtattttggagatgggagcttttttggttggtgtaatccattggaattgaaaccgtttcttgagaatttcaaagagttttcgaagatgagtgattcgagaaggtttcttcttgctgtggaagatgctgtgagagagattggtgagcatgttgagaagtttttggtttgtgatgacgctgctttagttagttctgtagctttgaatttggggattaaggatggtgttgttgtgcctgatgttagaagaaagattatatcgtctttggttcttgaaaaccccggtgttgttcttgaagatgttaaaagacttgccatgacggttagatttgatgatttgttagagattgaggttttgaggaggaagatatcggcgttttatcggtgtaaaggaaggtttgatttagctaagtttgatgaacatcgatatattataggacttgaagacaaagagcatgaatcttgtcagagattattgagaaagtgttcaggttttgctagcaaaaagaggaaatgtggtgatgtagcaaccactggttctactactttgaggaagaaaagactgagtgaagtttcgaagattgaaaccgctgagaaagaaattagtaacgggaagagtttgtcgtcgaggaagagaaagagcaaaaggggtttggatgagaatgatgatgatgggattgagaaaagagaagagtcgaacgactcaaaccatttagaagagagtgagaagaaagatgatttagcaactccattggcttcaatctgcaaaaggctcaatgttgatgtttcttcatgtgttaaaaggtgtaatggaaatggcgaggcaatattgcagacaggtaaaagagagaggaagaaaagcaagtatctttctcctgaatacatgacagattttagttgcagagcgagaaagatcaaaatagaatctgctgaatcaagtcagatccaagtagcagtgcgaatgacaacgcctaatacagccatcgatgttgtgaaactgggagctacaccagaggaaatgctggctctaatccgtgcggctgctctcaatgcacaatatccaaaagactataatagtacctcatgtgacatggtaagagagtttgtgtccaattatcgaagcttcaataacaagaggaacctttcagatgtagagaagcagcctgaagtgaaacaggaaatagtggatgagaaagagaaaaccagaaatgaaccaggtgttgagctatatatcaagactggttttggttctactctgccttcaaaagatgatttgatcaaaacatacgaaaagtttggagctttagacaaagagagaagctatatgttcaacaataactcatgctcatgcgttgcctttgtgaatgcatctgatggagaagaagcttttaacaggtcattagagaaatgtccatttgccactacttccacagtaacattcaagctcgagtatccatcttctgcttcatctgagaagaaggaagctgaaacaagaaagggcgtaacagaaatcgagtgtttgaaagagaagctcgaggggataagagcattgttagatcaatcagagggaaagattacggaagaattgaaaatgaaacttgaagatgaatcaagaaacttgcttgacaaggtaaggaagatgattatttgatcctcttagttagtattgtttttaatattagtttaaaggaagacttttagctcttaggagacgataggtgtcaaaacctgtgagtgagactattttgtgcagacaaaacacaaaagcttgtaacgtgataaatttcaaggcccaatgggcttttgatctgaacctttatggaatagctggatttttctgtttttctcttgtcggcgagaatataaacctaaagagggtaacccggtaaaatgagtccgagggttacactttaatgggcctttaataagcccattaagtatctataaataccgtacatgattcttcgtctttttcatcattcactgaaacaaaaaccctaattcctatgcttctttctccgccgcttctctgtttttggctaattagatttcgttttattaggaactctgttttggcgatgatgatcaatgcttaatttctgacacctcttgtatgagaagagcttgataacctcttctttgagcacattatgcaatactctgagccttaccaatgatttttttacaaagacaagttttttggatctgaattagggtttaagagtgctatgattgtaaaagtaattcctcgtactgaaagccaatggcttgaaagactcacattactacccatagaatatgagcactcactcttctaaatccagttttggttttgttgtttagcattgcaaagttgtggctttaattctttggttttgttttttagcattgtccctttgtcttttaagagccatgttttgaattgttgttgatagaattagtttcgttgagcaatgcccattttgttgcattgatagtgattactgattagtgtttcgtttattatttatggtgttgttgtatgtgtagagtagtggtggtaattggcgaggatgaataatgctaaatttctgacacctcttgtatgaggagagattgataacctctcctttgagcacattatgcaatactctgagcctatcattatcattaggtttgttttgtgtttgtagatgagtgtggatatgaattgggttggatgctatgattgtaaaagtaattcctcgtactgaatgctcataaggcatgatagacttacattactacccatagaatatgagcatcacccttttcttctgatcaaattttcctttcattgtttattgtttgtttttggttcctttcaatagcattaaagaataagttgttcattctggttccttgattgtatcggtagttggcttactgctttttattgatcttcattttgaagattttgttgaggattatgaatattggatgaaaagtgtgtctcaagctaaagtaaacctctagtgattttccaaagtgctatggggaaattccgaacctgtaatggcaaacctgacacgcagtctaaaaactgtgtctcgagctgtctattgtgtataagctcctctactgtctgtggttgctttttgttatgttgggattggtggaaggatccatagagagacttcaatctgcctatgttgttgatgtttcgttaccattgtctaatcatctgttgtgcaccataagcagatgtttctgtgtatttttacgctttaaaattaatgttgaacttgcctagttcttcaagagctaccattatgtaaactgcccttaaagaactaggatatgtgtacaaattggtaactgcttgtgttttttgaatctttcaatagcaggaaagaaacaagctggattgtgttttatcattcacataagtttttctcagtttaagagtccatagagcatcgacatctgccactatgaagtataaacgttcctgtttcatataatggaacagctgggggtggctactaacaatatgagcctttcaaggtgtcattcccgttgatgaatgtaaagcattgttttaccagaaccatagacattttagccaatggtggtgaacaaaacacctttgttgaactatatccatccaatgtgtaagtaactctaaaatggtgcgattcaaatctacaaccaaaaccaacgttacattttcaataattaatcacttatctgtaagataccacgattaaccttaattaagccaccaatattcaaatctacatccaaaccgaatttgtgacaactagtcaactacagggtttacaatttaattaatcagcaaaaacggtgcggtgcctaatctaaatccaaaccaaacgttatatatatgtcccaataaagaaatgacacatactatatattgccacgtgtcatagtattcacgttcgactcgtcagagaccgacaaatgtcacaagctcttcactaaaaccgtaaaatgtacggttaagacaaaacacaacagaagaaaaattacacaagaaaaaaataaatgtaagaaaataagatcaatacagttgaaaataaactaaaaaaatgtgagataaaaatagaaaaaatgttaaaagaatcttattttgaaaaagtgaacttaaaaataaaaataaaaatttcggcaattgcttctcgtcgtttacttacacaagaggcaaagttgagtactactaagagcaagaacatactctttctctttctctctatctctgcaagtaagagatctttcagacaattttatttttgactttgtttaataatatatctggaattgatagttactgtttagtgcagcttctagatttccttatccaagattttgagtgcctttttcctctcttaattagattctagctacttctccttatctactacatttagtgatctggtgagtgattgttactgagatttgtggttaattagttgtggaatttttcaataaaaaaagtttgattgctagaagatattttcttgatcttatatatggctggagagaggagaaaagggatgaaattcagtaaattatattctttcaagtgttttaaaccattctctagagaagatcattctcagattggttcaagaggttactcaagagttgtgttctgtaatgatcctgataatcctgaagctcttcagcttaattacagaggaaattatgtgtcaaccactaagtatactgctgctaatttcatcccaaagtctttgtttgagcagtttagaagagttgcaaatatatatttcctcgttgttgctttcgtttcttttagtcctttggctccttataccgctcctagcgttcttgcaccgctcttgattgttatcggtgctaccatggttaaagaaggtgttgaagatttgaggagaagaaaacaagtatggccttttataatattctgatgtttttttattgtttattaatgtgttcttgttttgttaggatgttgaagctaacaataggaaagttgaagttcttggtaaaaccggaacatttgtcgaaacgaagtggaaaaatctccgtgttggtgatcttgtgaaggttcataaagatgagtacttccctgctgatcttctactgctttcatctagctatgaagatgggatttgttatgttgaaactatgaatcttgatggagagactaacttgaagcttaagcacgcgttggagataacatcggacgaagaatcgatcaagaacttcagaggaatgatcaaatgtgaggatcctaatgagcatctttattcctttgtgggaacactttactttgaaggaaagcaatatcctttatctcctcagcagatactattgagagattccaaactgaaaaatacggattatgtatacggcgtggttgtttttaccggtcatgacactaaagtgatgcagaatgctaccgatcctccttctaagaggagtaagattgagaaaaaaatggatcagattatttacattctcttcagtatcttgattgtgatagcgtttactggatctgtattcttcgggattgcaacgagaagggatatgagtgataatgggaagctaagaagatggtatcttagaccagatcatactactgttttctatgatcctcggagagcggttgctgctgctttctttcatttcttgaccgctttaatgctatacggttacttaataccgatatctttatatgtgtctattgaagttgtgaaggtgttacagagtattttcattaaccaagatcaagaaatgtaccatgaagaaacagataggcctgctcgtgcaagaacgtcgaatcttaatgaagagcttggacaagttgatacaattctctcggataaaacaggtactttgacttgcaactcaatggagtttgtgaaatgttcgattgctggaacagcttatggtcgcggtatgaccgaagtagaagtggctttgagaaagcaaaagggtcttatgactcaagaagaagttggtgataatgaatctttatccattaaggagcaaaaagcggttaaaggttttaacttctgggatgagagaatagttgatggacaatggattaatcaaccaaatgcagaacttattcagaagttctttcgtgtgttggctatttgccacactgctattcctgatgttaacagcgatacaggagagatcacatatgaagctgagtctccggatgaagcggcttttgttatagcttctcgagagcttggatttgaattcttttcaaggtcccaaactagtatttccttgcatgaaatagaccacatgaccggtgaaaaagttgataggtaaatcaaaaaggtcttaatctctctcgcttggtcaaagaattttatcacatttttgttaaaacgtgcagagtatatgagcttcttcatgtcctagagttcagcagttcacggaaaagaatgtcggtgattgtccgaaatcccgaaaaccggttgttgttgctttcgaaaggcgcagacaggttaatactttttttctttgtggagaagcttaaatcttgaaatggttgcatttgatttcagtgagaatatcttctactgtcgtgtgtttcagtgtaatgtttaaaagacttgcgaaacatggacggcaaaatgagagagagacaaaggaacatatcaagaagtatgcagaggcgggtttaagaacattagtgattacatatagagaaatcgatgaagacgagtacatagtgtgggaagaggagtttctgaatgccaaaactttggttactgaagatagagatgctttaattgatgcagctgctgataagattgagaaagatttgattcttcttggttctactgcagtggaagacaaactgcagaaaggtgtaagtatagcaaaaacaatgtggttactattttgagttttgttactataacatatcattttttgtgtttcttttttcttgttaaataggttccagattgtattgagaagttatctcaggctggagtcaagatttgggttttaaccggcgataagacagaaaccgcgataaatatcgggtaattagcagacttctgttgatcatcttcttttgtgtacaaaaatttaaaggtattaagctgtgttgttgttattgacagatatgcttgtagtctcttaagagaaggcatgaaacagattttggtaactctagattcatctgacattgaagcattggaaaaacaaggagacaaggaggctgttgcaaaggttgtttgtttttcctatggacatagctactaaaatgacttgttatgtttgaaatgatgagaatggttttttttttgttgataggcttcttttcaaagtattaaaaaacagttacgagaaggaatgtcacaaactgctgcagtaaccgataattcagctaaagaaaactcggaaatgtttggtttagtgattgatggaaagtctttaacttatgcattggactcaaagctggagaaagagttcttggaacttgcgattcgatgtaattctgttatatgttgtcggtcttcgccaaaacaaaaggcgctcgtaagattcgtgtcaacacttctcgttctgttttcacattggagtaatctgattaagatatgttttaggttacaagattggtaaagaatgggacaggtagaacaacactggccattggagatggcgcaaatgatgttggaatgcttcaagaagccgatattggagttggtataagtggtgctgaaggaatgcaggtaatatattttcttaggatcttcttctatttactgttaaatggtcattagagtcttgaagttttcttttacaggcggtgatggctagtgattttgcgattgctcagtttcggtttctggaacgtttattacttgttcacggtcattggtgttatagacgaatcacattgatggtaaacaagatttataaaacttaactcattgcaagtgttaaacttgtttctgattgttttcttgtgatattttagatatgttacttcttctacaagaacctcgcattcgggttcacgctgttttggtatgaagcttatgcttctttctctggaaaaccggcgtataacgattggtacatgtcgtgctacaacgtcttcttcacttcacttcctgttatcgcccttggagtcttcgatcaagacgtctctgctcgcctttgtctcaaggtagagattcttctctgtctttcttgatttaaaacaaatcgcttagcgtttcttgattttggtttccgcagtatccgttgctataccaagaaggagtacaaaacgtattattcagctgggaacggatcctaggatggatgttgaatggagtcataagctcaatgatcattttcttcctcactatcaacacaatggcaactcaagcttttaggaaagatggacaagtagttgattactcggtcctcggagtcacaatgtactcttccgtggtctggactgtgaattgccaaatggcgatttcgataaactacttcacttggatccaacattgcttcatatggggaagcattggggtttggtatttgtttcttgtcatctacggttcccttcctccgacgttttccactaccgcgtttcaggtcttcgtcgagacttcagcaccgagtccgatctattggctcgttcttttccttgtggtgttctctgctctcttgccttatttcacttacagggcgtttcagattaagttcagaccaatgtaccacgatattattgttgaacagaggagaacagaacggacagagaccgcgccaaatgcggttcttggtgagcttccggtgcaagttgagtttactttgcatcatcttagggcaaatttgtctagaagagattcttggaattgattcgtaatttacacaacttagcgtcgtttttttttccttcttctgacttttgtatatatatggaggttcaaaaggagatgagagtgtgactgatttaaaaatgtggttagtttgtagatatttgaagtaagttcagcgataaatggatgctataaatttgataatttaatagataaaaaagttcgacattgtgatatttgaaggaaaatcgaagccaagatatggtgtatgatctaacacaagctcaaaggcaatgcaataaatgtttttaatgcaattggtgtatgaatctcgttttcaataatcaatttggttattttgtttcttatgtgctcatgacaactcacaattttagagatactatttcatcatcggtcaacgttttcttaatgaataggtattttaataacatttgagatttacaactacgcaaaacaatatagaattctatattagtactgaatccggataatgtgacgatatggtctaatggtggaagaaaataatgtaagaaagatcgttgatttgattttgatagcgattacaagtctcttttgtggctcataagacttcgtcaagaaaagtgataacgacttctagaagtatagcgagttacaacaatttgatcttatgcaagaatttttgttttggatgctacaaattttaatgttttagcttagatcaaaaaagaatattttctttttttttagcttagagaaatatgtttggtatataaaaaaaaatggtgacattgtagaatttgttcatgtagatcaaggaaaatcgaaaccaaagactttgaagtgtatatttattcgacatctacaatggattaagagttatataaggtgtagttgctttatatcaataagggttattcgcggtaatctagtatttgatgaagaaaagttgtacaaagacctatttcatgagctaaaaatggttttgattagcgtaattatactcaactcaagcacgagtttgtgcatataggcaatacaactgttttataaaccgatatataatatgaatctcgttttcaatatacaagtaatcaatttggttatttgtttctaatactcacaattctagagatattatctccaaggtcaacgttttctaaatatataatatttcaaaaatatttgtaaatttacaaatacgcaaaacaatggttaaattgtaaattggtaatccattataaaagctgtacattttatacaggtttaatagttatctatcataaaaactttataataaacgttacaaaaaaatttattattagttttttgtatatcgtataactatttcgtagagtttgcactattctataaaaagcttaccattccaaataacaggtaaagtttttgtatagttttgtgttactaaatagatccaatatttaattaacataacagaattttataacacttataccggatgataatgtgacgctttggtctaatggtggaagaaaatcgtttgatttgattttgatagcgattacaagtctcttttgtttggctcataagacttcgtctaaaaaagtgataacgacttctagaagtatttttatacgtacatttacgtgcccatgtgagaaatttgcttgtgtacagtatcctatttattgctgtcaattattttatcttgcgttataaaatgcaacaaaaacaaacaatttcgaacgttcgttttcgagaagctaagattaaactacattaaaaaggaaaaatttgattcaacgcagcagccatgattcatgattcatgatttctattggctttgtcagcaattacgtatgcattttcctatattgagtagatttggactaaaattcaactttacacatacacacacatataaaccacataaataaatttatggttaattgatataaaacatgaaaatgttactttaacatggctgttgaagtaattgacgtaagtgatagcgatgatttatgccctatttattatgtaaatataatatcgtactaatatatacgtgtccaaaggttcttgaatggtcgacattttgttgaaactaaaaatatctctacctgtacttttactttcttaattcttaatcaaaggaattgatttaaatatcttgttttcatatacacaaagctatattttaatttacccattttactaatttttgctaaaatacaaaatttgtttgagttaaagaatcatacatatttccgccaattaatcaacgaattccaagtttaataacgtcaagaccatcactaattttcaatagtaaacttttcagttaggcgaactgacaaactgaatgtaccatagcaaaaaaaacagatcgaataaattttttgaaaataatcgaatggatattaaatattagaacaaaaataactggaaccgatttgatagcgaaccaaagtattttaagtagcttaaaatatttgaaatacagttatattcaaaaatattaattacttatagaccaaataataaaaaatatttgaaaatatataaaaataataaaatatttgaaaataatcaaaaaaatatccgaaagtacaccaaataaccaaaaatatcggaaaatattcaaaataaaataactgaatagatacaaaattttaaaaccgaaaggaccaaaaccaaaccaaaaaccgaactaaaaaaatagtaaactctaaaattaaaatctaatgaaccaaactgataatcaaacgcccaaaagtactttttatattttatcaaagaatcttctacaatgattccagatattaaaaatagtaataaacatgaacttattttcgtagatactacatcattgtcaaatgatttgaatacattttaaaaaattactaccaaaacttgtggatcaagtagcatgattcgcttctagaaaatccacgttatgcttcttctctaaatcttttgatacaaatacacaattgagtcacattaataactatcttacactttaattaccaaaattgccatttccatgtgcccccaaccacttcctcctatatatacggctatttatacaacaagacaaaaaaaaaaaaactccattaaagcaaaaaactccaaaacctctctctctttcttcctcacacgcttttttcatttctcaactgtaaaaaatctgatccaatggagaaagacgatgcaacggcgtcgttttcacctagcttcagtacttattccggcgatagactcgtcgaaatcgccgaacgagtctgttacaaagagaaatcagacgccgaattcgagttttcgacggcggcgacttcttcttccggtgacggtggactagttttccctgtatttaacaagaatctaatctccggagatgtttctccggagaaagtaattccgttgaaggatctattcctccgtgaacgtaacgatcaacaaccaccgcaacaaacatactcatcgtcttccgacgaagaagaagaagacgacgagtttgattcgatcccgagcgagatctattgtccatggacaccagcgagatctacggcggatatgtcaccaagtggaggatgtagaaaaagcaaatctacaggatcatcatcaacctctacatggtcaacgaaacgatggcgtttgagagactttctcaagagaagtaaaagtgatggtaaacaatcacttaaattcttgaacccaacaaacagagatgatgatgatgaatcttccaaatcgaagaagaaagtttcagtttcagttacagtttctgcacatgagaagttttatctgaggaataaagcgattaaagaagaagacaagagaaagtcatatttaccgtacaagcaagatcttgttggtcttttttctaatattcatcgttatggcaaaacttttcctccgttttgattcattgatttggatctattcggtgaaaattatgattttaaattcgtatttaataaattatgtaagatgtagatttgtatttttaataattacatcttaaattatgtttttattagtttgtaaacaattttgattattttcgtaatcatatagttttataatttgggtgaaggttttgatgtaaatatattttatttagttgaaaattgacaagttgtgagtgtattttagtgtgtatttgatgttttttcaggaagatcaatggatatagacatgtatgtaaatgaagacaacaagatattaaacttttatggatggacatcattaatttgtaaattgacaactatactttattttgattagatttttttttttaatggaccatttttcgtaaatgcgatcacttataactgtgaataataaacttttgattaaattaatgtttattagaggagggtcagctactcatctatagattcgataccatttcgtagctatagaattacacattgttattgaaaacaatgtgttattgaaaaatctgttaattggaaaagcagaggaatcacttttcaataaaattaaagcgcttctctcttttgggcttaagaccctctttctcttttaaagtattcgcttctaagtggaatagagctttagttatggtgtttctttcctcttagccgcatttttaacctactttcagtttaatcttcaaaagctcagccgtttctcttcatcagctagccgtcaagcgagtttatcatgattaagtgctttttgggtcgtctcataccttatccgttactatgtcagctagcatcgatcgggctttaatggcaatgtccttaaaggaggaggatgagccgtttacgatgccggatttacctgaattctgttctagtgagaagaatgtgttgagtttggtgggtcgtgttctgaacccaaacagtcagaagatgtccaatctcatccagaatcttcccaggaaatggcaaatcagtgagagggtaagaggaattgcgctttctaatgagaaatttcagttcattttctcttacgagcaagatctgttgggaattctagcaaagggtgttcataccttcaatgagtggactctagccatagagcgttgggttgagaaccctccgactgactatctccaattcatagaagtatgggtccaaataaggaatattccggttaaccactacactatcccaacgattactatgttgggagaattcgttggacaagttgttgaagtggccttcgatccggccaagtctcagattacggaatatgttcgtgtgaaggtcaaattcgatgtctccaaacctgtttgtcgctcaaagaacattaatttcaaggagggtatggtgaatatcctttatgactttgaaaggattcaaaaaagatgttatttctgtcagcggcttacacatgagcaagaggcctgtcctctaaaagctaaagacgtcgaagacaaaagattggctgcaaagcagtaaggcaaagggtcggctttacctaaagaaaggattatcaaagagacatatcctctttttggagtaattgatgaaagtcaagttggtattgatccaacaactggaagagaaggaatgagacaatacctgctcgttgcctcaggagaagagagattagttcgggaatccagaatcaagaaatctctaagtgatctcgcaaatgacccgattggtcaaaaaacaatgttgagacttgaaccttaccctttggtttcaactgatattgacaaagggaaaggcattgttttcgggtatggatctccagttcaagcttcccaccttgcgccggtcactcagtctcctctacttctagaagctctctctccatctttggagcaggctgctcctctgtgtaagactttggttctgcttccggacttaagagcctttttggataaaggtacggtttcttcattctctatagggagcacaacggcttttaaggctggtctcaatgaggttggtccttcttccggggctctcttaaagaatggaaaaatcagaaaacgtccatacaaaagtagaaggacaaaaggtttctcagcaactggctccattcaacaagttccttctgtcactgtggctgatggaggaggcaaaagaaaagctactgatgaggctgaagttccatccaaagttgcaaagtgcagcacacatgaggtggtcccaaatgagggaccgtccaattgttaattagcatcatgagttggaattgtcaaggcttgggccgtgcacatgacttgacgattccgaggctcaaggaaatgcgtaaagaacatttcccggaggtcctatttcttatggagacgaagaattgtagcaatgttttggtggacttacaagagtggcttgggtatgatagggtgtttacagtaaatccggttggtttaagtggtggtttggctctcttttggaagaaaggtgtaaatattgatttcaagtactatgataagaaccttttggactttagtgtacagtttggtgaagtagaattttttgtttcttgtgtgtatggagatccttcttatagttcaagaccccttttatgggatagactatcaaggatcggtttgaccagaactgaagcgtggtgtatgctaggagactttaatgccattcttcacaatggggaaaagattggtggtcctcgcaggggagatgcttcttttcggcctttcaaagacatgcggaacaactgtgatatggaagagttgcctagctcaggcaatgccttaacttggggaggcaagagaagtaatttgtggattcaaagcaagctggatcgttgttttggaaacaagaactggctggttaaattccccatctctaaccaatgtttccttgataaaagaggctcgaatcatagaacagttttggtgaggctttctactactaaagatgcctacaggggtaatttcagatttgatagacgctttctgaacaaacctcttgttaaggaagctattcagcaagcttggagtgctaactctacaagaaggatctcaaaggtttctgataagctaagaagttgcagaaaaagtctgagtaagtggaaaagagaaaacaaccttaactctctcacacgaattactcaggctcaagtggatttagaggccgaacaatcttcagatttcccaagatttacagttcttgctgagataagaggagagttatgggaagcatacagagaggaagaaacttactggagaacaagaagcagagatcaatggatgaatgaaggggataaaaactctcagtttttccataattctgttaagggtagaagagggaagcagagaattgattatcttttggatgtgaatgaaaacaaacaaaaaggagaggcgtctaaaggagctgtggctgaagcttactttagagatttttttacttcatctaatccaggtaacttccaggaaatcttccatgacttccaaccacgaatctcgtcttcgatgaatgaaagtcttaccaaggaggtaacttctgaggaaataaaagaggcggttttcagtattagaccttcaagtgttccaggagctgatagttttactggtcttttcttccaaaaatattgggttgtgattggtgagcatgttacaaaggaggtcaaagactttttcatctctggttcctttccggttgaatggaattacactcagttgtgtctgcttcagaagaaggttaatcctgagaagatggctgatcttagaccaatcagtctttgctctgtcctctacaagatcatttccaaagtcttagtcaaaagactacagcctttgctgggagagatagtttcacctaatcaatcagcctttgttgaagaaagattaatatcagataatattctgatagctcatgagctgattcacggtctgcgcactcacccaaaaagcttttgacagggtggaatggtcttaccttcaagcgttgctttctgctttggattttgctcctcaatggatatcctggattatgttctgtgttacatcggttactttctcggttctcatcaatgatcaagcttttggaatgattaaaccaagtagaggtctgaggcaaggagaccccctatcaccttttctctttgttctatgttctgaaggtctcactcacctaatgaatatagcagaaagcaatggtctgataaatgggatccaattctctgaagaaggtccagcagtacatcatcttctttttgctgatgacagtcttttcctttgcaaagcagaagaggatcagattaacacgctacaacagatcctaaaggagtatggggatgctacgggtcagagagtcaacttggataagtcttctttaacttttggctccaaagttaattctgttctgcagcttcttatcaaaacaaagatgggaatcatgaatgaaggcggagcaagtacctatctaggtctcccggaatgttttagtggctcgaaaatccagcttcttgactatattaaggacaagttgaaggctagattgtctggttggtttgcaaggtctttgtccatgggtggtaaagaagttctacttaaagcagtggcattggctatgccagtttacgctatgtcctgctttaagttaactaaaacgacttaataagcgcaatgagtgatttctggtggagtgctttaaaacacaaatggaaaatgcattgggtgagctgggagagattgtgtttatcaaaggctgaaggtgggttagggttcagagatattgaagtcttcaatcaagctttacttgctaaacatgcctgacgtattcttcagaatccggattgcctttttgctcgcttaatgaagagcagatactttcagtgggatgacttcctgaatgctaacatcacctcaagaccctcttatgcatggagaagcattttacatggtagagagttgttgtgcaaagggctgaggaaaatggttggaaattggaaatctctgaatgtttggattgactcttggatttacgataatgggttaagagctcctcttatcaagaacccgatcattaatattgatttaatggtagaggacttcatcgatgtggaggctagaggatgggatagagacatattggaggagcttttctatcccaatgatgttcagcttattctctcaaaaaagcatgtggtctccaaagatgatttccattgttgggagcatactaaaagtggagattactcagtcaaatcgggttattggtttgctagcagatctcccaataaccaggtttttcttgatgcaattgtccagccatctttaaatgccttgaaagagcaagtctggttggtccaatccgctccaaaaatcaagattttcctctggagagatctcagctcggctcttcctgtggcaaacttgctgttaactagaggcatgaagattgattcgaggtgtcaaatgtatggacaagaaggtgaatccataaatcatgttttgttcacttgtcttgtagcgagacaggtttgggctatctctctgtttcccttccctgaaggcggttttagtgaggagtctgtttacagaaattttcaatctttctttgatataaagaagaatggaaagttaccgctaagaaacagaagatgtttcccttggattctctggagactctggaaaaatagaaacaagttctttttcgaaagggcaagttattgtccagccgagactgttgttaaaataaatgaagatatggatgagtggttcgctctcagctcatccctacttcggttgatgtggaagactcgatctctaggttaaaggtaaagaaagaatgggaacctcctcctactgattgggtcaaatgcaacattggtcttaggtggtctaataagcatggtttcgctggagcttcatgggttgtgagaaatgcgtcgggagtcgttttacagcacagtaggagagctttccttgatgtgaaggataaaaaagaagcaactcttaattgccttacttgggctattgacaacatgcactctcttcatttaggcaaaattgtttttgctttggaagctcaggatattgttggagcttttcgaagacccaaggcttggccttcctttactcatcagataacaaaaattaactattttttggagaagatagtggactggaaattagtgttagaaactgtggaaaccaatagaggagcctcgttaattgctcaatcggttgtctcagactttagactcaactcttatgttgcgtctggacatccattctggctcaatggcctttttgttgaagagagatcctcctcttgatcctggattctccttttgtccgctgtccactttctttgactatatttttttggtagattaggattattctcttctaaatcctaatcttctcatcttggttttatcaagattgaaatatgatgtatgtgtaacattttaaccatcaatataattattcagacgacaaaaaaagaaaaatttgttaattaactctatttttctagccaatcaaaattatctaataaaaaaataaacgcatttaattgtaaaatcaaatcgtaatcactcttttataaaaccgaaacaatcatttaaatacatttaattataaagcataaaccctattttataaaccaaaactgatacataaactcgtttaattttattttttatatctttggatcgataaacctcgatctatacccaatccctgttatgcgggataacatgatttagtgaaatcaaacttcggtaaaaaaggcggaatcaaatggacttaaccactttaattataaaatctatgtataattttatagtttcatctcgccatttttctagttcaccttttcaaatttttttttgtattttatttaccgaatgcaaactaaagatcaatattttattttattttctgaattcccagtcaattctgagtcatattcatagcaacttggagctttatactaggaaagcgtctagattttttaccttattatcaccggttgaaagaaatcaaacgaaattaaagaactatatacaaacacttattttgtttcttggttaccacacaaaagggaagaagaaaaaaacatacataatgcaagtttatcatacaatataaagagatcatacttgagaacattttttcatccggcaacttgattaaccagagaccgcgaaggaacgtttagtcttgtacctgaaagtgaggcacattatttcattcacatctttagagtcgtcaaaaatatttaattgaaccttgaatgtcacctgtaaatataaaaaatgagcaaaaaataataaatcgttagagccaacaaaatggtgttaatgaaagaatattttttcaataaaaatatctaactaatctttttcttagtttgttgatttgttctattatgtggttcgatggttgagcaatatgactaatcttagggtagaacaagctatttaataagaagtttctcgcaaattcaccatcagataaatcattaaactactaaattgagtagctcgaatgatttatttgcacctagttgaaattcaatctccaatcttgtagttgtaacatgctttccaactgcgccgcctcaggctaggagcttgatcttcaaaattatattcaatggaagtggaataaacctaactaactgttgaaatttgatgatagaaagcacaattggttgacccaaaacaaaaagaacacaagtgatagatacatttgatgttgtgttttttccttgtggaacacatcattcctagttttttttttatgaccgagagatctcgaaccgaaccccaaaccaattttggagcaagtggaacatcgaatattcttgtcattttctgtggaaagattcgaactctagtcctctaaccctatgatgggtcttttaacaattggaccaatagttctcatcattttattttcctttaaaaataattttatcttatttatatttattatacgtgcaacaaaaattcatatgcagtacctaatcttttatcacgcaatattaacaattacgagaaaataaatgtaagaaaattaaccattggatatgaacgaaaaagattgtctaggggaagcacgaaggcaccaggtgcaacagggcatgccatacatgcacataagtcgtagttgctagtagagtaacgaatcaggcctctttaacatccacgtaaatatctcctccagtgatatttttacctgttcacagttaaaactttatgcaaaacaaaacaaactaaactacaagtgaaaaacttgaagaaaaataaagaaaatttgcgaagggagtcgatgaagtacttgttgaaccggatattttaaagcttgccttgtccttatccttaagtatctcctccacactagtgacttcaacaggagaacttacatcacctaaaccagccgcaaaaatataaggccgcctcaagacttaaaagtgaaagagtacaagtttcattacaagtaaacacagaactaataccattttatatgattattcaaaggcaaagatacataaacatgagagattatgatagatcaagaattcagtttttggctttattcctagagtcaaccctagctagggatcggttctagagaatctgacttcgaatccaaaccaataattgtcctggtcgatccttaacatttgatgcatctaccgatattctgtttatattgttcctagtcctcgatcactaaattacataaaccgattttcaacactagcaatccaataaccaaattttatggcaaacttaatttccaaaaaccaagtaaacaaaaaaatgagattgttggaaagttatatgaacctttcaactcctaatattactttgatctcaaaaaccgactcacgaacaaagtaacaagacaaagaacagggttagtagcaaaccgcagtcagaataatcgatggcccgcaaagtaggtaataagaagagtgataggatgaggagaagaaaaagatgaacgtgagagatcgccatgattagcactcaaaaattttcaaaataggaaaatattttcttgttttgtttgagagacaagtcttttcgtgttcaaatcatagattaatacttaaggttctcaaacttctctgtctctctacccaaatgttcttcctgatattatatatctactacattagtggattggttcaaacttgaaactactgtccttaattatttttattcccacgttattgtgaaaactttaaaatatgcctaaaccttaaaaaatgcctaaattttaaattatcatcgactaacggacaaaataagggaaatatttttttgtataatttgcctcaagtgtcgttggttcattggctaatcgagaaaatagaagtttgggtaggtggcttagatagttacatattctgtgtgattagtcgattagattagtcttatattaaattttgaaacttctttaaattgattagtaaactgtagattatttttcgatgaaattaaattaattataaaaattgtcgataaatagatgccactccaaaacattttacaattgttacagttaagtgaaaaaggcacagaggtgaagaatggaaaagacacgtctttctggtacgacaattggtcacacatgaggaagctaattgacatcacatgtcaaagaggttgcattgatatgagaataacgatttattccacactggaagatgtgatagcaagtcataggcagagaaggcacagactcgatagtctcaacaatatagaggcgttgattgccgagattcgataaaaaggtctcatacaagagaaagatgtggtgttatggaaaggaaaaggtgatctttacaaaaacagtttcagcacaaatgagacgtgggaagcaattcgagaaggcatacgtcactagtggattggtgtaaaggtatttggtttcttcatgccacacctaaacactctttcatagcatggcttgcattaaagaaccgcctagcaaccagcgacagaatgttgaattggcaatgggagcaaagccggcttgtgttctatgcgacaacttactagaggacagagagtcagagaccatctgtttttcaagtgtagttatgctgaagagatattgtctggactaagccgaaaaattctaggacagaaatttactactacatggagtagcgttcaaacaatcctcacggataagtcatcggggagacttgatattcctaaccaaatatgtctttcaatttgcggtctattccatatggagagagcgaaatggtaggaggcatggagaaccacctctaccaccatcacagctacttcgaattgtggacaaacaaatccagaacaggatatccgccattcgtgaacaaggaggctgaaggtatgatggatgcatggaagcttggtttgcatcaagataaacattaagagggagtaggattttcaaaaaattgtatacaattattttaaccatatgttgcacttgatataaaaacgttttttcgaataaattttacatcttattcatattttgaaaaaggtacatagatgataataaccgaccttccaaaatattttctaggattatttaaaataaatgtaagtacaaaataaaatgataaagataccctaatctagagcaaaatatattaaatgaagagttgtgattagaggtaattttccaaaaagtaatgttacaaaagtgatcataaagagatgaaaactatatttttcaagaaaatcaacataaattaataataatatatatatcaactatgttatatgtaagaaacttcaatgaaaaataattctaatatttttttcttcttcttaaattcgtattagttcttgtttgaaattaattcaatatttttactgtatcaaaaaagtttgtgttgttttctttacatgataattgatttttacttggaatttgtttctagaaaaatattttatataatgaaaaaaatcttatactttcatataaattaaaaaggttaagaaattagagaaatctctctataaatttataaataataatttatcgataaattaataattttacggtctcaacattattaatttatagagatcccaaaattaatacctttataaatttataaatttttgtttaacaaaaaaatagcgacgcaaacatttaaagatggttaatagattggagtctaaaataaattattattttgaaaaaaaataattaaactaatcatatggaatcgaaatgtttacaacactcataattgttgttgatttcgttggatatgccttttgtcgattgaatccactttgcaactcaaaagtcaatttctttgtctacttatataacatcatcttattgatggaaaaattaggtggaaaattcaccaaaaaatattctattattgcaaacgacaaattgtttatttagatttaaaataagaaatcctaaccattttttaagtttcgtaaaacacttgtgagttttgggttcagaatctcgttgcttggacaaaacaaaatcaccagttcaccaatcgtttaataaaacataaatgaatgagaaatagagtgttatacactgtttattatcacaacaattggcattatttttatcacacgaccaatctcaaatgatcaagaattaatccacttcatttacttaccttgaagtcgaagtgtgaatgcttgtaacgagagaaggacttgtttcaacctctccttagtcacttcatcgacaaggtttccttctgcatcaaatttctgaggtggctgaaatgcattgagagtaaactcgggtttgttgatgaaatgaagatcaaggaagactccgatttgtcgaagatggtactgcgatcttcctccaccaaaacctccaccggtgcttataatagcagctggtttgtccgcccaaacattaggtggtcttgaagcccagtcaagagcattcttaagtggagctggtacaataacatgtaaggtcaaccaacaacacattcttgttttccaacattaagcaaaagtatacaaaacttgccgcaaaaccaaatttcaaaagccaacaaacagtcaaaaagcataaaatccaagcaacagaacatgtgagagtgtttcagtttgagccttaagctggtccggtcccatgagtcatactaaataaccctaatcaatggtgtccataaaatcgataagaaatttgaattaacataagaactgtcacagctctccacaaaatcaatggttataatcagcttggttttgataatgatcatcaaatccaactaatgatacttgataaaccaaaatcataatcctcagacatcttaagacatatgttcttgtagcaaatcaagaaacctcttaagaccaaacaataaaagtgaaactcactaaagaactttgcaataagaagaatctttattacacaaacctgaaacagagaagttatactcaggagaagcaaacaagatactatcagcttcaagaatcttctgtcggaaagcttcaacaactggaggataagtaccgttgacttcaagatccgtgttaattaacggtaacggtgatatatctatatactcaatttgcaatcccggaaccgattctttcgtcaaatcaatcgctgccaacaaaaaaactttatcaaaacggaacttcgaaaattgacgagaattgagcaagaaggaattataccagcgcggaggagaccagtatggaaggaggttttccggagagaaccagagagagcagcgactctgataagtggcttaatcgccgttactgcttccatttttatggattagagagagtttgagaaaatgttgaccgatgaagaaaggatgagagattaggtgaaggaatacataaaaagacagagagtccactaattttggctttggagttaattaaacttattatatcctcaaaaaagtctttaactaataatgattagtgacatcactcgcaagcattattattaaactatacaagagagcttcgaagggtctttagatgcaaaccatgcttggaggcttggttcgtatcttatgtcttcctccttcctaatgaccgagagtttgtttctcatttgtttatctatccatttggcaagatgtgtagcaggagtcggaatctcgccgtgtttccttccattgcgctcccgccaaatcgaatgatccgttacatgaaagctgtatcggaggaagaaggtatggatttcattccctagcttccttgcccatgatctctcacatgttgtggagtttataacaacaaaagatgtaaaagtatataattgacaacatgtacactattttgataacacaccatacttgatgatgcttcttatcgtagagttttaacgccatttgattattaccaccttcttctactcatgatttttatcttacacttacgtgatgatgtacacagaaaagtttgaaacgtatagaaatagataagctgaataaaaggcaaagagcaatatgcataatgaaaatcatcgaatctaagaaacgttaattcatattttgataacacaccatacttgatgatgcttcataagtagagttttaacaccattgattattaccaccttcttctaactcatgatttttgtcttacgtacacttacgggatgatgtacacagaaaagtttgaaacgtataaaaatatataagctgaataaaaggcaaacaccaatatgtaacaacactcaattcttaaatgaaaatcatcgaatctaagaaacgttaattcatatgtgtaatgaagcaataagactagagcaagtaatctcccttgcttggttcaagagaggcttaaacatatcaagagttctattcttaaggtttatcaccttgggttgtgatgtttcaaagagagacttccacaaacaaagtatgttagactttatcacttctctcgcgaatccattcgcttctgaaacatctttggcagacctcaacgtctcctctagcttcttcagctcttggttacagtgttcaaaatcagacgttttcactacctcacaagaagagctttctctctttccgagaatcaatacaatgcgatccaattctctgattccaaaaacaaaactcttgcaagactttacgaaaacttcccattggttcgatttgacatcagccagatagacaccattcttaggtttgatatatgtttctaacacatatagcataacacaatgcaaccttcctaccacgggatcggtgaaatatgtgcactctgcattcgtcaatacccaaagacagaacagtaacatagaacgtaggttgtcagataataagaccattgtttcagccacaaagagcgagagctcaactcccaatcgtatagcctcatctttctgcatctccttctcaatggtactgatgatattctctttactgtacggagaatatctagactgttgtaatttcttgttgtgacagtgacgcacaacacggtgattcattgacatagattccatcttttccgagatgatcgagatgtctgaagaattcatcgaggagggatccagatacagtgagtgatgagagaagaaccctagatcgtaactttaatcttcaatacgaaacccttgaatgatatcaaatctaaattccttgaaagagaagtaacgatgcaatcgttgtagtgttctctgaaaacctagccaatcaaatctaattttctttgacaaataatagagagtatatagcgtctatatatataattaattagaggacaagaaaaggaaataagttttttacattcataaaaaaaaaggaaattgtttttttttgccggcaagaaaaggaaataattttgttttaaattagagaaaaatactagtttcttaaatccatttactattcgatttgggttttaattaataattaatctaatcgtctttgacaagtatataataacaagaaaaatgcttatgaaacgaaaatgaaatatttatgaggaaattttgtagctgacgatagaaaagcctcctagatcgatgtcttattatctcaagccagtagctgataatgccattagctacgccgtccaaaatccaaatcatcaatgtccgttttagcgctgaagcgaataaagtatgtcaataccttatacgaggcaaacaacctaattctttgtcatattttcgtatgaactatgaatcttttttattttgtgtaattcttaaaaacaaaatagagttccgatttttcaggtaatgaagtttaagacccattcgaaatttataaatttataaatttttttaagttcgagtcagttaagatatttacattcaaaactggttcccgttctaggtaaagtagtcaaactatccgaaaaaattgtaattgcagcaaaacttggtaaaaaatgtatttataattgcatctttgggtatgtgagctattacatgtcaacatattctgtttttaatttcaaactttatactcccactcttcgtattagttgtagtttaaattatttacaaacatactaaaaaattataaaaatctcatttaatctatctttttatataaaaacatcatttattataaccaatttaaccaataaaaaatatataattaagtatagtaggttagaaaaatttaaatacatttattatttgcataaaaagctaaaaacaacatttatcttgagaaaaaataaaaatccttaaactacatttatataaaaagagagagagtatatttatttaccgtatcttgtttttctttttatcatttattacttctttttatataaatgtagtttaacgatttttctttttatcgtgcgattgacgccaaaaagctttcgtagaagtgctccatggaagctacgggtggaaactttttcccactgtcaaaataaggttccgacgaaggtatctccttagaggagtaaggttgttggattcgccaaagagtatcacaagtccaaaacgcagcaaatgcagcaggactcgattggagatttcttccattcaaatcaaggcataagtcgttcagtttaaggagggttgagagaagaattgatcgaacataccgacgcgtttttatccaaaaggttcgagagggttgggatgcttcgcccattagtcttgggaagccatggttaggctttctagaggaaatatcaaatctcaaagtataaccaaataaaagagcagatgctttcatcgcatcacaacatttaaggtttgagaactatactaatcccctaagagcacctctatgggtgtaacttagatgtatcttacagacttacactaatatcttagaattaaattttaaaagtaaatcaaaacagattaaaaactaagatttgcttcatatctaagaagtttttatgaattaaaaactaagatttgcttcttacatgtcatgtttcaaaattttaatttaaacaattgtgaagatgcaaggttaagaaccaattggttcttaaccattggggatggtctaagtttccaaattagatatgcatctagtgataaacaatcataaggtttcgataattgaataagcaaatcccctctagatgcattgttcctaaagctgaatggagtcgacgaccatcctttgtcgagaaacaaagcaaagagagactatgcaaattgatagggaaatcagacctggatatgggccacatgggagatattgggctttaatgaaagatgaggctcatccaatcaaaccctagggttgatgttgtcgggataaggaaagcgcctccgtcattctgaagaattggaatgatgggcgactgtgaatcatatagggtgaccattgccagcgtttgagctcgtcgtgtgccgtcgacgttcccagcggaagaagcacatctgatggtccaagagatactcctgccatcaacgaaaaccggtgagaagaaaccaaaggtggtgttggtgctagtccagatctagagctttttgataagttgatgaagtcttgctctgatgtttgagaagaggagctgttggactgttgtgaattttcttgttttgggttcgaagacagagatgcatccaagatctgagtcagatcggagccaatagagcatcgatatactcttccgtcacaaagaaaactttcagtgaagaagctcacataaaaaaggagatttagatattttgagagatttgagataacggaggaagattcaatgaagataaagcttatatagaacacatgaaggttgatgggagttgataagtcccgacgccggcaatcggaaccacccccggcgtcagagagcatggttgtcgagagtgtctcgatttcggtgcctaggagctttttaagtcaccaagactagaaaaaaaaattcacatgttatttttgtacaaatactaaaatgtaatactagttgaactttacatatatgtttatgaaggcaaatcttaacaaactcaaagatttgtatatattaaaaaagtttatgaatatttcttgtattcgataaattataagaagaaataatataatttaaatcgattaaagaatcaataccaacagttagatttatttagtctatattcatttaaaattgattagattggaagtatttttattgtatataaaatcatgtatttatagccttaaacatctccattaagccacaatatgattcttctttttcacgagctcattgattttacttatatagtatattgatgatttctagtaactagcagctgagaagtagcatttgatcgcatagattaatttgaacttgtaattcgcttgttttttttttcttaattcttatttgcatttctgatttgattgtgtttttcaatttgcggtatatttttattaaacgtaacgagattgtgttgtgttttgattgaatttcttataatttgtatttttagatttgataaaaccatatgttagaccatttatattattagtccaatactaaaaacgcttttcaagattacattatagaaaatgaaaatatgtgacattataatagaataaaacattacaaaattaccaacattcggccccaaaaaaaagtaaaccttccggtatgattacataaagccatcttatacttcatcaaatcgttatatcgaaacattcaacaattgttgatgaattttccaaagttagcacaagattataccacaaaatctttccccaaatctctccttgttgtcctcgcctttccagtgcaatttttatacaccaaagctctgttcctccatttttatcaaggttgagcaaaattacgagctttccgccatgatttgccattctagacccaagagttccatccatttttggtatatcttcaatacctttcacgaaactccacaccctaacacttggatcatagacacgtactcgataaatacgttttacactgtcaaaaccaaaagtatacaacatgttgtcaataacgcacgaaccaactacccaatctctatccaataagaagtccctctcccatacacctttcttaggatcgaaaacaatgccatttccacgatccattatgtaaatcttcttgttcatcacaacactcttgagcgttatcttggacaactcttcattacacaatcctgaaaaagactcccaagtttgcttctcgaggtcaaaaacctcaacccaattatccaacgaatctgccttattataccctccaattacataaatcttcccatctacgataccaaacgccgcacagccacgtggcacacgcatactaggaagaaattgaaatgttccatgtaggcaatcgataacaaacacattagaagtcatatcgccattgatacatccaccaaaaacatagatcttgtggcctaattgcaataacagaagatccccaacaaggcaaagacgggcatgaaggcaatggaaccaatttatggatacaagagttagatttatttttgtaaggtttttgattgagagtataccaaatagggtcttcttcatggctgaatctcaaggcaacatagagaacgttttcggtccgttgaaagagtgaacgtacaatgttcagctcgatcgaagtgattaaacgattgaaagtctttgagacaagagatagggaaggataatcgcatcttggaatatatgcaaaacagttcacaataatttcatctggaagcggaagagatgttggagatggaattgatcttgcaacagttggtttcttgacctttggtgtaggatttgcagcgttgacactaactacaaaagtcatattcaatatgagtatgagctatgaaaggaaggatgatagaaggaagttatagaatagcttaattacttttgagaaatatgttaaaaacacgatttgattatgtataactattaaatataaattttatacaatttataaaaggttgaacatttatgcagtgtttgtgtttcagccaaagatttctagtcccagattcatttatcattaattatatatattcaacaactattaatagttactgtgtttggatattttttaagaattcaacaaatcatgtattgctcattcttattaagcaatatcataaatgttggatttgattttatgcctacaaataagaatacaatacgtggtattttcatgtggaacacgctccaatcatctagaacaagattcgttttctaagcgctttcttatgggccgggtgttctcacaaaataaaattgctcatgaggaaataagaaggaatcactcaaaacatctacacaatagatgctgggccggttctttgggtgttctagtggagcatatgtacatggtccaaaaatattttgcaacattttagggccttttatctttattctagctttaaaaatatgttttagtacatgatccattattttaatcagtcgggcctcaatagatgcatatgatatttaccattgcaatagtctcaccttaaacaaattttactagttaggcattcaataattgacagttgcttcgatgatgacaacatactctttcttgtgaaaagaagatgtctcattatacaaaaaacatatcaactactacaaactagtccacttgctagatttatagtgcatttcatgccattcaagttcctattactagggtaacccatcccaacttcaattagttaaggtcaatacacgataaaaactttacagttcttgaggaaacaaataaatccaaaattacaatatacagttaagcattgatggagaaatagcgataacatcctagaaccttttgatagctaggtcccctctttgaaacattcctccttacatttttattattttaaactgccttattgttgtgtaaattgttcccatgttacaagatgattaggacatagccaccaaaatgcacatttatcagttttggatttacaatcaattcgggggtttcaatttcatgtttaattataggacattatgaatcaatgagtttaatgagtgcaattacaatttcattttttatatattcatgtagtctcatttgtgagaaatcacaagagacaaatgagaaagttatttagagaataaagtatcgttcaacaaaaatgttctttctctgtttaatatatatgtgacacatctgttgtaatgtaacaacagtgtggtataacacctctgttctatcatctttgtttctaacaaattgttcaaagctcatacaactattgagacaaggcacacgagttcaattctatcttaggtgataagtcactcctctacttagtgtaaaccaatcaccaaagccctaaagacgactattttcaagtaacatttagtccatactattaagctatttaagcaatttttaaaaatttaatctttgtgatcaaacatttgttctcgtctattaaaaacaaacttattttctttttcttaacaaaatctttcatctcatctctgtttatcgctttgtttataaacataaatgaaattctttttcttagttggacattaattcggttagggtagattatattgaattgattgaaatgatgagtttatggtcatatatgagtcattcaatatccagatcttagacttatcacgtctaaaagatgttcgtaaatgtttttaaatcaaacttatttgaaattttcaatgcagttaaatcaattgaatttttgtttatccaactactagtcgcgtttttaagttacaacacattcatgttttctaaaaaattcgcaacaatatttcttctaaaaggtcaaagtcatttccaacatgtatatcaacaaattgatacacggatttcggttttatttcaaatttgtgtaatatacaactaaatttaaaagaaatcatttagaaagaaatattgaaaggataaatgtatatgatgtacttccaaaaatatataatgtatatgatgtgttagttaccaacaaaaatttgtgaaaaatgtaaaacatattcatgcaatagatgacatattatgttgtataccactttcatcttaaatattttacgtttcttttttccaaaaataatgtatgtttacattttgagtgcaaaagttttgcaaagaaatttagttctatatgtcattttcaatttgatgttctaattagtgtttctttttgttaaactcatagttttggtgtcgaaattcccggcaaagattactactgttttgaaaaccagatttttaaaagagaaaacatgtggtttaatttcaactcaattattgctgctatcttactttgcgtgtcccttctgatgaaatttactacgtacccagtgtggttaataataaatagacgtgtcaacgacccgtacgcatatgtatgtccctatgtgtaaattaactacgacgcaacaatatgtgaaagaaataaaaataaatcccaaaaaaatacacgaatcttatatacatgtttgagtaattaatgaccaatttatagtgtaaattaaatgaaaacctacgcggaagatatcaacacaacgtggtcagagatcacacaactttattgttagctgaaatgtgagagtacaaatttattacaaataggaataataataatagatcccataatagtatctattttattttatttttggaacattcaacatttcttttggcgtctcaactaactctcttgtttttaatttgaagtttttaacagcttaacaccacatgcatgaggctcttcgtgacaatatatagcaaaaaaaataaaatattttcgttgtctttttgatgattaagtattcttctggataagagttataagtgaaccttttccactttaagtactctgatgaatcagtggttgataaaaaatgtgttctagtccatgatccgaagagactatgaaatagaggcagctgtaacttctcgataatcataagagaaatttttaacttattcataattttatatcataacaagagatgaacgtcgataagcgtgattaaacttctctttctttgatattcaaatttaagtaaaaaatcgatatatacctaattattatttttaaaatcttctatgagtctatcttatgaaacttatatactcatactacttttaattcgcattattcacctgtaaagaaaaaaatcgtttaaactttatccaaaaaatatataaatgaggtaattagtaaaactcattcagtatccgcggtaactaacttatttttcacattcggtaaaacttaatgctctttaaatagtataaagaagtacgtactcctagattgtaatagtggtagtattgatatcgatattagtatccataattaattgttattttatctcaaaaattcaaagacaaattcaaaacatcaactaaaggcagtactcaacatcaccagaagcaaaattcatcattacgagtgaactaagctcaaaatcgtcgtcatgaacccataaagcgttattgccataatagtgacttggatcattagtagttgccattaggacatctttttgagccagttcttgttttggtttatcctcgtacgaagctgatacgacgccgttaaagctcttggctatattctcgtagatattttcttgttgatgatgacaagaagaaggtgtggcggcagtgatgaacaatgacggtggagagtcgtcgtcttctccggtggttttgacggcggaggagtaatctccgacgagttttttgctgagatgagtgttccagtagttcttgacttggttatctgttcttcccggtactcttttagctatcaaagaccatctgaatttggggaaaaaatattataggacatttttattaaattcataccatataacataaattataacataccatatgtttatgattctttttattatttcgacatctgtatgtgattcataaatgaatgcatatttatatacatagagaggattttttatttttatttttcaattgtggaaaacgtttctaactctataatgaattttgagaagtgactgtttgcacgactaatacacttatgaaaaagtgtctattattcattaaatatatccacttgaaatgttcgaacatttttaagttcaaaagatactcttaaagatttgtttttggaggaaacaccttttaaaattgaaataacccaccaacacatcggttgagtttcattgaagagaagacaaacttttatcttgtgcaactcttttcttcttcagaaaaatatatcaacttgaaaattttgaacatattttaagttcaaaggattatttttaagatttattttgtgaagaaaacaccttttgaaatgtgaaataatccacgaacacatagtttaattgaaataaaacagtctttacttgtcaactctctttatttttacatttgcaagtaagaaaatccttcaattagatttttaaaaatcaacttaaccggccaaatctttgtttaaaacaacaattcaaatatttgacgaaagaaaaaatcagttaacgatcgattaaataaaaagacatggtgtataatattgtagtaacataaagttatgtacctattgccgaggagcttgtggagacgaataatgaggtcttcttcttgttcagtgaaattgcctttgttcacattagggctcaaataattcatccatctcagtctacaacttttcccacatctctttagccctatcaacgaatcaaatttagtctaactgagatatatttatatatgaactagctagagactaaagttaatatatataatcacaaaacgcgcgagagagagaaagagtaccagtttttctgacgatgcggttccattggccagtgccatgattaagaacatagtccataaggatgttgtcttcttcaactgtccataaacctttcttgtattcttgattctctttttcatctcttctccttattctcattctttttttattctctgattccttctatgtttgtgtgtgtctgtgtgtgtgtgtgagagagagaaagagattatgagtagtgaacttatgatgggttttcgtgacacgtgcttatatatacactcacatcaatacgtatctttgtgtaatcatggctataagcataaatatgtacctaataatgtatagatagcgactatagcgttatcctttgttaccctacgttacgtattaaaagctaaaatttggcagttggtttaattgtatctatggccaaaaaatttataaaaaaattgttttttctcctctggcaatatctaaatactatacttgcgacatgaaatttacaaaaacaaatctactaaatatggggcagattactgcgaaatgttctatattgtatgatttaactgatttgtaatttatttgacacgttaaccagtttgtttatgcactgtatacacttacattctactaatatttgataatgatctttttcattggaactacatattatttttagttatttatacaacaaagtgggatcggaacaacctatttaaaagtaccacagagttcaccctaaaacagtttttttgcagaagataaaacatgaaaaaagaaactttgatggatcaatgaaatggttctcctttccatatgtcttgtttctcaaattatagtcaacttttcgacatactttttaaaagttcatgaggttaccctctttaattgagttttaaaaatagaccacaaaatttatgtgttcatttacatatcatatcgatttaatttcttaaatctaatcagatagtttagcctgtatactgattagttagtcaaaatgagaattttcaagtcacaagttcgaacattatagtagataagagaccaaattaatctcctctaattttcggggtagaaaaattatggacctaaattatatatatgtgtgtgcatactgttaatatacaaagacatatatatatatatatatatattttgatgaaaggtttaatttatttactcaagaaagcgtctacgtacaaagtatgagtatatgttgaataccatataacctagttccaactaacaagttaagtggtagagaataaaatagtgaaactgaatatgtaaggaatatgtctcacaactatttaactaaataattggaggaatagaagctctgctcttcacttgtctccctacttaccagttaccaccttcctactctcttctactttggttttcgagctagcttatacatatacccttataaatatgcatactatttacttgcacaaaaacagaaaaatatagtttccactagctaaatagtatttcggttataaaaaaactactttaatttttgactaactcgagaaagtacaaacaattatttctaagaaatgtaaattatgtatatgaagtagctactatcattattctttttacttataagtactgtagttttttactcaatgtttttgttattaggttttttagtattaagttgttaatattggggctacataaagccaaacaaacatatatgattggcatagtcaagttctcaacaagctatcctctaacgaagcatttgggtaacgacatgtcgtcgtatatatatctagatacacgtacatattaaattagaaatttactccaaaagcagaggattctcgtaatcattaccaagtcggctcgaaagtagtttatatacattactatgaatacatttccaaatgaagatgcccgtgatttatgaccccacaaattcaaagacaaagacaaaaaaaatatataccctattaaaccggtttggtttagatacagtcccaaccatagaagatacaatcttactacatatactttacgttgcaaatttataaataccaacccatgtcagtgtcttgttggtgttgcttaaaaagaatgacacaaatattaaattccacgtagggaccttcgctgatcattacatattcggttcgttttcacttatcacgtgggtaatatttgatgttatgaaagtgttcaaaaactacgtaaattatagtttttgcacccaaaaaataaaatacaaatggttgagtttgtatacagggaaacatgcagacataacctcaaactttttttttttttgcaaagctacctttcacctgcaacacaaccatccaagtcataacttagctcgagtaaatgatctctcaacgagagcatgcgttcacaacttaataaaaaaactcaataatttatcaaaactacagtacgttgttttaaatattttaaaaaactaacataatgtgaaatagggaccgtaaaatgacttaacaattgaacaaataacctaaaccgtgtaagactatattataaagattcgaacacatgacatgaactcaagacataaccatataatacacgtacatcttttgataaatcatgaagaataatatcaaaaagaaattcttggtaatgagtcgaaaatcaaaccattaaattttcaaactcgaatgtttgtagatgtaaaattttaggaagtttcatgtataaaaagtaaccatgttcggaactgaataaaagctataaaaggactttgttaacttcggaatccgtaagttcagaattgtctcgactaaaataaaggtccaaaatcagtactaatgtactatgtaatatgtatcattgctaagccgcacaatcatgaaattttattttggtactacaaagccgcaaaatcagtactatgcatcattgcaaaatcagtactatgcatccgagagagtgttgaaaaaaaaatttggtactacaaagccgcaaaatcagtactatgcatcattgctaagatgaggtaactgtccattaagccgacgaaattcggttttcatttttctcattttgattttttctaggtgtcagactcgtcactcccaatgtctgaaccgaaattaaaaaccaatccaaaccataagaccgtttgaagacattgcaattttggttatttccggttacctttcgcatgtatgcaaatataaacagattttatgtacacaattggacgatctattttccgaacaattgatatacaaaaatataacccaccggactttttttctacacgttatgtatatttacttctttcaacgacgtttctaagactcgtccggctttggttcgagagttacagagattttctccttgtgatcgcctcttagaacctctacggtcacctaatcaacatcatcagtgtcaaaactatctcggatgcagaaactaattgacaaaaactgcggagtttacctcatcgccgactttgcattgatcgagaatccggtacagatcactcccgttagagacttttgtaccgttcaccgacgtgattatgtctcctagtactagtctcccgtaaccatcacgttttgttgactgaagtccctgtggaacaaaaccaattttacacatttcaatattaaaaccgcggagtgaaacatagagaaaatatctgttatatggaaacttggaaacaggaagagcttacggctttgccggctggaccacttggaggagcatccaagacgagcacaccgctcactcccaattgctcaacagattggtccggtgcgaatttgatacctaagattggtctggtgactttaccaaatctcaccagctgatcaacgataccaccaacctgaacatgagagaaacagagctcgaaacaactttagtctcccgttagtggattcaatgatagagaaagactctatctgatcagatttgcaatgggtaaaaaagaagagagaactcactgtatcaactgggatcgaaaagcccactccagaagatgcaccagaaggagaataaatggctgtgtttataccaattaacgttcctgagctatctagaagaggtcctccgctgttaccagggttaatggctgcatctgtctgtatcacatcttgaattggacgaccagttgcagcagaactaatttctcttcgcaaaccactgtacaaatcataatgcacaaacatgctacagttttaataagagaaaaggaatagtatagccatttggcatgaagaggggcaagagaaaatatatgtatccagtatcctcaagtaccaatcatcttttttgacactttcatttgtgagttcgttatgagaagaacacatctgattagagtagaatgcaacttaaaaaaaagagaagacaaatataatttaacataccttataacaccagttgtgagagtatgatcaagtccaaactgcacaaaaaagttcttgctttagtgcgtatgaacaagaaacataagtattgacctagctagcaatagaaaacacaaagcagagctttaatctatgatcactttaaggatgtatactcactggattgccaatggcaaagactttctggccaacaagcagatcagcagagactccaacaggtataggtcttaatttgtttttcggtgcatcaatacgtaatactgcaacatccttatcttggtcaaatccaacaacttttgcatcaaatgttgtttgatcagcaagagtgaccctgttatatacatcatccaacttccttatcatacacaaacatcaaaagaaaccatccaaagaaacaatgtactcattataaaactaagaatacaacaattactaattccaatttctatcaaaaatcaatcagattctcaaagtttcaacataactaacctgagatcagaagcaccacgaataacatggtaattggtaacaatatgaccttgcttatcccacacaaatcctgaaccagagccttgaggtacctcaagaacgtccaatgtaaacgcgtcctgcctaattcaaacaacattagaccaatcctcaaatcacggagagaagaaattcaaaacgaaattcaccagagagaaatcaaattcagatacctcacggcgagattagtgatgtaaacaacggaaggagtgttctcttgaaacaaacgaaccgtcgcgagctcatcagtttgaagtttcttcggagtactaactacaaacgccgaggcagattcaacggcgggagaagcggcgaagagtgaaaacgataacgcgacggaggtacagaggaggaagaaaggtttaacggcggagaacggagtaaaatgaagagtatcatcatcgtcgtctctgttgttgtcgtttagtgaaagctt

SEQ ID NO: 476 - DNA, 31712 bp, Arabidopsis thaliana
ttctggttggtcctggaaatatcagtagaaacataacagagtaataattattacaaacagacttatttagtgattcaagataatgaggcggtataaatattttagatcagtcacagactcaccatcactgcggttacttgcaggtttcagtaaatgtgtagcatccacaaagtcacttaatccagcaacctgttttgtcaagcaatcaaaaagatctataaaaaccacttttagtggtattagaatctgcattaacaggatacaaaagacttgtttaaagaagttcaccaaccattttatcaacaacagccaaggtaaattctctcatgtgctttatgttgttagtgaggcatttcagaacatcagacaaaattccctaaactagatcattcaagtatttggtaaaaatggcaggcattgatattttacaatgtaaaagtattttcaacgcttgacatgtatccctaaccttgctcgccttcttgacagctggtcccatggctgctgcaacacctccaatggtagtcaatgtttgcatcacaagactaaaagttgtccccgtggaccaccgaataattctactactgaacatgatacgaacggtacatataacaattataaggattcatgactaattatgtaatgaaaaaaaaaacttaaataacagagaattatagaaaaattcctgagttcataccagttccatttggttggatacgtttattagccccttccagaattttattacagcttcaattggatccaaacgtatctacaaaaatttaaaacactcagtttcaactctacagcttagaataattttttcacaaaagaattgttagcaacaaaaaaagatttcaaaatcaggaatctcaaagcctttttaccgacgtctatctaactctcttcggtgccgcagtcccctgatgaacaacagacaagtaaaaacaagaaatctaaaagaccatccacaaaaatgaaccaaacaaacacatgttaggcaaagcagaagtagcttaaaaggaattcgtaagtttcaaaagtgagacaccaaagtcatcaactgccgaaacaatccagaataagccttcactatgaaccttgggattgttgtgctctttcatgattctgcaaagctacaaacaaaagtcatgaatcatcattgtgatcagattaaaatgaaagtcgatagaaaatttaccgaaccagcacaaaccctttcgatcagctgcttcacaaaaagaagtaggccacttcattgtagaggctcatatctttatatctgaaactgagccaagaaagaattttgtaagaaaaagataaaactgacgtctaaatacagcattcagtttctaaaagttactttttcttcttctattactaacctgtaatgcaaagtatgacacatttcttttgccgcagttgaagatatgagtgatgatttgcagaacctgcttttccaagtaatattctcagggaataattcgataattacatataagaagattttaaatggagtaacaagcatacctcacattttttctcattttaacctggagctgcacctgcacacaacaaccgaccaagatttcctctgacttgtctagttcttctagaacttctatctcttctttcaaagtcaaagttgatgcacggcaatataatataatgcaaaatcatcaaactcagtaataattaacaaaaaaaaagagctaaaaaagagcttcagtggcatgttgtcaagatgcacagccccacgacaaaaattagcagccaaggtacattctctcacgtgcttcttgttgtcacttatcaccgagagacgtttcagagaaattatgaatgtgcaagcgaagcaagtatgtagtatgtatgaatgtatgtatgtgtggatgcatcatgcattatgcatgaatgtgctaaaaaagagcttcagtggcatgtgctaatgaggctttgatatgaatacaatgcaacatggaacatagcatggatatcaaatgcagtaacagaataaaaaatactataattcagtggcatgttgtcaagatgcacagccccacgacaaaaattagcagccaaggtacattctctcacgtgcttcttgttgtcacttatcaccgagagacgtttcagagaaattatgaatgtgcaagcgaagcaagtatgtagtatgtatgaatgtatgtatgtgtggatgcatcatgcattatgcatgaatgtgctaaaaaagagcttcagtggcatgtgctaatgaggctttgatatgaatacaatgcaacatagcatggatatcaaatgcagtaacagaataaaaaatactataatttaacaagcagaagagatgcgtaaggaagatatcaccagcaatgttgtcaagattcacagccccacgacacaaatgagcagccaaggtacattctatcacgtgcttcttgttgtcacttattaccaagagacagagaaattaggaatgtgcaagggaagcatgtagtatgtatgaatgtatgaatgtatgtatgtgtgaatgcatcatgcattatgcatgaatgtatgaatgcatcatgcatgaatgaatgatgcatgaatgcatgaatgaatgatgcatgaatgcatgaatgaatgatgcatgaatgtatgaatgcatgaatgcatgaatgtatgaatgcatgaatgcatgtattaatgcatgaatgcatgcatgaatgtatgaatgcatgaatgaatgatgcatgaatgtatgaatgcatgaatgcatcatgcattatgcatgaatgtatgaatgcatgaatgcatgtattaatgtatgcatgtatgtgtgaatgtatgcatgtatgagtgaatgcatgaatgaacgtctcttttcttcaagcgaggaagacctgaaacgatagaaaaagtgtgaatgcatgaatgcatggattaatgtatgcatgtatgtgtgaatgtatgcatgtatgagtgaatgcatgaatgaacgtctcttttcttcaagcgaggaagacctgaaacgatagaaaaagtaaaccataagaacaagaataagaatcaaaccagagataaagtgatgcagaacaaatctaaactgaaagcagagcagcagaaagccattttttatattcgattaccaatcaccaccatgttctcctttataaagcaagaaatgtttggaactcccacgtcttcgagaatatgattccatactgatatcttgtgcgcctctataagtgttgagctctaaaaaatagatgcctaattttttttaccaacaaatcagaataagtgaatactcagccaccaaatatcattatttctaatctgttacaaattgaattcagaagaaaatatgttaagagacagaagaaacttactggttttgcttcaaggtaccattagaagtggattatgaaatctttgaaacaccttttgatgattcgattcaaatcgttagcaagagcatgaacataaaagggaagagagaggagagaacatgttaatgagaaaaccagatcatggagcttggagaggtaccttgaacaaatcatggtcttacttttcaagcacaagagctagttatgggcctttggatatctttgatattcttttccatctgagaaaaatgcacacgactaccaatattaggttctaacaacgaatagaacaagctaatccaagtatacctattgtttctggtcaactgactctcaagatctcgaaaaggcatccttcagctgtttttcgcacatcttctgattttttctggaaatattcatggaaacataacatattagaatcattacaagcagacgtattcactgatttaagctaatggactcaccatcactgcggttacatgcaggttttgtcaaccaatcaaaaagatctttacacaccactgttaggagtattaaaatctgcgcattaacagggtaaaaaagacatgcctaaagaagttcaccaaaccattttgtaaagagcagcagccaaggtacattctcccatgtgcttcatgttgttagtgaggcattttagaacgtcggacaatatttcctaaagtagatcactcaggtatttagtaaaactagtaggagtgatattttacaatgtaaaaagtattttcaaagcttgacatgtatccctaaccttgctcgcctcctccacagctggtcccatggctgctacaacaccccaattgtagtcaatgttgcatcacaagactaaaagtcgtgctcgtggagcaccaaataattctcctaccgaacgtgacaagaatataacagataacaataagtattcatgaataattttgtaaagaaaaagctaaaataagagagaattatataaaaacattcctgacttcataccagttctagttggttggatacatttattttagctcttccagaatttatttacagcttccattgaatccaaacgcatctacaaaaaatttaaaaattcagtttcaactctatagcttagaataatttccacaaaagaattgttaggttaagacaaccaagaagatttccaatttgtacagcaccttcaagtatgactctctcaaagtcctttactgataacttctctaggtaagctattcggacatctagcagaggttgatgttgaaaacgacgtcttactaactcactttggagtcgcagtcccctgatgaacagaatacaagtacaacaagaaatagaaatccaaaaaacaattcacacaaatgaaccttaatagttcacatttgacatcattaagaaactatttgatgcctgcaaacagaaatagcacagtttgattcagttatctagatatgtttcttctaacaacaaatgttagacaaagcagaagcaacttaaaggaattcgtagccacctggaccatcaaatttgttgcaaagcagaggttgatgttgaaaacgacgtcttactaactcactttggagccgcagtcccctgatgaacagaatacaagtacaacaagaaatagaaatccaaaaaacaattcacacaaatgaacctttatagttcacatttgacatcattaagaaactatttgatgcctgcaaacagaaatagcacagtttgattcagttatctagatatgtttcttctaacaacacatgttagccaaagcagaagcaacttaaaggaattcgtagccacctggaccaacaaatttgttgcaaagcatgcaaaagtgtgattgtagcatttctaatgactgcagcccaaccatccttacaaaaatctatcatatcctgtcaaatggacaaaaagaaacaagatattccactttagtaaatagggaaatcaggggctgaaaattacaaaagtagaatttagttcaaaagtgagacagcaaagtcatcaactgctggaaccatccataacaatccttcactaagaaccttggaattctggagttcttgtgctctttcatgattttgcaaagctacaaacaaaaggcatatatcatcagattaaagtgaaagtcgatagaaaatttaccgaaccacatactttgcctaggtatactacaagaacacatagcaggaatggattactttacctcctgctccagcttgaatagatgacgattgaagtgctgctgcaatctctcatttgcataatttatacaatactgctcaaaactatttctctgcacatgtaaaatatttattcagtaaatcaagttaacattggtacaaaatgtaaaagaaaagatgcatacatgaaaccatttcctgtaaaatctatgccccaatctttctcatcatgcaatgtgggtacaatcagaagttgagcttttagctcctaagcattcaggttttcagctgatgcattaacttagagatagtttcacacttctaatgacagtttcactgattttcattcaacttgatatatacgacagtttaaagaatcatatttgaaaacatagcatgtaatacattaagcaattatgaatgtgcaagggaacaagtatgcagtatgcatgtatgtatgaatttatgcatgtatgatgaatgtatgtatgtatgtatgaatgcatgtatgtatgtatgtatgtatgtgtgtatgtatgtatgaatgcatgattgtatgaatgcatgtatgtatgtatgtatgtatgtatgtatgaatgcatgtatgtatgaatgcatgactatatgaatgtatgtatgtaagtctcttttcttcaagcaagaaagaccagaaaagatctgtaacatcaaaaaagttaaatcatacgaaaaaaaaacaagaatcaaaccagggacaaagtgatacagaacaaatctaaaccgaaaacagagcagcacaaaaccattttatatcttcgattaccagtcaccaccacgttctcctttaccatctctttgatagtatcccatcgatttattgtttgaagctcatgattcaaaatcacgttgatcttcctgtcaaaaaccaaatcaaaccaaacccaaaattgatcgacctcaagattaccataccaattgggataaatttaaaaataagcgaatcaagtaacagagatacacaatttgtaagccgatcaatctgacggatccctaaatccgagagtatgatttctcatgtagcaatattctaatcaagtaacatagaaacgcaattcgtataatccgatcagaattgctccgacggaactgaccttagaatcgatcaccttggccggactgagagaacacgtaagagaactcgctccggtactcaagacaatttgcgaaaaggagaatttagggtttcaaacggccatgaagtggaatcagatcaaaattacgtattataaattgtataattcaggagaaatcaacacaatttagaagaaggattaaatacctagccgaagagatttgagtggttgttcgttgattgtcgaatccgatcaggggaagcgggtcgggtcacagattacgttgttgaaattgaagaattcaggagtaatcgacagaaataagaggaaggatttgttgaacccagcgaagagatttgacttgagagattggtttgatgagtcattgaagaagaagaagacgagagatctatagaaagaatcatttgaaattccaaaatcacactctcgttcatatagccgttataacttataactagaattactaaagtacccctaactctaataagatttcaaattgttactgattaccggttaccgagattagagagtcaaatctaaaaattttttgataccacggcacggcttctacttgtagttgttatacccgtggttgcataaaaaaaaaagttgttatactcgtaaaaatttttgatacgaacattaggaattgtatagttttttaagggtttttttttcatctttaaaaaatatttatagtttcattttcaaatagatacaaaaatatttatatgtgataaaataagcggatgttcgtttttccattcagataattcatctgaacgaaaatgaataatgatgttcgtttgtaacaatataaaaatgagatgaaccatgattttatattaaacttatccaaaaaatgatagtaatccggttgagactgatcggagcagttaactagaggtgattcagatcagtcataaatacccctgtttaatttagagaagggttttgtgtaaaaaaaaacctcgaagtcgctattttttgcaactttattctttacctctaaaaaaatgcagaataatcttatgaagtttcactttccttctattgaggatgaatttttaagtttacctcctactgtggttgtctcttattatattgatgcagcttggactgcaaactcggaagaatgcggcatggggtggatcttccaaactcagaacaatcggggtttccaccaagggaccgcaactcgcaccctcgcgccctcggctctagcttctgaagccttggcactgaaatcagcgttgtctgcagcgtctcgaacgaaattgacttccatcaaagttttctcgactctcaagtccttatatctctgttaaatacagagacttcaacgaacgagctgcaagggattctccatgatattgcctttcttagtcgttattttcttttatctcaaattctcgtttgtaccacgcaaggctaacctgttagccgatgctttggccaagtctgcacttttttctttgattgtaacaacctcctagtcttacttttgatcaatataatagtttgcccaaaaaaagaaaaattatgaagttctaaataatacttttgaaagctcaaatactgtttctttaacttaatccatccaccgtaaataaggtagtcctcggtcctcctaccatttgtattatcgacacacatttattactttattagcatggtatgaaaaaatgattttgtacatagaaacgttgacagcattttatgttagattgactttataaccctctcgtggattcattattcaataactccaactttttcttcttagttttcattactgtgcatcttaacgaagaatctgacaattcaattatgatggtcgtgaagtcgttccaaaataatatccttcgaagacaccatttgcatatgcactacaaaacaagataacatgacgtatatactcgtaatctgggcctaagattgtgttgtgtcaaatatggactggggaagaagtatttattttgtctctcgattattcacatgattcgtcaattccacaaaacccattataaattaactcctcttcatctgccagtaagacaaatctatatcacataaattaactcctctctacacctgccattaaacacgtaaatagttaatactacatcgtcaaaactcaacttatattgaccacgtttatatgtacggtgatactctgtgaagttgagtcttgctaaacaagcaaatgatgacaaggctaactcaaagagtaactcagattgatgcaaatataaccatagttagttcaagcttttgggaccacaaacaaagttgctggtttcgtcaaaagagagagctgtgagttgtcttgtagtgaattcaattgtgtgactgtggtggtgtatacgtttggttacgtataaggtgacagctttgcaattagggttggtacacaaggtgtgatgtctccatctataaagaggaacattatgcagagagaagaagtgtgatgtaatgatgtagtgatgcgagttgcataaagagaggaaaacagagtggggaaacactaagagggaaagtgagctttgtatattgtcaggggtgggtgagggaaacaagctgtaaactctttcaagttgtttagtagattccgggacaccgttcccggcgagacgtaggctataccggtttggtatagctgaactcgttaaactgtgtttgtgtgctccttattccttttctgcatcattctctgcattcaccattatcttcttatcatctctgtttcagtcttgcatatttcccaaagattcacttctaagtttagcttgaaaccgtaatagataagcaagcaacaagcttaagccttgataaggttggattaaccttaacagattggtatcagagccaggttggcaaagaaaggctaaagctttatctgaaactttcaagttccgcaagaaagtttctggttttatggaaagtttcaagctttagaaagaaagaggaagttttacaaagaaaggtgtgagttttgaaaagaaaagagctcgtttgtaagaaagctcaaagctttgtcaaggaagttgacatctttacaaggtatggcttcgggaagtaaagatctagagaagtttgatgggtttggagattatatctcatggaaagtgaagttcctggaccatctaaaggatctagacttgttggaaggactgaaagaggaagtttgcttagagaaaggttctggaaattctggatctgacgaaggaagagttaaagatcttgaagaatgtaagatcttagaagagaagaagagaaaggctagagctttcatcatagtaagcgttggagatcatgtcttgagaaagatcatgaaggagagaacaactgcaggtatgatggaactcttagataagctgtatttgtctaaatctcagcctagtcatagtatgtcaaaccgcattcagtcgcaacgtttatattttaagaggaagctctttgagtttaagatgagcataaacggatctatgaaggagaacatagaagagttttcaagtatacagtacttgtagtgtcggctaaggactctctgtgggttcaatgggtgtacaaaaatctaattcgcaaggagacgttttggtcggttaaagagaacacgtctttaggatcttggttatggaaaaagattctaaaacagagagacaaagctcgtttatttcatcagatggaggtacgctcgggaacaactacctctttttggcacgaccattggagtccgcttggcaggctacatcaacacttggggtctcggggaacaatagatttggggatagcgactcaagcgacggttgcagaggttttagatactcacaggagaaagagacatagagcagattttttaaatcagattgagaatcacattgagctggttcgacaagctagaagccaagagagtgatcgctcattatggaaacaaaaagaggacagctttaaaggctctttctcttctccaaaaacttggcaacaaatcagaacaataagcaacgaatgtgaatggtatagaggggtttggtttccgtcttccactccaaaatattcatttgtcacatggttagcttttcacaatagactagcaacgggtgataggctctacaaatggaattcagaagctcgggctacttgcgttttctgcgacgaggaactggagacgcgagaccacctctttttctcgtgtccctattcttctcaaatttggatcgctttagcaaaaggacttctaaatggcagaaacgtttcgagttggagcttaatcactcctcaccttcttgactcgtctcagccatatctccatgttttcacccttcggtatacgttccaagctttgattcacagtctatggcgagagagaaatggtaggcgacatggtgaacctgcaattccggcttcgaagctaactaagctcattgacaaaaacattcggaatagattcagcacacttcagaagatggggaacaaaagacttcaaggtgggttgcagtattggtttcaaactcgaagttaggacacatgatcatctctcagactctgtttgctctctctaaattcatgttacatttattgtaaacaatggtttttttggttgaatataattttacattctttcaaaaaaaaaaaaaagagttttcaagtatagtagcaggtttagacagggaaggtgagattgtgtctgatgagacaaaagctatggcgcttctcatgtctcttcctaatcagtttagtgaactgaaggaaacaatgcagaacagtgggatatctctaacattggataatgttatgagagctatctactctaaagaacaagagtttgatcagttttgggaacaagcaaaagaaagaaaggtgcttgatcaaagaatgaacctatcaaaactgagagcaaaccaagagaaggaaaagaagatgaacaaatctaaggctaaagggaagaagatttgttggaccgaccataaggaaggtcacagttacaagcaatgtaatcactgcaaagctgagaacaagcttggtgagcaaagtcacaaatcagtctgcaagtttgtaggatcaaaccggttgaaagcagaactgatggtgaaaaatgacgtgtctcatctaaatgaaaggctcgaggaaaagctggtgttatgcagtgaagaagaagctctttctcaaagcataaaagagcttaagaaagaacaggttgctaatgagactccttcaacaatcaaaggagtcggaaagcttcattagaagcttgtgttcttgatggtctttcttattattcacgagagactagttagaaaggctgcaggaaggtgaaacatatgtctaaggttcagacacgttgtttcaagtaagcagtcatgaagttctagtcggatacacaaagtaaaatgtgtatggttttaagtcagtgaacaagaatgtttaacaacagaggtggagccaagtaagaagagatgcagtgaagttcgttggtgttgctacaggaggaatctgtctctgcaagagtgtagagcacatctttagatgttttttggatttctcgtggaacaagttttcactgcggttggttcttcttgtgtgttttgttagattttttggaaatctgagcagatgatggttcaaagaagcaagttaaacatgtgtagctcactgttaaagaaatttcgtggatagttagtgagaaaggaagactaagaaatcaagagcagaggagtatcaaaatcggtcaagctaagtatggtctcatttgatgacaaagaagaagagttatcagtcttgagaagaagcttgttattttttgatatgggtactgaagtacaagtttctggatctctaaaggttcagagatgatacaagtatggttgtgagacgaggttaattcaaagttctcaatggattctttaaggagaatttgagaagggaaagtgagagaaacagttgcaagtgatcaatgcatagtctgtttcggagaatcacttcaagaagaatgaagttattgtgcttaaagcacgatgaatgtgtcgtctcaaatactggttgcatcagaagaagatcaatttcgttttttggattagttttctcaaggaatcgcttgcaggaacaagtgagttttcatcagggttcgaagtctgaaactgatgaataaagagaagttcaagttcttggtttaagaacagttccaatggagatctctgaagcgttttcacaaggaagagtgatggttgacgagagattcggttcaggtcagaaattggtaatagatgcagatgtcgagctgttttcaagcataccgggtttaggttttgcaggttatttcagcttgggaaagtgacatcatattcctaagaattgatgtggaagttgctgcaaagggaatgtctcttgatgatcacaagtattggtgataagagacaagaatcaaatagaacgagtagtaggtgaaactactgatgggttattttgataagatgtgagtcttaaaattcacatctgttttgagatgaatcaagcttggggtaaagcttggtcttggcagcatattcaagtattagttgcaagttctgaaatttgcaggtttgctgaagctctgcaggttatgaaatttcagaaaagaatgttaaaaggtggcttgaaatgataaagtatagaagtgagtcagtgaattcgtcaagaagaaactgggagagaggctgcaggcgttgcagggctgtctcaaagtcttctcacttcaagaagctttgtgaaactacagtttatacatcatggtagttgggatcatcttcaagcaagtacaagcaactgatagatactctaaagaagggaccaattgcatagtcttctcagaatgcatttggaagatatcaacaagtgttatcttggttaaatatacactccatcatgggaaatgtttcagaatctaagaacatttatgatgcaagatcaagtgttgatggtttctacttactttgaaaagtagtagaatgggttttttcagctaggattaacttcatgagctcaagaggtgaagtttaaggggctgtaaagacgtgtctcttacgggtcattggttcagtgaagttgggacggttaaagatgactaacagggggttttaaacgctgttggtaaaggtctgtttaaacagaagaagtgaacaacagaatgtatcgagagtctccctaatatcgagtgttgggtggcgtgtcttgttaaggttttaacaacggtacaagcggatgttctagaatggtctgattaaacgggtttctgaaaggaagtttcaggtttctacaatggtgtaagctgttatggaggttttggttacatgatgaatcaaaaggggtttcaagtctgaagcaaagtcggttctgtttttgcatatgattcaagttatttctcagtaaggtttgtctcaatgcgcatgaggaaatcttagaagctggaaacgaatcataaaggcaaagggtaaatgagttcagtcactacaacagatgtggtgagaactgaagctgcaggatattttgtgtgatttgaaaatcataagtggtggagcttatgaagaagaactctattgggtttaacaggtttggtggagttttctctttaaacttgttaatagagtttgctgactggttagtatcaagactacaaaggcacgaagaggtcaatatgagttgaggcaaaacacttgtgtgtttgaggctggttttatgactcagtttggtaagtgttgcaggtcttgtggttggatcagtttgttgagtgtttggtctgcagaattcgtaaattatgcagagtcattggagttgcaggttttagaactggtgttaaaaggttcttgagtgctgctcttggtcaaattctcaagaaaggactcgagttggttttgtgtaatcaaaccaaggtggagtttaatgcctatctctgtggtgaaacaaaagccaaatgtctggaaggtttcactgtgaaacgtaacgacaacatcgtgaagtttggatttatgaagaaagtctaaactgggatcgggaatcaatcagaggattgagatctaaggtattctctctaagaaagtgtgtgcattcatttggcttgttcatcttcgtctcaggtggagatttgtggagttgagtcttgctaaacaagcaaatgatgacaaggctaactcaaagagtaactcagattgatgcaaatataaccatagttagttcaagcttttgggaccacaaacaaagttgctggtttcgtcaaaagagagagctgtgagttgtcttgtagtgaattcaattgtgtgactgtggtggtgtatacgtttggttacgtataaggtgacagctttgcaattagggttggtacacaaggtgtgatgtctccatctataaagaggaacattatgcagagagaagaagtgtgatgtaatgatgtagtgatgcgagttgcataaagagaggaaaacagagtggggaaacactaagagggaaagtgagctttgtatattgtcaggggtgggtgagggaaacaagctgtaaactctttcaagttgtttagtggattccgggacaccgttcccggcgagacgtaggctataccggtttggtatagctgaactcgttaaactgtgtttgtgtgccccttattccttttctgcatcattctctgcattcaccattatcttcttatcatctctgtttcagtcttgcatatttcccaaagattcacttctaagtttagcttgaaaccgtaatagataagcaagcaacaagcttaagccttgataaggttggattaaccttaacatactcttttgaagactactggtccggtccgtgatgactagttacattaaaatctgaaaacacgaaaacatagtatagttaggcattctcgaaaagaagaagagtagatacaacttgttagtcttgagatgagtgagcacaggatatggaattcaataatttgtaagcacaattcatctgacaaatacaaaagacaagtgaattgataataataataataatgtatatttgtttgctttgtttttattgggttataagacgaccaaattaaaaatctttccgaacctaagatttatgtattttaaaaatataacttaaaatactcagctatggagtttataccaatagtaataaaataaaataaaactatatatactatcttttgtatcattgtcatctactatatacctcacattcatttgtttctgtaattaattgaatattagttttttttcctttttggacgaaataactttagaggtcctgtattttgattaggacgtggttatatcatgtcattgcaaacaaaatagcaatttaagaagtgaaattcgtggttgcaatagcaaatagtctgtcggttctcaatctatgtttgagggtgtgatgtagtttctaatcactattttccttggaatttgtttttgataggaatgtgaatatcatatgaatgaagtttaggttttacaaaaaagcttaaccagataaatgtaaacttgccaagaaaaaagattaaaaaacaagtaatacaagctaatgttgaatgtcaatcaacatggtctaccggatccacaagagcattaggcttctatttacttggacattacgttgatgagaaacccttcttgtaatcttttaccaactatcatctacggtttttaagaattcagtttgaccaaagtttaacaaaagttttatattttatttgacactagatgaccgttaatactaaaccatctttgatctaacatgaaatttactcaatcaaatatatatatcattgattaagtatgatgattaaattgcaaatctaaccataaatgcagatccaattataatgatatagttgctcgattatgagaaccctggagattttattatgaaatctataggcccaattatcagaatcaaaactcaatcaactagatgatgtgaaatcaatttttttaatgtatgtacacattattattatacaatcatggccagagaggccataccacatgtgtatagtacaatctcacatgtgtcaatgccaaataaaattcataaaaattaaaaacattggcttaagagttgaagacatgtcccatgttcactttggtttatctcttcaatatctcctaaaaattgcatttgcttggttgctaggacacactcgcatacagctacatgaattctgaatgacccatatgttccttttagctccaaaattactagttatttctgttttgccggtttttattttctacttttagaatcatgacaaataaatacaataaaaaaagatttcaatatccataagagactattttaacgttgatcaaaaagtgatttgaatgtttttctgaattgtctacattttactacctagctcacatatttatctggcatggtattcatgatttattatccaagtcccaattaagactaaaagggacatactggctctaagtcacttgtttcggatcccactactttttgggaaaacttctaacattaagaagtttttgaagatttttaaaatgtaatggaaactatatacaagtcattcgaaaaacaagatctagccattccataggggttcatagagatgttcaagactttccatatgtgtgtgtgtaccttgtgtatgaataaaaatagataaaaagactatcatttgacttctaagcagttaaaatattgtctcattgatgatattgaccaatcaagcataaacaaaattgtttttacgatgaagaataataatttaatgagttaaatacaaaacctcaccgattgcatctgaaaaatcttagaagattcactatattgtttattgaattattgaaaaatatattcattaattaataagtgatatatatatatatatatatatatatatttgaaaatatgattgagaacaaaaagatacaaacttggccgtctcatgtggtagaccttacttcagtgtgactgtgctgatgaaagagcatgtgcctctattaatgacatatatataaattatacatatggttctcgtaactaattctataacataacacaaatacaattcgaaaatttgtttgtaggtcacgcaattaagaaattaaaacctaataaatgcttagtgggaggaatccccatcagcaagaaaactcaaaatcatcaacaaaaaaaaggagagattattcataaaatttgtttgataaaaacagatatgaataagtagctttagtaatgctataaatctgtaactcctagtcttgtttgtaatgttataattatggtgcaagagaaaatatgttttagatattcaaaatcagattgatgaactattacatttacagtttaccagctcaaacacgttttagatcaaccgctaataaaaactggtcaaaatataacacctaatcacaaaagcatcataagtatgtcataagcgaccaaaatcaacttaataaaaaaacaaagtggtaaaacactagggcctgataacttgtatagctgtcttgtacagtgtaataatcatcatatatattctcttcttaagtctaatgggttattcaacatttatccaccatctatttcagattaattaatagctgccgtcaaaaataaaaaggataataataatgttgtgatataagatattatagaatatatattttaatataataatattttatgttcgtaaaatagaaacttcccatgtgattttcttctctcaccgccggttacggttattgtctttttcttagacttgaaaatattaaatctttttgttatggaattttactacacagcttgtattcatatagttttgggttaatagttaaaacataaaacatatatcgtgattatagtttactcacattttacatgttgttacactgtcgatatctatcaaatatattactgttgtaatttcttttcaaaaatactgttctaatttaatcctgcatccaacaaactttttgaccagagagaaccaatatatatatcagtatgtctataaaaaaatatgataattgtgaaaatgagatccatatttttgattatatatataagtgaaatagatttgatttgatttactttgcaacgtcttgtgacacaagcatgacataatcgaacccatctaacaataacatgcagtatatcgttgagcttctagcaaaatcaacaaaaatctaaaatcttttagtaaaataatattaaaccttttatcattaagaatttttttaaaattaacaataaacccatgacatttgtctaatctgccatagagttgaggtgggacttctaacatgctctattatctcttgtactccgttgatcatcgatgataaatcacaagctaaatgtttgtgaataagtgaaaatttatcttggaaatgaaaaattatccaaatcaaagggttacagtaactggataattcatttaacactttgaatcaacaagatcaaataaaaaaagttggaagacagtgaagcgacaacatagtccattactttgagttaaagtaatattataatttagtaaagttgatctaattacatttttataagtttaatctggtcatcgctggaccaagttgtcatcctccaaattccttaccaatcatacaaattgatttttggccttttcttggaatcatctcttttttttctttgtgtttttcttctcattcattttgtttttctttaatacacacacatgcatgtataaacgcagttttatgactggacatatcgcgtaagatccataagccaatagctttttttaagtaaagtattttcattttatgggtataattataaagatgtaaatttccccaaaataatataaacagcagtctctctcctacttaatcaaatcactagacgcggatttgcttaacaaagtaactttaaaccaaatcgttccacctaaaaggctaaaaccattaggattgattttggtcaaaaaaatcggttactattttttaatttacttagaagactggcaaaaaaaaatgattccaaactactaacatataagataaaatgtatttaacatcaaattaaaattttcacgttaactaatataaaaaaatgatatgaaagaaaacccaactaatctttgattatatgcgttagccttcttcattagccttctttaaatactagattagtacttgataaacttttattgtctatacaatatatcaaaaaaaatgcctctaaattaactacataaattagtaatttctgaaaattaataaaaaaaacacgtaaccataacttccgagtatgtttactttaataattttcacgggattctgaactctaaataaagattgattgataaaaaaatattaaaataaaattcacgggatttacaaattagttatcatttgaatcatttgttatagaatctaaaataaaatagtaaattgatcatatagtaagaaatcaaattttctttttttgtcataaataaatataatttgttctttagttatgcacgctggaaatagatcccactaataaaaattggacttttcaaacaaagaaaataattaaataaaatcttcctttacaaaaacaaaagaggaaaattcaaagaaaggagaactctcttcttcttcttcttcttctcctctcctctttatttacttagttggttcacttcagcacatgatcctcgtctctctttctttctctctctcaatcacaagtttcagttacacagctgaacccaaagtatctcacattctgatctaatcagaacactgttttgtctgtgtaacataaacaaacgatcctgtttttatggaaaatttaatgaaacagtgacgattcttctacacttctttataatgacaaacatttcatagtaccaaaatacacaaataccttttctttattcttctcacccttctctgtttctttatcattcatggctccaaattcagtagcagtgacaatggagaagccagacaacttctctttactagagatcaacggctcagatccatcctcattccccgacaaacgtaaatccatcagtccaaaacaattctcatggttccttcttctcaaagctcatagactcatctcgtgtctctcgtggctagtctcttcggttaaaaagcgaatcgcgttctccgcgaagaacattaacgaagaagaagatcctaaaagcagaggaaaacaaatgtacagattcatcaaagcttgtcttgtcatctccattattgccttgtccatagaaatcgttgcacatttcaagaaatggaatcttgatctcattaaccgaccgtcttgggaggtttacgggcttgtcgaatggtcgtacatggcttggctctcgtttcgatccgattacatcgctcctcttgtcatcagtctctccagattctgcactgtactctttttgattcagtctcttgatcggttagtcctctgtctcggttgcttttggatcaaatttaaaaagatcgaacctaagctcaccgaagaatctatcgatttagaagacccctccagtttcccaatggtccttattcagatcccaatgtgcaacgaacgagaggtaaactataaacactctgtttttactctgttttcactttggttttactctgtgttgctctgtttttactctgtttttattctgttttatgttctgttttctcttacatagtataattgttatgttttgttttcttctaggtgtatgaacaatcaataggagcagcttcacaacttgattggccaaaagataggatcttaattcaagtattagatgattcagacgatccaaatttacagcttttgatcaaagaagaagtatcggtttgggccgaaaaaggcgtaaacataatttacaggcataggttgatcagaactggttacaaagctggcaatttgaaatcagccatgacttgtgattacgttaaagattacgagtttgtgactatcttcgacgcagatttcacaccaaatcctgatttcctcaagaagactgttcctcatttcaaggtaagaacacaatctctttattcccaaacttataaaaggaaacttctttcttgacgtttcgtaatttacgatgaatgttttagagaaattcactggaaaaagatttgtttcttttttacacttttttgatagaaaatatttttttgattatactcatcaccgacagttgtctttgctggttttatctatttttcggtggatcatgttctaagtaaccgacaaatttttatattgttttttgtatttttggttttatgttaggaaaatccaatttggtaatttgttatgtatgaaatcgaagtaaccgacaaatatgaaattacaaaactcatgacttctttggttgatttttctaacatgacaagtcttcaaattcaatctagttgaagctaatcttgattctgtttgattccgggtttcaattattcctttgtttttacatttacatattataataataattgttttataagttattgttttgtgaaaaatcgaaattctattattttatttttatgtaccccacctaaagagcatatcttatttttcatgtgggttgttggagtcgaactcaagatgactgagaccggaatttttaagtagactagtcaatagattttgttaaaatgtaaaagtatattcatgtggaagtttacatttatgcaaacatttttgaatatcaagattcttacgagtgttgtgttgtttgtttgcacagggtaatccagagctagggttggtccaagcaaggtggtcatttgtgaacaaagatgagaatctcctcacgaggctacaaaacataaacttatgtttccacttcgaagtagaacaacaagtgaacggtgtgtttctcaatttcttcggattcaatggaaccgctggagtatggaggatcaaggcattggaagaatccggcggatggctcgagagaaccaccgtggaagatatggatatcgcggttagagcgcatctcaacggctggaagtttatttaccttaatgatgttgaagtcacttgcgagttgccagagtcttatgaagcttacaagaagcaacaacatcgttggcattccggtcctatgcagctgttccggttatgccttccttcaattatcaaatcaaaggtaaaagtttatttctacaactagtgatagtagttaaacatcattacatatactcattgtttgtttttgtgtttgtagatatcggtttggaagaaggcgaatttgatcttccttttctttcttctaaggaagcttattctaccattttactcattcacactcttttgcattatacttccattgacaatgttcatacccgaagccgagcttccgttgtggatcatctgctatgttcctatcttcatttcgcttctcaacattctcccgtcacctaaatctttccctttcttagtcccttaccttcttttcgaaaacacaatgtcaataaccaagttcaacgccatgatctccgggctgtttcagtttggatcggcttacgagtgggttgtgacgaagaaaaccgggagatcatcggagtccgatttgctagcgtttgctgaaaaggaagagaagttgcataggagaaactcggagtcaggtttggagcttctgagcaaacttaaggagcaagagacaaatcttgtagggcaagaaaccgtgaagaagagccttggagggctaatgaggccgaagaacaagaagaagacgaacatggtgttcaagaaagagctcgggcttgcgttcttgctgctaaccgcagctgcaaggagctttctatcggcgcacggtcttcacttctactttttgttgtttcagggactgtctttcttggttgtagggttggatttgatcggagaacagatcagctagacacacacaaaaccaagacagagaacaaggaaaaaaataccgtttatattcactatttttttgtttgttttttaaattcttttccctttttatatgtgggttttatacataattttcaagaacttataatgtccagtttcagataaatgaattgaaacgaatttgttatatgattttggcttaactttaaaaaatcatagctcttagatgttttgtttggataaatattcaacagtatttcaatcacaattactcaatcacattacctctaatagaaaatatttttgtcttctcaactttgatttgattaccatagcatttgtggacagaatgaatggaactacaaactattctcattagtggaaagattacaaatgataatttgtctagtcatagtttaatttgtctcggaaaaatactcaaaagaagtgtagatagagatcagattagttatctatatatacatttttgtagacgtttttgaagataatgttgaagatttgagccataattcaacaattaattcaaatgggtgggtataacccggtttaactctgttcggatcttggataacatgtttaattctgttctgatcttggataacattaatttttggaaaagttacctaaaaactaataattaaaaacaaaaattaatgatttaattaccaaatttaatataaacaatatctctaaactaaccatatttgttatttactttaactattttcctaaaatatttctacctaatttaaacataaatatataattcttctttcacttttatttgatcttatactttatttattttgaatttatataaaatatatatagttaataaaatattatatttttttctgcatatgatgtaattcaaatttttaaaacggacatatattattcaacctatgaagaaataatatgtgtacaatgtcccacatcgcttagaaaaattgtacaatggttcagacccatattataaaaggaccaaaatgattctgattacgaatgagcaggaaacttgatttatcaggcgtccaaaattaaaatagttatccgatttactcgggttttttattttaaagatttgaaactttaaaatgtttcaagaaattataaatattataactttatcaaaagttaaatattataattttaaaaactttttataaagtctatctttaaaaaatgctttaaatatttataattttaaaacttataaagttttaaaaattataaattgaattttacaaaaaatttaaacatgataaatatatatataatatattaatacgagacgatatattacaggaaaaaacttaaatataatcaaggtcgatattgtattttttgtaagtttcaaattttataatattgaaattaataagaaaatgacaaaattgtttaatttcacgggactgggttgtatggtaggatgggtttgggtggataataattaagattgtacaatgtcccacatcgcttaaaaaaattggacaatggttcagagccatactataaaaaggaccaaaatgatttcgattacgaatgagcatgaaacttgatttatgaggtgtccaaaattaaaatggtttgtttactagggttatttattttaaagaattgaaactttaaaaagtttcaaaaaattaaaaattaagttttacaagaaatttaaacaatataaaagatattaatatgggacgatatactgcaagagaaatcttagatataacactcaaaattcaatgatgaagtttgggtcaatattaatcttttttgaagtttctaattttataaatatttgaaatttataataaaatgacaaatttgtgtttaatttcacgggacggggttatatggtgtgacgagtttgagtggattataacatgggatggtatgctacggaaaaaacctataattaacaatcataatataattatataatcttaaacactaaacaaaattaacaatattaaaaaaaaacttaaaactttaattttttaaaatcacatttcgattcttttataagatttctctcgcagtactaccacgggtgaaatcctagaattgacgggtttgaatcgatattaatatgggatggtgtactacgggtgatattttagaattgactggtttatgttgataataatttgcgatagaattaggagtgaaatcctagaatgacaattaaaatataattatacaattaaatactaccacgggtgaaatcctagaattgacgggcttgattcgatattaatatgggatggtgtactacgggtgaaattttagaattgaatggtttggattgattatactttgcgatagaactaggagtgaaatcctagaatgacaatcaagttattattatacaattaaatactaccacgggtgaaatcctagaattgacgggtttgattcgatattaatatgggatggtgtactaagtgtgaaatccaagaaacaacaatcaaaatacaattatacaatattaaacatttaacaaaataaacaaatacaacttaaaactttaaaatttgagttataaaattttgtctcgcggtgaattatacatttcaatcaaacaatagcataaatttattaaaaatcatcctaaaaaatattcaattattttttttttaatgaaaatataggcccgcggtataccgcgggttaatatctagttaagagaaataagaaatttagagaaatctagggtttttagactattgaattacatattgttttgtttgctttaacttttaacatctgtttttaacaagggcaagttaaagtgattctttatttttttgacaatttcttacaaatttgggaatttagtctattcattagatgattagaaagatttttttttttggaaattttccctttgttgtctttattttttacttgctctggaagcaaaaacccctactatcgtatctgtgtatatattcagccgtttggccaagaggaacaagattataaacattgcttgtgttcttacaattctaaccgaagacaaatcgtcaatcttgtacagcatttctaggtatgctcagttttctgtctagagtcaacaccgtttctctctttgttttgttattatctctgtccgatgctttctgttcgattttgattctaggtcagttcatcaagaatattatgggaatctggagctatatggggaaaacatcagtattcatatttggtcttggattctacacttgtaagtcgctataaaggatctccgggtcattgaatagtttatgattgtatttgtactgttttagtcttttggaaattaagcctgatcagtgtgttattgtcgttctttcagatgctgctttattctctaactcagataataaggtaaacacattgatctcaaatcccaataatgctctttagcttttgtaaaaatactatcatcgttgattgaatttctcatgtttcagatgcttatgactcagttggaatccttcaaagaggtaaacaagcaagaaattgtgttaatatttttaaaggatacaaaatgtttttttaatgtgtctactcgaaatttcttatgtttcagacggttaaggttcaaatggagtcgtttacagaggtaaaagcaagagattgtgttgtgttaaaattgtttgatctttaaagacataaaatagttatagttgatctcgaatgtcttgtcatgtttcagccatctaaagctcaaatggctaagtatagagaaatggaacaaaagatggaagctaagtatagagaaatggaaaataagttggacaatcttgtgaaggtaagaaaccaagtaattgttgttaatacatcaaaagtttgcttctttgattgattttgaagggaggcgattatgtttgatttataatgtcttcttcttatgtttcagttgtctatgactcaaatctccgagttgaaagtaactagagagaagtgttgcaatgatttctggaaatcaagaagtacatagaggaatttcatgagggaatggatcagaagaaacaatctaattaaattaggccttttatgagttgttttctgttgttatgaaaaagtcttttataagtgatcaatgaatttgttgttcaaaaaaaaaaaaaaaaattgatcaatgaatttaagtgatttcttcttctctgtctctatattcttgctcaaccttgttctatgtatgtttgttttgaccgtgtgtatgaatcttaatgctatctaacttctcttttttttttttttcgggtcgctatctaacttctcttatagatgctaaattgagtagagtccacttagggatagtcgattagatattcggacgcatcaagctttgccaacaatgaagcgatctgttgaacttaaagcaaccaaaacctcgatctatcaaagctgaaatgataaggaatcagttccattgcactttctcacttactaccaaaaaacttatcttgtctctaaataaaagcttcacgcaaatcactgagcttaacactggccaactcaatgtccattatctaatttttcaataaatccgagaaggagttaaagataataatagtaagtttctctgttttgatctttgttgcctttatggggatgtatctataatcaaaggttttttttcttcttttcttttctttctaatgtctaagtgaaaacccacttccttcaccagttcaacggctaactcgagtggtcacacctccagcctccctgccgggtaaaaaccaccttcatctccaaccacaccggctccaccactactccactagttatgctaaaaggtaaacaaaaatatattatgttttgataggtctcaatcaaaagctatggattaatcaacatatcatttctatttggtagttaaatctgactttattgatacatatatagacaaataccaacacctaaaaatttaaagaaaaatacagagaatatgaacatgaatttcaaaagcaaatcgtaaacataattatattagaatgtcccacatctttgagcattatataaaagatgtagcaattcttaactcttgaactagcttttggaataagttaggccacattcctaatatggtatcagagagtcaggttggcccaacaaataaattcccacaaaaatggttttccatctatgtggtccatacaagtggcatgtctttttgtatttccgagatgttgggcttggactgtttcccgctggaccgttttccactcacatctggagtaagcttattagaatgtcccacatcgcttgagattaaaatttttggacattatataaaaaatgtggcaatctttaacttttgagataacttgtggattaagttaggtcacattcctaatagtaatatcacgtacaaacaaaaaccttaactcgaatgggcatgtaacattgtatatgagcccatcatgtttcttcatcaagtaacaaatattgaccttcaactaaaacaatatacatgaaattaactaggattggtcgaatgctgtttctagactgatgaatccaacctccgtatttaaaaaaaaaaaaaaatatatatattattgcttttaatcccaaaatgggcacacgaaacgagatacaacggcggagaacggatacaaaacgaaaagaacaccggcgacgaaacctaaatctgagatttgaacggtctggaaggaagcaacaagaaaacacatctactagctctggcgattgcaagggagactactttgcggcttcgcaaacgacgacaagctcaaagaggagtaatcagatccgcctttcagaagaagccgccgctaagcctgaacctgtaacttcccttccagaataaaccgaaacaagacaaccactacctgaaccccgagtccccgacctagcaacccgaaataacgcgctctaaccctcagatttgtcaccgtcaacctaagaatcctccaacctccatattggttctccttggtcctaaatacaaataataatgagactgtgaatttctagtcatcagtgaatgatttactaaaaattgtaaacaatttaattttgatattagtacaaattgacgaatatagagatgatcaatactttgttaaaccatggaaaattaaaataatttctttaaatatttggtttgtagtcaactcttttatgattttgacggccgagttcaatacaatgttccacaatgtgggtccaataaatcacatgcttcataagaatatcacaactgtggtctacctatataaacacaaattttcctatccttcaatttattattcttataaattaacgtgttttcttataaccaaactacgtgcgataatctaggattctacaatcaacgggttagtccaaaaaagttaagaatgtaagatgtatctaacaaaaatttatgtcaacttcgattaccatcatcaccagcatattatcatcatatcaaattatatatgttcggtgtgaaacaaagaaacaaacatgaaaaagaaaaaagaaaagaatggttggtacaaaaaatcaacataatatatcttcaaatatttcagcctaaacaattatttagttttaaatatgtttttcacatttttattaatatttgtattccctcttaattagatggaaaacaaagaaagacagaagcattgttggattttcttcactgtcgaatgtcgatttcatttcgatattttggacaattccagttgtattttgctgtttttcttctatttgggtatttacaaacacaaaataacaattcttaacaaaaacccaagacgcctctatattatcattcagcaccgacattatacaaaattagagaatcacaaatatattttaattcttaatgcggtgattattatatagaatcgtcacatagatatttggacagccattatagcccaaaaactttttcttaaacttagtgcttagtatattatgatttaggggacaattccgttattatttctgcataggtaaagtaatcatatatttgtttaaactaccggtacaatttaaactttaaaataatgtaaaatatgtagtttttttcaaggccaaaacaaacgtttctttttgtaattgttcaacacaagttgattcacaatcgaaataatttatgtgcgaaaactcagttaatagttgtgaaatattacttcaaaaaacactggtaaattggtaatgcgtgtcttctgaaattattatgatgccacttgattaatattagattattcctaagtgagacatttctctttgatattggtgacataattttatctaggcttcaatatatatatatatatggtcaaattcattcaatatatttctttcaatgaaagttgtcgtttctatgtttataaatttattttatgtatatatgattattctttacttatagtttatttacgttcaacttactcttttatatttgtgtcgttatttatgtatattcaagtaaacaaagaattatacaaaaggttgtctttttgacacattttaactcatagcaaaatatatttcaaaagtagaaacatatgttcatgttcaatctccacggatcgaatatgggtaaagtcggaaatcggcatagtacgtgtaagactgtagagtcgaaaaaaaaacagagaaagtgagacttttcatgtcatataacatgtaaatgattttttttataaaacccatccatatcgtatatgctggattaccgaatcgccacgtaaaattaaattaatcaaacaaaaatgaaaaatccatgagactttgtggagattgcttcactgtcttctccgcgtggatgagagatcaataacacatacaaaaaaagagtttaggctgcatgtgaactacgtaatgtccgtcaatttctctgtttcgccaatttttgctattaacttaatttatttacaccaataattgaactaaacacatgcattatcatttatgtaatatccctatatgcacacatagcaaattctgtttttagtaacttcctttcctaaaccaatacggcaataccgcttattagttttgcctttacccaaacatatgaatgttttctttacctcaatcaaatttcacctaaatctctatatagaatgttgtactaggtttttagtttataaataataggcattttgatgatc

SEQ ID NO: 477 - DNA, 85430 bp, Arabidopsis thaliana
gatccgagattggacctattttcacactaacgttgatgtcttgtttttcaatctgttgtaagtgaacaagtgtagagtattgaccgtctatgttttccattagctcatcgtgtgatccagtttccacaatgtgaccgttcttaaccacggagataacatcagcattacgaatggtagagagacggtgagcgataaggatagttgtacgaccaatcgatgcattttctaaggcctcttggactactctttccgactccgagtccaatgcgcttgttgcctcgtctagaagaagaatagttggtgatttgattattgcacgcgcgattgcaatcctttgcttttgtcctcctgacatttgcactcctctctctccaacctatttttttcaaaacaaaatctaaatcaaacctctaataaaagattatgtaatagatatatatgtgtttcgaaactgaaatgtaacctgagtttcgtagccattaggtaactgagaaatgaaattatgagcattagaggctttggcagcttccacaacatcatccatggatgcatcttctttaccaaacaatatattttcttttatcgttgtggcgaaaagggcaggttcttggctaactagacccatttgtgatctcaaccacttcacttgtaacttatcaatggatacaccatcaatgagaatctctcctgcaagcgggtcataaaacctttgcaaaagagatataacagtcgattttcctgacccgcttcctccaaccaaagctacagttttcccggaaggaactctcagacaaaagtcatcaaagatcgatgtttcaagccttgatggatacacaaactttacgttcttgaactctacttctcctctaattttctccaacttgtggccatctggattgtctgaatcaatcttgggaactctgtttatcacttccatgattcgctccccaactgaagccgcctcaaagaagtacttgagattagacaaaccaccaccaagtgatctgaagcaataacaaagataccaaatatcaagctcatgatacttaagatcaaaccattttttttgttactagaaataacttgtgtgttttctatttacctgactactattctacagaaaataaaaaacaccaaacatgttaagttaaactaaattaccataacatccaaaggtgcatatggaaaaaagaattcaaactttgtattacaatataaatatgtttgaaaagaaactaaaattatgttcagactgtttcattgtagacactttcactagaaaaatacgcatttctcgtaagctctgggatttgattttttatgtaccattgatacatttttatcatttggttcttagtaaaaaccaaaatataaattgaaaaatatttctataatattttgtatatgatactaacattttaattgttaaaaccgattttcatatctcattttaaattaaaaatttatttatgctagcatgggtcatctctagttatagatacttacacgccaccgatagcaatagcagcagcaactgcaaagacagtaccaccctgagcaccatggtacatgaccatccggcttccataccaagacatgaacccccacatggcaaaagtgattccattgcttccaatagtgattcccttagcaagcccttgtttaatacctagcttcaccgacccttgaagcgcggttgagaactttgatattgtcttcctctccccagagaacgcatagacggttcggaccgaagagattgcctgctcagctacgaaaccagcctcattgtactcttcacgtatcttcctcgaaatgcttatgagggctcgtccatacataaggcccgggatcactagaaggacaatgaaaggtaaaccaactatggcgagtctccatagcaagataaatccgactatatagcttccaacgaacgttgatgcgctcatcaaaaaattcggtaactgcaccaaacataaaaggttggtttacacacactaagaatatagttattagaattatgcaaagatataattaaacgtgagagatactttttcactgaggacgtcttggatgacaaaactgtcactagaaacactagtgataacatcagaagtgcttgtaacatgaagatcaaagtaacccacatcttgtcttaaaactgcccttaagtacttttctctcattcttgctgtttgtctctcccctgttcttgtccaacaatatccctctgttttttttaaaaaacgaaaaaaaatcaaatccataatattgggggtcaagtactcaagtcaactataccatagaaaaggaaaggaaacaatattattaatttttagaaaggcttaccaaggaaacaaacaacccaagatccacaagccacataaagcaaagctacagaattctgttaattacacaaaataaaaaaataaacattagtcaaagattgaagtatacatgtaaacttgtaagacttgaagaagtcaatttggttgttatacttatatgttggtaattttgttggtttattaacaaaattgtcaacggattctggacaacaaagcatccaaaaatcttgacaaaaaaaaaaaaatgatctactaagaaaacaaagtggttaattatatggcagagaagaaagagagagagagagagaaccttggagatgctttgcatgaaggtatcagtgttgaaagaggaaccaccgatgttgttcataagcttgctggtgatgagaagaacaagaggagttgtgaaaccatcaccgacggctccgattaaccctaatcccatcaacaaccaatctacaccgtccgcgtgcatgaatatcgatctaacacttccaaaacaattcatcttgttcctcccactctctttctcctcttctttacccattttcttgtgtgtgtttaaagagacagaaagagagaacaaaacgacaccttgaccttaacgaaacgacaagagtttgttactctctctctctctttttctctaagaggaaacttttttttttgcttttttctttttgtggattcctttgtttattttatgtgatgtttttgttgaatgcttcattcacatctcgtcgatcaaatgtggtagccggctgctatttatagatagggtgagagagagagggagaggacatatatcgatttttttttggtatgagagataatacccatatatcaacacccttaaactattaatatgaagtcttggatttttttaagtaatatattttaagagactctagcaccatcaaacgttatattttttgtctccactttactttgtctcatataattttttaggcatctccaataataatttctatattttcttctatttataaaagtaactctattttagaggtatcgtacttcaatagtcaaaaataaaattttctcaaatatagaaaaaaatagagatatttactttttatctctataaatagagatttctacaattcatctctattttttcctttagttttgagaaaactctattttagaggtgaccattagagtacaatacctttaaaataaaaaaaatatagagatgaaaattggaaatggtccaaaaatagcacgtcttcaagattttttattagttaggaagtttcagattgttttgcacatacttcttttaccccttagctttttcaatactagcagtaaattatttattgctaatatagactcaaatttaaagcaaatattttgatgattcaagagtgatcggttcttctgtagatgccagtaaactgtaaaataaacttgaattcaaagcgaatatttgatgattaatgggtgactggtgattccgcagaccccttaaacacactcatacagttttaataaattaaaattttgtgaaactcaggatttatagaggacactatattttttatgtattagatctattattaaaattttaaagccacagcgcacaacaataaatagagacgagtgatcatgattaatccaaatgagaaattgtttagttgtcgagcttgatcttgtgtatccgttatgtatgtgacccgcgatccttattcactaatcactggacattttagagttatgcttattcttattaaaggatgtgttccttatgtagttcattgtcgttgtttcttaaaaaaaaaaaaaaaaaaagagagacaaaagagtgaaaaataataattgcaactctcgatttgaaggagattcgcaacataaaacattttagatattccatttttctatataaaatgtacaacttcatgagttatcagttatcattcccagtaaagcacatgaatggaattgaattcgtcttcttgcgacattaaaacctgagagcaattccctatgcttggtcatgtgcgtacctatcagccttacatgcagcctttcacaacacaactcgctattttgacatcatttactatatgtgtcatatactatatccaataagtatatagttttgctccagattccgagatacggttaacatacattaataaattgcctgctcaccaaaaaaaaatacattaataaattgccgtcatatatagacttatagagcatggtgcatgcatatatactgcgttgtaaattcttggggttataaattcattgtattggagaagtactatttctgacttcgctataagaattctgttagctaagtttgcagatttacactatcctttatattaggttttgttcatctttataataggttttgtcgttttttttttctttttaggttgtaacgtcttacgtactttatttataggccaataaacatatattccaaactttgcagaataccgaaccaacagttaaacaaaaatattacgtacccatatatatcataactatgcgaaaaaaaaacaagcagaacttggcatgcatgtcaattaaattatttcatagttttgtacagggtcaattgtcactacaaaaaaaaagtcgaattgaatcatttatattgaatcacaaaactaaatgatattattttaaattacttattaataattgatgcaaatattaaaatgtaacatcagttacaatagctgatgctgttattaatttgtgtcgcatcaattaattaaaactgatgcaaatctaagttagtttgtatcacttttacatattgatataaatatataaatttacatcacttaaataactgatatgtttattaatttaattaacatcacttaaaaaatgatatatattttacatcaataaaaaagtgatgccaataaataatttattaactacataatttttttttatcgattcttaagttaatttaataagaatcatttcttttatgattttacatcacttcattttttttaattgccatctttaataacttttgtagtctaatattcttttggaaacagaatatccatttacttttttctccacgattatgaaatcttcctagaatcctaacttccctaatatctctataaatctacgtttcctttgctaatatgataaatttttctttttctttttaatataacttcttcttcttttcatcatctcttcttccctagaagaacaaaacaccaaaataatgaaataaaaactatgtcgccaaaggtaaaccgaacctacgttcgtgtaatcggttaagaagtcggagacacaagttctttcggtctctcccctaattaagaaaaccggggaagatatcgcaagaaaacgccaacggtgtacaatcttcagggtaaaatcatgagaagccacagagagatcatgagaaggttaaaaacattaagcacaatgaaaacatttttttgatgcttagatatcttgtaaggaagatgaccgtgaggaaaattatggagacatatgtggtatgtctctgtgtgattacaagagaatcaaagaacaaaagtagtttatagttttgaagtttaatttgtagtattttacttttgaactatgtacgtggtttaatttcttcaatgaatttaagattttttgtattattttatttataattagtgattattgaaaataaaacaattattaaaaaatatttatgaaaactaaaattaattcaatcggttattcagtatttgacagaaacaaattaacatccattattttaaatgatacaattatttgaatcatttattaaaactgacattaatctttacatcagtaatttacgatcaatacaaatatttaacatcacttactataatcaaaacaaatactaacatcatttttattaatcgatgcaaaattttaacatcatctatttgcaattgatacataataacatcggttataataatcgatgtaaatatttattttaagtgatgtaaattatttgcatcaacaatatataaatcatttatttaagtgatgtaattttcttttacatcaattataagtaatacaaatatttaaaataaatgatataaaatgatcacttttttgtagtgtgtattaacgagacaggcctgtcaaccagttgtatattgccattataattacactcttttatataatcttatcaacaaataattgatatgctaatttctgatgttagacgtataattcaatttattaaacagtcattgtgttggcaaatgatacctccccgtgtatcaatctgtagggattgtacgtatgtggtgacgttttttttttctgctcgtctaattgacatgccaatttctgaagttacacgtataattgaatacaataattaaaacttcttatcatgtcaagtgtaaacgttgacttctttgtactatacatatatatatgatatatataactattatatacatgaacacatatttgtaagctatacttccttttaatatatatatatatatatatatatatatatatatatcaaaaatttaaactgtaataaaatttatcataaactttgaaaaaataatttatcgggaaaattggagatcaatgaaacccaacggtcaagatgatcgtttaaaaatatgaaaatcataaaaaaattaaaaaaaattaaaaaattgttatatttaaatttaaaaatatttctaaatatattatttatatatatctttattttaggttaagagattaggttaatctatcctatacaattattcgcataagagtattataattcttttctggacacttttgtattcttactcttaccaaatttattattgtatcaaagtcttattatgtttttataggttaagatttttcttattttcgtcaattttgtttatataaaattctaaaaaaaaaaaaaaaaaaaggaggaaggtgatgtgccgttgatatagttcggtaaggaagataatcacaaaaccacgtgattatgtattcttacttgagataaaagaaattagtaattttgtttcttattctttcttcatcgaacaacattgatgacatactgtattaatgaacacctccgatgagtacttatggtggaggtgatgaaactactccaacgatgctgtagagatgatgaagacgaatccgacgtgataagatgctgatctggcggtgacgaattcaatccaatttttagtaacacaagttttttcatgcacaaaaagtttgaagagcgaccaagacttgtcttttattgatggagatacaactacgatgatgtatttttcatgttgttctacattaactacaaacatgatggtgactactttaacaccacaaccgaatataaacgtcgatttgaaccttacgatcaagtataaacgtcgatttgaaccttacgatcaagtataaacgtcgatttgaactatacgatcggatataaacgtcgatgaacgaaccgctagattttatagccgatttgaccccacgaccgggtataaaagttgatgactcgacggtcgggtataaaaccgctattataaaggcatgtccaatctcacacgtgttaccacatatgagcttgccggaggtattgagaaacagagggattagtttgtgacacaacatataatagatatgggataaaagattaaatgatcaaacatatgatgttttaatatccacattctttacaatcatagactttatcttcaatccactggcataatcccatcaagattgatttatataaatttgatttatcttttctcgagatcccaaaacatggaggccggtcgagaagaaaacactatatgtttcatgagttatatagttaatttagagaggtataaatgaaaaggtctttgaggatgtagttagggaaccacccgatataattagccaagtgtgaagtgacaataatttttggaaggaaccccaaattatccccatacatatatttaatgagatctagttacttagtaagaactaagaagcccttgaaagctttttttgccaagtagatggcttttagaaggaaacatcagttcccacaccgtgattaggatgtgtttgtttttggctggatgataagacaagggctttgggagtctaatatgaaacaaagaatctctcccctcttctctcggaacaagctcttgttttagttgtttcaaatttctcgtgagatatatagattgtcaaatttttgagacaatgtgtggctatttttgatattttgttaacagtctcttgatgattagtcctttctatccaactttttatagataagtttagtgtacttcaaggcaaaatttagcgatttctctctcttttaatcctggttttatttagatgtataatagagtatttagcctcttgttttatactcaaatttgatgatgtcatttttacggaactgacaatcatattatggaatgttgttttaagttaaatgtttgatggcgaatcactaatccttttggcttatacatttagaatatgcttcttcctttaaagattccatgtttgccaccgaagaagatagtaaaagcgactagatagtgaaccaacaaaccaagaaagatacatgatgaaagtgacatttataatccatgcttcttctctactgccatgtttataacccatgattttcaccactactaagacatttctaattcaaatttaataattaatcaatagaaaaggtacatactagacaaaatagtttattctcaaaattgtaacagtgctgacactctttccgtaatagtccgtaataggatcacctacacttaagttttggttttccaaaaataccatttaatatctgtcttacaatcattcataagggtactcctaatgagtataggccaaagaaatcttggtattttttttttttgaatctaatgttcaattatattcatagaaaaaataactagtgcatcgtgtatttgataaaaaaattaaatagacttgctaactttctcagaaaaatttaaaatgaatcaaacgcgagctcagagccaattttggaaagttgtatcataacgtctatccctcatgcctctaatggtggtgatctgatttttcacttgcttatcgatccagctgatcaattgagccgaggagtttggtggtccatttcttcgttcgttacgttctctctagacagtgtatactgtagcttgaaacgcgtagaggagaaggaagccttctacacgatcaagatggggagctgagacatgagccaaaatctggggccagcttgtcgtgaatctcgacttccataaacctttcgctagggcagcccaacagtttctaattcaccttcttcctcagccataaaaagagtaccctctcgaaatcttgatatttcataaataccacttaagtttttattttctataaaataccttaaactctaaccatattccctaaaaatataccgtaaatctaaaacagtcaaccctaatctaaaactttatattctcaacttttctgtttgtggtatttttggaaaccacataattaaaatcctctttcaagctgcaattttcgaatcatgctaacaagtggacatgtgtcgaactatgtatattcatccaaaactaaattttgaatcttgggagaaatatagttgtacgaaaaccatggccactttattagtcgaattatgtatatgatcacattactaacagcttgagcaaaagatgtccaccagatcataagagatgttggtttccataagtggcaaaaggctcatcagtccatcaccaattgcaacttggcctactagtgactatcactccctcccagccactaaacctcacagcaccataagcatcatcatcatcagctctcaacgtacatctatagtgcttacattattctactttttgttttgagacgtaactcgtaagagattaaatacaattgttattttgaggaaatggattatacaacgtgattaattaatggatcatttacatatattttatcaaaattattatttctgaattcataaatattgactagccgtttaattattttataaaactctaaaaacgtaaatatttaagatatataaacttgttttttcagctattaaaaccacataaacggatacgagactcggactaattttgtatatgtatccacttaacttaactattaaccaatttaattactaatttgtatagaaaaaagttttataaacatgacttttggtttttcaaaattctaaaattcaatttgcgcactcaaaaccaaaatcgtgtagtagaaaaatttacagcattcaactgattttagtattttacaactactacataaatagcagatactgtatgtatcaattagtactaatccagtgattcaaccgtttgtaaaaacaatatataaacaagtatttaacattttttgtttttcttgtgtgtaacatgagattgttctttcttattcttaagcaagtccccaagagggtttagttgatccattatttttctttggtctgttctttcttgttttttgtttgtttcgcatgcgcacactacatagcacattctcttgtttggcatgaagtagtatgaaacaaagaaagagaatataaacttttttggttactaataactatgtccaacaaatttcttttgaggagacgtttaatctcttcaacgtgttttccattatatagtttacaatagtcaaattcgcaattaagtcctagcatcgaaaaaaaaacattgagatggtgggatcgacgtggcttctatgtgaatcctatgtgaatttatttgttcacagattctccaagaacagtcccatcaactcttttgtttggccttttttcgtatggttgtatatatacacattttgataagggaatatattggacgatagatagtggaacacatatttatgcattccatagcactttaaaatcttaggtttctgtccaataacatttgtattttttttctgtagtgaaatatagagtgagcatgagctccttggttatctctcgatgtgttatggtcgttcgaagtcgatgttcaatggtatttataaatctattacataaccaaaacattcgacattaagcaatcggcaatcctcctcatcctccaaaacctccattaggagcttttcctaattcgtcgcctaaacctagtttttttcttggcggaaatattaattctcaccttcctcatccattctctataattccttttagtgaatattaatgactcgcatgatcatgttttcaagttgtcattcacggacgagacctagggaactcaacatttttctaccatttcatcatacagtattaaagttttatgggattttaattcaaaatcaactgtttatgactggatattttataacttactttagaacacattccaatattctatgttgaattctaaccataccctctcgagctgatgatttttgtcaaccatccttgaatttaatcttacatgcgaaataaagcggcattttctttcactttttcaattattttgttttccctaaatattggttgtatatgtatgcaaaaacaatgttttacaactcactgactaaaaaagaaagaaaaaacaaaacaaaaacaaaacaattttcaacaaaagttttaataactgaggaatctgagaatattcaaatttttatttttattgaaatgtacaattcatcattaataactaataaaaatgaagaaaaaaatctgaaatttatatctttttgtaacaattttgttctttctaaaatttttgattaataaggaaccgaggatttggatttataaacttatttgctcttcagttataacaaaatcaacaaaattttatatttttattctaccagatatatcatataatggggtaacactaagtattcgtttggggaaataaactttaaaaaaaaaatcgaatttacaagttcttaaaaatgtctaattaatttcctcaatatatttgagcttaatagtttgggcccttatcgatatgggcctaaaccctctcacatagacgcgaacagttttagaaaggaaccgagatatttttttcagtagagagagcttgaagtgaacacacgaagaaaccatggcgggaatcgatacgcagaagcagcttctctctctgatccgcgatttcacctctgaaagatctcgtggaggtaagatacttcatacattttgtacttcttctggatgtttcgcgaagaagaagaagtcggaaagcgtgtagtagaaattcgaaacaaaatcgaacagatatacattgttggttatttctagtttttggtgtaatcggagaatttatttgttctgattgtttgtggtttttcaaattaagagcaaagagttgttggattgaagaaacggatcgagattttacaatcggaagttgaagcagcgaattcagaagttgagcatgcgaagcgtatcaaagaagtagcggaagaggagcttaatggttacgaagttgaattgtctttgaacgattctacgattcaatctctcgaggttttgatttaattggcttttgggatgaataagaagttttggtgtctaatgagattgaaactgtgttttatgtttaatttttaatcacatgctaggatcagtcttcttcaggatgaagtaactactattggcaatgaagttgatgctcttaaggtttgcctacacattgtttctttgagttttagtgcttggttggttgatttcttcgtttgacattctggaatttttgttgatgacttgatggttggtgaaatatagaacaaggaagggttactcaggtgattttgatctttctaacgtcttaataagttatagttcttgatttatacctaggttatgtttggtaaattgtttatactctttgtgatatacagagatcagtttataagccaaatggaagaactgaacaaggagataaggttattttctattctttgcgttttcatcttatgatgttgctacacatcttaagttgcttggttggtaaaagggagttccagaaaacagtagattcgagtttggccgatgaggatagtactggcataaccgcaagtgagtagctaatgtttgcagtttactcttcttgtctgatttttcactgtgttattaagagatgatggcttctggatgagtttgtaatagcagatatcaaagcttttgaggattgctctggagatgatttagaagctattaagaatttgctatctgatgtacattctcaattggcgaaagaggaagaaggatacctggctgagcagaagatgcaagaacaggtaaaatggaccaggaccaagttgcttgaatgttgttactttgctgctcctaataccttttctagcttatcaattccctgttttttagattttgtttattcatactatgaagagaagaaatggggatcaatatcggtttctctatatgtagctgcagaaggagtttgatgagtatgagaaaaaaatgtcactcattgaggccataacagagaaaacaaattcagttcaagttcttgctaaatatccttaattccgcttgctagtgaaacatgatttatatactcataattacagttgcataatcatttatcacattttcacctgctagttctgttctttattgaggcggcatgtactgtactctacagcaaggcaattttttcctaggatagaaaagcaagccagtgcttgtacttttcaggttgacttgccattctttcaaaagaatagttcccttgacagaaaacaagcagacgtccgagttggaacagatattggcttcactcggggaggagctgcaaaagaaatgccgatgtcaacaatgccaagcagagaatttggaagttttgagcttacttcttcagggagatcaagtatgttgacccttaccaactatttttctcatttctatataccattttcgacatgccatggaattactggaaacaaatgcattaatgtttttatggtattggtcagcatgatgtatccgtgttcagatatctctctacctgtacaaaaaactatttgctgtaccaaaaccaatgaaccctaaccgaaatctcaagagttaagaaatatagaaagcatcaatcacatatagacctaccagatttctcttagacaggttgaagcagctagtgtctagttcaggctcataaatagatttttgtagtcttcttaaacaggatactcaggaaaagacatcatatatatatatagattctgatctattttacctggaattctcatcctgaaagtatgtaggcatgtccgcatctgtataggtaggtactttgactgctacgataatagtgaagagactgatgatgatcagagaacccgttctcacttggctatgaaagcgaggagaatctgtcaacatgactaagattgcattgtcaaagtttattgtttctgtaaactttgatatgtacaagtttttcttttatccattgtaggataaggaggtgtcttagttaaagccaatctcacttgtggttgcttgaggaaagatttatttactcggtcccaagatggtaagacattgacttttcacctctcaggatctaagaaaccacttgtctagaaacttaaccaaacgtgcaatgatgaaggaaataatactagtccgtagctagtttcatcaacagtgatcatgttctttggttttaaaaggtatagacgcaatgaaccccagcattatttttacaccaacaactaacaaacccaataatacgtctacatggtaacatgcttcatgttttaggcttgtgaaacatatgtgaatttataatttatacatatctgacctttctctgaagactgaccaatgagaaataagagcctgtgggaccttttgctaacaaggaagcgtgtgtcccactttctacaacttttcctttgtctaaaacagcaatcgtgtcgcagttctggatcgtgctaagcctatgtgcgatcacaacgcttgttttccctaccatcacatgttcgagggcgtcttgcactacacgctctgattggctgtccaaagcgcttgtagcttcatcgaggagcaaaattgatggattctttaaaatcgttcgggcgatagctatcctctgtttttgaccaccagacaattgtactcctctgtctccgcagtacgtatcatagccgtctgatagtgatgtaatgaactcgtgagcgtttgccgtctttcctgcctcgataatctccgactcgtcgatcttgttagatgctcgtccatacattatgttttctcggattgtccccgcgaataatgttggttcttgactaaccaaagacatgtgttgacgaagtgatcttagatgatacgaccttatatcacggccatcgattttcacaataccttgtaacgggtcatagaaccgttcgattaacccgattacagttgacttacccgaccgacttggacctacgatcgctgtcgactttccctcgtggatctctatggagaagttgttgaatataaccatattaggtcgcgttgggtaagcgaagtccacattgagaaatgtgatttggccctttattttttctaagatatacccatccggattctccggctcaatggtggttcgacgatctaacactgtgaatactgagtcaactgaatttgagcccttggctagatctgtcgtcattgtcccagcttcggcaatagcccggcctgtagtcttaaagatcaaaaataactcaaagaatgcttttgataccatcttcccatcagcgattaatttaccaccataccaaaaattcaaagctgaggtgcacgttataaggctttgcgtagtccccaacataatcccagctaaccatgattggcgggcactttctcttcgtggaccttcttgaactctctcgagtaatttcatgatccgttcttgtgatgagaaggttgtgatggttcggatgttggagacagcctctgcagctagtttactgctttcatcttgggcaatgatggcttttttcgacatgttcttgagcagaacacgttgaatataatagcagacaataattactggttgtactgaaatcatcacaatggtgaatctccaagcgatgaccaaaccaattgtgcaagctaccataactgttgatatggtttgtaccagcaatgacattctttcaccaacgagcgaccttacctatcatgacaaagcaattcaagatcaataaatggtaaatatatttctcattgaaggtcaaattaataaggcagaaaatataccacgttagcatctttcgctagtctggagcaaattgcaccacttgagttctcttcctcatcgaaccaattgacttcaaacgttagtatcttcgagagcatctgttctcggatacgtttagtcaggtattctcccatgtaggaaaaactatattgttgactgatactagtaaaaaaagtgaatagagctagaccaaaaaataataacacgtaaattcttgtattctctttgatctgctcatggttggttaggaaaaataccgatatcattaacccggacgaatatgcgtaaattggttgtacggccccacctaaggatgcacttaagcaaccacataatgcatgtttccactctggtctattcattgccatcaatctcttaaacgatggcacaagcggcttcttatcttgaggaatcgagtcagaaagattcgtaacaatgcttgaactcatgctatgagccaagtctcttggattataatccaaatcgtttcttaaactcgagactcggccctctttcacacctacgctagtgttatcacatgattcttcattcttcatttgttgtaagcgaactagagaagtgtatttaccatctatctccatgagtttgtcgtgcgatccagtttctacaatgcaaccattatgtagaacacatataatatcagcattacgaatggtagagagacggtgggcaataacaatagttgtacgaccaactgatgcattgtctaaggcttcttggaccaccctttcagattctaaatccaatgcgcttgttgcctcgtctaggagaagaattatcggtgatttgattaacgctcgtgcaattgcgattctctgcttctggcctcccgacatatgcactcctctctccccaaccttttcggtttacacaaaaaccaaatatacgttctcattaacaaactaaacacaaaaaaggctttaaaaatttactctaaagatatgagtctaaacctgagtttggtaaccatgaggaaattgcgaaataaaattatgagcatttgaggccttggctgcttccactacttcatcaaaggatgcgtcctctttaccaaataatatgttctcctttatcgatgtggcaaagagcgatggctcttggctaaccatacccatttgcgatctcaaccatttcacttgcatattattaatggacacactatcaatgagaatatcgccttcgttcgggtcatagaacctttgtaaaagcgatatcactgttgattttcccgatccacttccgccaaccagagctacagttttccctgatggaattttcagacataaatcatcaaagattagggtttcgggtctagacgggtacttgcacttcacgttgttgaattcaacttctcctcttatagtctccaaaatatgaccattcaagttgtctgaatctatatcagggactctttttatcattttttgaatccgttcccctgccacaaacgcctcggagaaatatttaagattcgacaatgcttgaccaagtgctctgcataatgtaaaataccaaatatcaaaactaagagatgtttttttttttgtgtgttaggaaatgccaagagacttaaacttaaatacttacgtgccaccaaaggtgacgcaaactgtgactgtggagacagtaccacctttgtagccatagttcataaccatccgacttccataccaagtcaagaacccccatatagcataaactataccattgctcccaatagcaattcctttagctagcccttgtctcaaccctagcttcaccgacccttgaagcgcatctgagaacttttctatcatcttcttctcactaacaaatgcatagacggttctaaccgaagagatggcttgttcggcgatagaaccagcttcattgtactcctcacgtattttcctcgagatgccaatgagggctcgtccgtacattagtccagggatcaagaggagaatgatgaatgggaagcctacgattgtgagtctccacagcaacatgaaacccactatgtagcttccgacaaacgcagatgcattcatcaaaatgtttggtaactgtttgaattcaaaatcatcaaaaaaattgtttaagaacaagaaatatgataaataaaaattgaaaaccttttcactgaggaagtcttgaatgacaaggctgtcactagagacactggtaataatatcagaagtgcttgtgacatgaagatcaaagtaacccacatcttgtcttaacactgctcttaagtacctttctctcatttttgctgcttgtctctcccctgttcttgtccaacaatatccttctgttttaaatattaaacccatccacaaaattaaacaaaatttgttatattgaggtgcaccaaattaatattttaatttgataaaaaaaaaattgaaagaaacacacttaccaaggaaacatatcacccaagatgcacaagccacataaagcatggctagagcattctgttagttacaacgtgaaaaaaagaaggaagatactatattagtactctttcctatatatttaagtaatgtaattgatatgtggggcaatatagtaatcgtaatcttactacacgttgagttatagtaagaagtttaagattatgtaataaaatatttgggttttcacatttctcttattgctatccctatttaacatacacatatggacatatatgtaagacgatagttttttattttttgaaaaagtcataagccgatcgttttaattaagaatcccaccatgcttggtctacttggtcatgtctagttttgattttccattttaaggtaaatttcttggctggaatttgtacaactctctgtcatcattacatgagaaaccacttgttatgtctacagtctactcattggaaaaaaaaaagtctactcatttaaatattgtaatttagttaattctatcataattgttggattattgctagtttatttggctaaaataatctaactacacccagtaagccaatgttcaattgcctttttgacccgcccttcataatccagtctatctgcttcttctttgaatgtttggtagtaactaatttatgggaatgtgagaaatatttttatttaaattggctatgaacgtattaaatagcaaaaatatatgtattttagtcatcattttagagattagcatggctctcactttcagtctcgaactcttgcttaccaacttttttagttatagaatataatatcctatggaaattaaactaaattctttgaatttaaattttaatgaaacaaaactttttgtttatccccttaacctacaaaatcaatttaaataacattaaatgaaaaaatagcattgcttaatttgctttactctttacaactcaaagaatataaaattatataaaacaattcatgtaatatttaatttttaaaatactataatttaaatatatatatatatatattgtattattgtatataatcttatatacttaaattagtattatgatcctacttagagagaatataaaccaaaacaaagagaaaagaagagagatagagagaaaggaccttggaaatgggttgcatgaaggtttcatcgttgaaagagaaactaccgaagtcgttcaatagcatggctgtgatgaaaaaaagaataggagtgatgaagccatcaccgacggctccgattaaccctaatcccatcaacatccaatctacaccgtcggcatgcatgaatattgatctcatgcttccccatgtcttcatcttcttctctctttttcttcaagaacaaaagattctctcttttcatttatatttgtggatttttttcaagtgtaatgttattttttccgtcttcctgattgttctatatatagtagccgagacagagcgacttcaccgaaagtgatatgatatgatatatataatattatttgttaacatctgttatatacctgcagtacctattttaattcggtaaaacttatacaactcctcgcgaagacgcgaaccaggctcagtaacctagctacaagaaaacaaataaaataatatatgctgagtacttcaaggctttaagctaataaattagttttcaaaatttaatttgtgtatgaacttcaaatactttcgtgtattgctgtttctttttctttgataaacaattaggttaatttcttcattaattcacaatgcttttgtaaagatattgatttgattttacgacataacgacgaacgtcaatatcaaaatagtttaaatttctcataccatacaatttttttttttttttaggaaacatacttatttgagtttttattgcatactttcgcaaagttaaagggacttctcatgatttggcaaaatgaccgcaatttttcttgtggacgtcaccagcgactactcgatttaaaaagatagtacaggagattgtttagcatgttattctagactcaaattttatgatctaatttttatagatgtctttctcgcaacattacaaagagaacacggcaaattacgtcggttaatattaagtgtaacgtcagttatatataagctgacttaaaacttctaccgtcagtttggagaccgtcgtattattgtatgacgttaatattgtctcgctttaaagtcaattacaaagaagctcgtaaaagttcttaagcataagctaataaatcaaataaacagtttagactctgatttatgtagtggacatttattttaatggaccttcatatattaaaaattttacgttggtttacgaagtgaagctggtaaatcgacgtcatccattttctgtagtgaaatcttatatggacaatcactctgggagtgttgttaaaagtttaatgtttgattggaaacaatagtaaattgctaatctctttagcttatactttatgaaagtgattgctaatctctttagattatgctctttcttttaaagattccatgttgcccaccaaagaagacagtaaaaacgactcgatagtgaaccagaaaaccaagaaatatacaatatggaagtgaaatattataatcaatgcttcctctctaccaccatgtttataattccatgttttccactgccaaagtgtgatttctatcaagagatttgtagttcaaagtcttataattaatcaatagaaaagtacgtactcaacaaaatatgcaatacattctataatttcaattacaataattatttctgaaaaaaacgagaaacaataaaaggatttcaagtagtccgaactcatctagaaagctagagaagacgggtcaatcaacaagacaatgcatcatcttgatcaactccgcgcaatcagtctcaaaatctagtctctcgatcccctcaaaaaacatggtttaaaaactctaaataaagagagacaaaactagggttggcaatccttccaagatccatccacttgaaaattttcatgtgttatggaccttaccagttgaactattacatcggcaagttaattgagcttccttccaagccttgaaatcagatatagtatgacttgaaatatctgatggctcacgaaagtccatgtgagatatcacaaatgaacttctttgtccgcttacaaaatttcaaaaacctgatttttttccaaagataactaattaaaaagccgatgagattagagataagacccacgtttatagtgaaagatgacatttaaataatgtctgcttaactctttcctcatatcctccacatcttaggtaatatcacgaagaaatcatctatctcttaagtctcatgtcatgtcaatatgctattttcctcgtatgctgaatttgtcactactgaagttcttgctcgatataaatgttatttcttttcccaagtggatgacatgacaaaagtgacaacgcaacgtagaattagggcaactatctattttactgttttagttatatagttgttatcatagtttttgtaacgttctaaccgccactatgacccctttaaaacttgtaaaaaatatatagaagagttacgaaaattagaacttttccaaacaagaaataaaaattaataacacacccaatagttgtacgaaaaccatttccgttaaatcattactagaactttgtttattttactacaaactaaattatgtaaaaggtggtatctttgagagaaatattttgaatttattagtgtatacgaaaaccatttccactttattagtcgaattatgtataagatagtcgcactagcagattgagaaaaagatgtccactggattattgggagtgatcggtatgcactttagtttaaaagtcctaaagtcctctaaatttactaatggattttttcaattttgtattcatgttaattacgtctggttaactctttcctcatatcctccacatcttaactaaagttgtatcacgaagaaatcctctatctccaaagtgtcatgtcaataagctattttattgatgagacgtttaatcagtttaacgtgttttccattatatagtcaatttcagtttaacaatagtttacaatagtcaatttcgcaatttaactcttagcatcgaaaaaaataactttcagatggtggattcgacgtggctcctatgtgaatcctaagaacatatatttgctcatagattctccaagaacagtgccatcttttgtttggccttctttttcgtatggttgtttatacacattttcataagggaatatattgtacgatagataggggaacagatatatatatatatatatacattatatttttgtgggatttatgcattccatagcactaaaaaaatcttttgtttttgtccaataacatatggagtttttctctatcaaaaatcattttatactttaaatatatcataaatatttaaatatatatgaccctgtaattaaaatttatgctttaaatgtatcatttcatactatattttctctattagaatatagggtgagcggagccagaatttttgtttacggatcataaatatttaattatttttatttaaatataatatgatatgatatatttaaagtataaatttttaagaagagatgaactacaaacaaaaatctgaaacaaaatgtctaaaacagaagaaacaaaattaatatgtaagaagatgttagaaatttttatccattttgaaagaaaaaaaaaataaaaatggaaagaggattaacatttaattgaaaaaatgaaaatgcatgggtcaaaggcatggttctagtttctaccatcataaaaaagaggcatgattctagtactatttatgggggtcattatgacaactttaaagaaaaacatctagaaatcattatctacgttataattaaaaaattataaatgttatgggggtcaactgacccccttgccaatacactagctccgctactagaatatccctatgctcctcggttatctctcaatggatcatgatcgtttgggttgatgtacaattgtatttataatttatgacatacaaccccacaagttttttaggcctgttattaaaaaaaaaacgtaaatttgaactattatcttttgaaattaaaatctattgtttttactaataggacaagaaaatacttttaaaatgcacgccgattatattggctatataatctatggccgcacgcagatgcttcatcaatttttgtccagggcggctatgatgacataccataacgtttgctactaactaatctccttcatcctctaaaacatcctcccactggagctatcactaatttgtcgactaaacctagtttcacattcgtcatccactctccataattccttttagtgaagaagattcacctgatcatgttttgaaagtagtcattcacgtcaatcaaattaagtttcatgagatttaactgaaatatgggttagatacaattttcatgacgtcaattttcataaatacagtttcgataaccctcgataatttgggcctccataaatatgggccgatatttctaatttttcgcctctctcatagacgcgaacagttttagaaaggaaccgagatatttttctcagtagagagcttgaacacacgaagaaaccatggcgggaatcgatacgcagaagcagcttctctctctgatccgcgatttcacctctgaaagatctcgtggaggtaagatacttcatacattttcttcgttttctggagatttcgcgaagaagaagaaatcggaatgtgtttaatagaaatttgtacagattctggagaagatgatatagatttccattattttgagttttagttgttgattgtatgcgattttgatcttatcagtctctgtaattggagaatttattgttctgattgtttgtgatttttcaaattaagagcaaagagttgttggattgaagaagagaatagagattttacaatcggaagttgaagcagcgaattcagaagttgagaaagcgaagcgtatcaaagaagtagcggaagaggagcttaatggttacgaagttgaattgtctttgaatgatgctacgattcaatctctcgaggttttgattttctttggttttacttgattttctacgattcaatctcgatgaataagaagttttggtgtctaatgagatcgaaactgtgtttcgttttttttttctcaggcaaggattagtcttcttcaggatgaagttactactattggcagtgaagttgatgctcttaaggtttggctacactttgtttgttgaaattgttaatgcttggttggttgatttcttcgtttgatattctggaatttttgttaatgacttgatggttggtgaaataaagaacaaggaaggattactcaggtgattttgatatttctaacgtcttaataagttctagttcttgatgtatacttaggttatgtttgttaaattgcttgttctctttgtgatattcagagatcagtttataagccaaatggaagaactgaacaaggagataaggttattttctattctttgcgttatcatcttgtacctggtgtaacacatctaagttgcttggttggtaatagggagttccagaaaacagtagattcgagtttgagcagtgatgatggtattggcattacagcaagtgagtaacgaatgtttgtagtttactcttcttgtctgatttttcactgttttagtaagagacgatggcttctggatatgtttcataattgcagatgtcaaagcttctgaagacggttctggagctgatttagaagctataaagggaatgctatctgaagtaaattctcaattggcaaaagaggaagaaggatacctggcagagcagaagatacaagaacaggtaatgtaataggagtcaattgtaaactttgctgcttcaaatatcttttgctagcttatccattccctgttttttagattttgtttaatcattcagtgaggagaacaaattggtatttgataatttggtgtttctatctgtagctgcagaaggagcttgacgactatgagaagaaaatgtcactcatggaggccattacagacaaaacgaattcagtgcaagttctcactagatatcctttaattctgttagctggtgaagcataatttataaaatgataattacggtcgcagtaatcatttatcacatttacgccagtgcttgtacctttcatttcgatttgccattctttcaaaagaatagtttccttgacaaaaaacaagcagacttctgagttggaacagacattggcttcacttggggaggagctgcaaaggagatgccgatgccaacattgcgaggcggaaaatttggaagtcctgagcttacttcttcagggagatcaagtatgttaacccttacaaactatttttttctcatttctaaataacttttttgaactaccaccaagatactggaaccaaaagcttttacattcgtatgttatgggcttatctggaaagtggaatgttgacaacggtctggtgtatccatgttcagatattttccgtttctctagttttttttactaaaacctatttgaaatctgttagtgtaaaccttattacagaaaccaataaaacttttaaccagaatttcaaagttaagatagaaggcatctatcacatgtagacgaaccaagtttctcttagacagattgaagcaggcagtctctagttaaggctcataaatagacttttgtggtctattgatcatctagttttcactgatactgctttgtaaaacgtatagtcaagaaaagactccgtatatatgttctgcttcattttagctggaattatcatccttaaagaatgtagacttgtgtttgggtagctatgattttaagaagcatactctctgtatatgagttacctttctaattttgggcacttcgattttaccttattatatactagtgatgagactggtgatgctaaaaaaactggctctcacttatctgtgtgagggtagtatctgtcaacatgactagattgtactatcaaatttgtaatcttagactaagcttttcgtttctgtttgatatttccctgcaagctttcatgttgaaaacattgttatattttgcaggatatggaggtgtcttagttaaaagccgatctcacttgtggttactggggaaaagattaatatactcgggtctcaagatggtaagtcatttactttcacctctcaggatctaagaaacatacttgtctagaaattttactaaatatgcaatgatgaagctaacaacagtagtccctagtgtctataacactgatcacgttcaccggtttaaaagtagaagaaattacctatggtcttctttacattaacaactaaaacatccaataacaacacaactcatataaagccaatgcaaaacttccaaaatgagaacttcatctttacattccaagtccttgaaacacatcccaactgggaaatgtgttttaactcatagcaacttaaacagtcaattacaatattttttcttttttttcactctagtataacacagaacaacactaaattcaccggttttatttacgtcacttgtttgattatttccctgaagtatattggaattttaatcgagtaagtaaagtaattgaactttatttgaaagaatacatttacgtgacaatgtgcttcatgttttgcctgaaaaagagtattttatatgaaaaaatctgactttcaacagagagttctctggatacctgccaatgagaaataagtccctgttggacctttttccaacaaggaagaatgggtaccagattcgacaatttttcctttgcctaaaacaacgatcatgtcacagttctggattgtgctaagcctatgtgcgatcataatgctcgtccttccaaccattacacgctcgagcgcgtcctgcaccacacgctctgatttactgtctagagcgctagtagcttcatcaagaagcaatactgatggattcttcaaaactgctcgagcaattgcgatcctttgtttttgaccaccagacaattgtactcctttgtctccacagtttgtgtcatagccgttagatagtgatgtgatgaaatcatgagcgttcgctgcctttgctgcctcgataatctccgactcgtcgatcttgtcagatgttcctccgtacataatgttctctcggatagttccagcgaatagcattggctcttggctaaccaatgatatgtatttacgaagcgatcttagatgatacgaccttatatcgcggccatcaatttttacagtaccttttaatggatcatagaaccgctcaatcaaaccaattattgtggatttacctgacccgcttgtacctactatcgctgttgacttcccctcgtcgatctcaatggaaaagttctcgaatataaccacatcaggtcgtgttgggtaagcaaagtccacattcagaaatgtaatttgtccttttatcttttctgcgacgtatccatctgggttctttggctcaatcgttgtgcagcgatctaacactgcaaacactgacccaactgcatccaaacccctggctagatctgttgtcatggttccagcatcagcaataacccgacccgtagtcacaaagatcagaaatatctcaaagaatgcttttgacactatcttcccatcagcgattagtctaccaccataccaaaaattcaaagccgaagtgcacgttataaggcttcttgaagtccccaacacaatccctgctaaccatgatctgtggacgctttctctccgaggaccttcttggaccttttttagtagctttatgatccgttcttgtgacgagaaggcagtgattgttcgtatgtttgataccgcctctgccgctaatttactactttcatcttgggctttgcttgccttttcggacaagctcttgagcagaacacgttgagtgtagaagcaaacaacaattagtggttgcactgaaatcatcacgattgctaatcgccaagcgatgaccaagccaattatgcaagctatgattactgctgatatggtttgtacaagcaatgacatccgatcgccaaccatcgatctcacctatcataaaaatgcattacaacatcaagaaatggtaaaaatattgttttgttaaagttcaaataataatagagcggaagacataccacattagcatcttttgctagtctagagcaaattgcaccacttgagttatcatctatatcgaaccaattgacctcaaatgtcagtatcttcgagagcatctgttctcgaatacgttttgttaggtattctcccatgtatgcaaaaccgtaatgctgactaatattgaccaagaaagagaatatagctaaaccgacaaataacaacacatagatccttgttttctccttgatctggtcatggctcgttaggaaaaatactgatatcactgatcccgcagaatatgcagaaactggttgtaggaccccaactaaagctgcacttaaacaaccatataatgcatgtttccattctggcctattcatcaccatcaatctcgtaaatgatggcacaagcggttgattatcattagggatcaaatcagaaacatttgtaacaatgcttgaactcgtgctaccaatagagttatgttgactatacttaaaatctttgctcaaactcatgacttggtcctttgtcacacttacattgatgttaacatttgattcttcattctccatttgttgtaagctgactagagaagtgtattgaccatctattctcttcaagagctcttcatgagatccagtttcgacaatctgaccattatggattacacagataacatcagcattacgaatggtagagaggcggtgggcaataacgatagtggtacgaccaatagaggcattgtccaaggattcttggacaaccctttcggattcggagtccaatgcgcttgttgcctcatctagaaggagaatttttggtgacttgattatcgctcgtgcaattgcgatcctttgcttctggcctcccgacatttgcactcctctctccccaacctttttgtttacagaaagcaaaacatacatcaatgttttttattacataaactaaaaaacaatttgttcttatattatgaatataacctgagttttgtaaccaagagggaactgagaaataaaagtatgagcattggaggccttggcagcttcaactacttcatccaatgatgcgtcttctttaccaaataatatgttctccgttatagatgtggcaaagagcactggctcttggctaactagacccatttgcgacctcaaccaattcacttgcagcttatcaatggacacaccatcaatgagaatctctcctgctatcgggtcatagaacctttgtaaaagtgatatcactgtcgatttacccgatccgcttccacctacaagagctacagttttcccagctggaatttttagacataaatcgtcaaagatagtggtttcgggtcgagacaaatatgtgaacttcacgtggttgaattcaacttctcctttcattctctccagaatctgaccttcctttttgtttgaatctatatcaggaactctttttatcacttctaaaatccgttcccatgctacaaatgcctccgagaaatacttgagattcgacaagctttgaccaagtgatctagaaaatgtaagataccaaaggttaagacaccacgatagtttcttttgtgtcaagaaaacaaaagaaaattaaacatagttacttacacgcctccatatgtgatgcaactaatgactacgaagacagtaccgcctttggagccatggttcataaccagccgacttccgtaccaagttaggaatgcccaaatagcatgagtgacaccattgctcccaatggtgattcctttagctaacccttgtctcaaccctagcttcaccgaccctctaagtgcagttgagaactttcctatcattttgttctcactaccaaatgcgtagacagttcgaaccgatgagatggcctgttcggcgatagaaccagcctcattgtactgctcgtgtatctttcttgagatgctgacgagggctcgtccatacattagtccagggaccaagaggaggatgatgaatgggaagcctacgattgtcagtctccacatcaagatgaaactcactatatagcttgcgacaaacgcagatgcattcatcagaaaatttggtaactgcttgaaataaaaaaatcatcaaaaacaggttttcaaaaacaaaatgatgtataaagatgcaaagttttagaccttttcactgagaaagtcttgaatgacgaggctgtcactagagatactagtgataacatcagaagtgcttgtgacatgaagatcaaagtaacccacatcttgtcttaacactgctcttaagtacttctctctcattcttgccgcttgtctctcccctgttcttgtccaacaatatccttctgtttttgtttttaaatataaacccatccaaaaacttatataaaaattagttatgttgaaatgcaccaaataagtttggatgtttttttcttggatttaaaggcttaccaaggaaacatatcacccaagatccacaagccacgtaaagcaaagctacaacgttctgtttaagaaaaaaaaaacattttgttaaatagccaatgtgcaaaagaaaattctataaaagttttttttttttttgtcgtctattataacattagagatatgtattctaatcctattaaaatgttggatgtgatatttaataaaaatgctagatctggatggacatcctgatgaaaaaaacaatagggcctaagatgttaagcatcatgccatggtaggtttactttgtcatatcgacttacaaagaaaagcaaggaaaaaaaaacagaaaataaagaccatagaagaccttggagatggtttgcatgaaggttttattattggaagaggaagtgccgaggttgttcagtagtgtgttgaagatgaaaactacgacaggagtgatgaagccatcaccaacggctccaattaagcctaatgccatcaatatccaatctacaccgtccgcatgcatgaatatcgatcttatacttccaaaactcttcatcttgtccctcccactctctttttcatcttctttacccattatctcttttgtttagagagaaagagagagaccaaaacgacgcattgacctttgggaaacgacaaactacagttttatatagcagccgggacagagggagatcgtaggccttttattatgtatgaaaattaagttattataacattggtatcaatacgtgaagataattaatgtactagtgtagaaaagtttagcataaataaaatatttctagcattgagttaatttttttaaaaaaatttggtcataacaaaaatatgttagatttgagagaaaaatgtttattagttacacgaagtataaaccaacacatcgtcacacgtacatattttaaaaatgtctcgttagctacacgaagtattgatatcacatacggacatacacgaacaaacataagtcatgttgccaacaccataatcatcctactttgaccagaaccggcattgaccagtgttgaccggtgttaaccgatgttaaccaacattgaccgatacattctactttgatcagaaccggcattgaccagtgttgaccggtgttgaccgatgttgaaactagacacggaccacggagcaaaactacatatgttcaaagtaaagataaaagtaacctgaacaaacgaatgaccatactgcaataccgaggattcgtgttattcacggcaggtttttatttttactcgaccgtttgatttttttcttttcgatcgatcacactttcttcggattttagattttttttccggcgattgacgtaccctttaccgaggcacaccattaattaaagaccaatccgatcattttaaaacaaaaatattgtttaatcatacatgtcatattgacgttagctgtctttacgtattatcttatggaaataattttatataacatcaaatattgatctagtgctgactacaataatagattgcagcgtacttatacctcacatggcctttttcaaatcctctctataacattcacaaatcaactactaaacagttttaataatcaaagaaatggtttcataaaaatttgtgcaaaggacttatttaaaaatattattcattttatttgcaaaaatatgaaaaatatgtaaatgagtttagtctacaattgatagtgttccgttataattaatttggtgttttcgagaatagagagcataggtaggtaatctagcaacttaggcaaagagacatattgatacaaatctaactttcaagttcaaaagagagttctctggagactgaccaatgagaaataagctccctttggaccctttgccaataaagacgagtggtttccacattcgacaactgctccattttctaaaacagcgattgtatcacatttttggatggtgctaagcctatgagcgatcacaacgcttgtcctcccaaccatcaaacgctcaagcgcgtcttgcaccacgctttccgattggctatccagagcgcttgtagcttcatccaggagcaacaccgatgggttctttagaaccgctcgagcgatcgcgattctctgtttttgaccaccagacaattgcactcccctgtccccgcaacatgtgtcatagccgttagatagtgatgtgataaaatcatgagcgttggctgcctttgctgcctcgataatctccgattcgtcgatcttgtttgatgctcctccatacatgatgttctcacgtattgtcccagcaaataacgttggttcttggctaaccaaagctatgtgttgacgaagtgatctcaaatgacacgaccttatatcacgtccatcgattttaacaataccctttaacgggtcgtagaatcgctcgatcaagctaattatagtagatttacctgacccgcttggacccacgatcgctgtcgacttaccatcttcgatatcaatggaaaagttctggaatataatcacatcaggccgtgttgggtaagcaaagtccacgttggaaaaacttatttgtccctttacttttttagggacgtaaccgtctgggttctccggctcaatggttgtgttgcgatctaatactgcaaacactgacgcaaccgcatctgatcccttgactagatcttttgtcattgtcccagcttcggcaataacccgacccgtactcgcaaaaatcaaaaatatttctaaaaattcttttgacatcatcttcccatcagcaataagtttaccaccataccagaaattcaaagctgaaacgcacgttataaggctttgtgaagtccccaacataattcctgctaaccacgattggcgggcgctatctttccgcggtccttcttggaccattttaagtaagttaatgatccgttcttgtgacgagaaagctgtaatggttcgaatattggagacagcttctgcagctagtttactgctttcatcttggcctttgatggcatttctcgacatgcttttgagcagaacgcgttgagtgtagaagcacacaacaatcactggctgcaccgacatcatcactatagagaatcgccaagagatgaccaaaccaattgcacatgtgatgctcactgccgatatagtttgtacgagtaatgacatccgatcaccaaccaatgatctcacctatcataacaaaccattccaagatcaatacatagattagaatagattgttcattgaagttcaaattagaaaggcagaagaaataccatgttagcatctttcgctagtctagagcaaattgcaccactcgaattctcatctttgtcaaaccaattaacttcaaacgttagtatctttccgagcatacgttctcggatacgttttgttaggtattcgcccatgtacgcaaaaccataatgctgacttatattggacaagaaagtgaacaaagctagaccgacaaataacaacacatagatccttgttttctccttgatctggtcatggcttgctaggaaatacactgataccattgaccccgaagaatacgagtaaattggttgtacggccccaaatagagctgcacctaagcaaccatataatgcatgtttccactctggtctattcattgacatcaatcttttaaatgatggcactagtgacttcccatccttaggactcaaattaggaaaatctctaacgatgtttgaactcgtgctatgaataaattcttttggactatacttcaaatctttgcttaaactcgatgcttgaccctcttccacacttatatgatctgattctttattatccacttgttgtaaacggactagagaagtgtattggccgtctaacttctccaagagttcttcgtgtgatccagtttctataatgcgaccattatggactacacaaataacatcagcattacgaatagtagataggcggtgagcaatcacaatagttgtacgaccaatagaggcattgtctaaggcttcttgaactaccctttcggactcagagtccaatgcgcttgttgcctcgtctagaaggagaattattggtgatttaattattgctcgtgcaattgcaatcctctgcttttggcctcctgataattgtactcctctttccccaacctaatttaacacaaaaatcaaatatacactcatataaaagctttagaaaaagggaaaacaaaactataatatgttctaaaaaaggagtataacctgagtttggtaactattggggaattgagatatgaaactatgagcatttgaagccttggcagcttccactacctcgtccatcgatgcatcctctttaccaaataatatgttttcttttatcgatgtggcgaaaagcaccggctcttggctaacaagacccatttgtgatctcaaccacttcacttgcaatttattaataggcaaaccatcaatgagaatctctccagcgatcggatcatagaatctttgtaaaagtgatatcacagttgattttcccgatccacttccacctactagagcaacagttttcccggatggaactctaagacataagtcatcaaagattggggtttcaggtctagatgggtaggtgaacttcacgtggttgaattcaacttctcctctagttttctcaagtatctgaccttccaagttgtctgagtctataccagggactctatttatcactttcataatccgttctcctacgacaaacgcctctgagaaatatttgagattcgacaaactttgaccaagtgatctgcaaaatgtaaaataccaaagatggtttgttttgtttcaacaaaactcataacactgtaaacatagtaacttacgtgccaccgaaggtgacgcaaacaatgactgaggagacggtgccgcctttggagccatggttcataaccatccgacttccgtaccaagtcaagaacccccaaatagcataagtgataccattgctcccaatggcaattcccttagctagcccttgtctcaacccaagcttcaccgacccttgaagcgcagttgagaacttttcgatcatcttcttctcactaccaaatgcgtagacagttcgaactgatgagatgacctgttcagctatagaaccagcctcattatactcctcgcgtattttcattgagatgcggattagggcacgtccgtacattagtccagggatcaagaggaggatgataaatggaaagcctacgattgtgagtctccacagcaataagaaacccactatgtagcttgcgacaaacgcagatgtattcatcaaaaagtttggtaactgcttgaatcaaaatcatcaaaaaaaacttgtttaagaacaagaaacaagatctatgtacgtaatatagaaaagatgagaccttttcactgaggaaatcttgaataacgaggctgtcactagagacactggtaataacatcagaagtgcttgtaacatgaagatcaaagtaacccacatcttgtcttaacactgcttttaagtacttctctctcatttttgccgcttgtctctcccctgttcttgtccagcaatatccttctgtttagttaataaatatgcaaaccattcacaaaattaaatagtgattagttacattaattgagatcgatccatcaaattagttttttttttcttgattaaaaagcgacacaaacatcatctataaagacttaccaatgaaacatatcacccaagatgcacaagccacataaaccaaagctacagcattctgttaattacccagtgtgcaaaaaaaaaaaagaaaggaaaagatacattagtgttttttccttaaaacggtcgtggcatttcacgtcatggttcacatggttccgtcttaaaagcgttgacaattagtgaaatggttcacatggttctgtcattcgtaagctgtatatgtgttaagtaatacaccatgtttggtattagttttcattttcattataaaattcgttttagtttcgtcacaaaaaaaattttgtgaccgattatcgtgacgataataatcgtatcaatattccgtttttattgtagtatacttttgtttttcttttgttaatttgtcatgtttacttaaagaccataaacagaaaacaaagaggaaattgaagagagaaaataccttggcaacggtttgcatgaaagtttcatcatcgaaagaggagccacctacgttgttcagtagtttgctgcagatgaaaaatataataggagtgatgaagccatcaccaacggctccgatgagacctaatgccatcaacatccaatctacaccgtccgcgtgcatgaatattgatcttatgcttccaaaactcttcatcatcttcctccacgtaatcttttcctttctatttcagagaaaataccaaaacgaaaccttgaccttaattagggaaacgacagcttgcagtcttctctccttttcttgaagagcaaaaggttctctcctcttgcggttatattaaagaggaaacaattagagtatttaattttatcatgttatgttgttcgttcacgtcttcctggctgtttgtgagacaaagggagaccgttggtcttttaatatgtatgaaacattaatttgtattattatgagatgcgtgattacggtgatttataccatcaaatactctattctaattgtttattcactttacttttagagtatttgcacattatgaaaatgaaaaacgtaatatttaagaaaattacaaatccatttattgacttttaacattttaaataaataaaaaccgagggagtagtttttttgtgtgtacaaaatacttgtattcattgaaggaaccaaatacaaagagaatgagggatcaacgatccaaagtttaaaactcaaaggatgagggcattcttcaatgccacgaaaacgattcaacaaagtttcatgagagctttgagacaaatgctagaaggcgatttggcacatgtgaagtcacgattcgttgaaagattttccacgaacgaatcgatggatgacaagatggtcactgtcaataaaagactcggtcacgttaacaaaggaacaacggttgaacttctcgccgatttgagaatgtgaagtagtgaatcagcgtaggttggagagactatggattgatagtcaaatgaggtttgctttaagatataaagcaaaagccgaggttcgagatcattcaaaagaagatcagatttttcttgaaagcacaagattagggtcttggagatgttggtagttggatggtgaatgtctttagataacattctcgcagagcagtgattagaacaagagcctccatggccacacataactctccgacaaaaacgattcctgaacaatagacttttacgtacgtaacttgttaagaattgatatatccatacgcgggaataccaaaaaaatgtattacatttacactcatttttttacttgttcttgtatatatatacccattttctattttcaaataccaactttaccaatttttagttacctaaacaaatcgccattccttttcggtctggacattcggatatgcggatcgggttcagtaaaacccgatcgggtacgggtatgtcgggtatggtagtctaggacccaagaaggtaaattgaaaatatcggttcgggtttggttcaggtctagtcagattcggaattgagatttgagaaccgtaaaaaaacccgagaaattgaagttcttcgttgggttcgggtcgggatcgggttttttgccctatttactctatgaaatcaatttttaccctacttgggtatgtttacactacaacaacacatataaaagctaaaacggaacaataagaatccaattacttaaaacatccaattgcaatcatccaatgatctaaatagaaaaagttaaagacgtaaaaccttcccaattgtcaagaaacaagtccaagaaagaaaaaacaacttgaaaacctagtcgaatatgttcatgcgtaataacttaatgaaaaaaaacatagaagttgaagtaggaaacttgagatggaacacattacacattcatgggctattgtaaagatcttcaatccgctccatcatagttgaaaaagaaatctatttcaccaagttcatgttctatgcaaaataaaagaacatgaattagaattacaatatcacaacctcatgatagaactaaaaagaaagattaaaatcagaacttacttctcataagaccattttccaaagtgatctcagaaagtatttgctttattgtggagacacctctttcattgatatggatttcacattttaaccattgctcaaggcacatcaacaattcaaccatgtaatgcgagagacatcttctgaatggattcacaactctatcacttgtgttgaatgcagattcttatgctatggacgccatttgcattgcaagtatctccttggcaatgagtgagagaatatgatattttccggtatagaccttccaccaagatagcaaatcatattatatacctttaggaatgaccagtgtctccacattctctttcaaacatccacctcatgtgatgtattattccatgtctccttcacagtctctacaaatacattttccatatcctcatataaaaaaccattacgcaaaacaggtctcctaaaagaatcttgacactgactccaaccactttcagactgaggctgagtagatgacccaccagttggtccactactagaaccgctaccacttttggtcactaaattggctcgtgtgaactcatcatacaaatcagtcatgatgttataaactgaatctgaaagatgagtagcctccacactatctctaccatatagcctttcaaaatataactcagcaaatttcattttcttcctcgggtcaaacacactttccactattacaagcctattcatttccacttgttccccaaatgcatcccaatacttatccaccttttctaacatagactcgactttagtcttaaggcatcatcactatattttaatgtacctaggtttctaataatagagactatctcattgtagagtttatgagaagcaacaaagtttgaacttgagagaaccaatgtggatttatagaaaatctcaagaatttgaaataacctgtcaacttttcccaatcacctgatactgctggtccgatccttttatttcaatccactttcagcaaaaagtaattattatactgtttatcctcagcctccatcttctcaaatgccactttgaacttcagagcttggtctagcatgagataagttgaattccatcttgtcttaacatctaaaggtaggcttcctctttgatgtcaaaagatttcagtctgtaatccttgtaattttgtcaaaagatgtcaagagatttcagtttgatttgaggaatctatctctggtaatcattccttcaccaccaaatttaaaatgtgagcaatacaccttaaatgcaaataagcaccttttaatactgatgcatcacttccattctgctgcaccatttctgtcttgaacttagtaatagcattatccacagtgatgcagaatactttctttgtactccactcaactaaacaagcaagatgtgtatcacaactagtacgacccttatgatcacatatatgcttgaatcctattatcatcttcctcaactcccaattggcatcaacaaagtgagttgttgctatcatataactaggtgcaatattgggacaaacccatatatttgtcgccagtgacatcctctagttattgttctcgataatcttcttcatggctgctttcttactaacataagcctcaacaacgtctcttgtagctgttcttcgagaatgaggcttatacatttgaactcttgagcaaacatttctccaagctaagcacttcacaaaagctaatgacaactcatctaaaactaacaactcattagttgcttctctccaaactgattcactaactttactagtactcatacaaccaccaggaccatcatgaggtttgactattctgtacatgagcacatttccaaacttggtatgccttgcatgtattttgaagatgcttctttagagtagaggttccagacttggttggacacgccagctctttccaacaataattgcaattacatttgtcagcatcatttgtatgtttggttagatgatccaaacccaagaccttgccctcttgttttccgtagaaccactattccctgccccttcattgtttttctctttgcgcttgtttgcctttctagaagtaggtgtttcaaactcttcgtttgtcatatcattgtcctcatgcatttgctcatctcggtcgtgtggctcattacaagacgcccatctgcaatgtcattcaattcaacatcattattcaaaacaagtgaacaacaatgattatcgagaagaaactaattagcatgtagtaagctcagtgaaactcgaaaagaaaacttgagcaaagattgactgctttcaatttcttgacctcataaacgaaacaacaaacatagaatatcaatgccttcataatctaacaataaaactcgacaattgtgattgtacatgagtcaatgtctcaaactctcaatgacttcgaattcgacttacagacagagaaattcatagaacatggagtggagaaatcgaaagtacctctgattgagcctccaagattgattcaaaaaaactaattgatgaattctaagtcgacaatcgacgacaaaccataagaaaccctaagaaactaaatcgacaaagactagagaggttaatgacttaatgtgtttggttcgggtttggtttacactttcgggtttgggttatactcgaacccgaaccgataccacgagtacacttacataggacccatcagtgtaaaatccatatacttatacccgccccaaacaagtttttcgggtcggttccggttcgggtactcggatacggtttatatgcccatgcttaattcctttcattacctagatatttctctcctactttttatctgtagctttaatgatatttttatttttgttgaaagggatatttggttttttctctttgtataaacagttcctcaaaccaggtttagttaagtagttacaacagaacaaagaaaattctgtttagtaatatgaattaagctggtaaataagatttcaaatccagtatctatatgaaccataaatactttcatgtttccatgactcctttctttaatttataaacaattaacctcttgatatatgtttcaaagaatcactaaaatgatcttgttggatagaaatatagcgtcactaaataatttctgctaaaacatctctcatgaaacatgtacttgtaactaaactctgagaacctcaattatgtgccagagaatttattctatactattttttggtgtggaaaaactatattttatttatataaaatgtttaagagtagtgaaagactaactatcaagtcactagtcatacaattaataaaaagactaatttaagcattttaaacatatactatatatcataaccagacatgtcatcaatttatcattgactttagctgtctttacataacacattattcactatgttcataatggatgatgttttgaggtttgcacattatctaagaagtcaaatcaaatctctattttatactccaagatacatttattacatgtgttataaaattataatgagtaaaatatatgaataaattgggttaactcttaaacatactataatttcacctaaaatttagtaagacctccttaaaaaatatattgtaacgtcattcaattgaaacaaaaaaggtgtaaaacatcatttatattaaaatagaaggagtatattaaaacaataaaaaagtgtaaatcaatatagatttgatactaattaaccactacaactaaaaatataagattacatatatagtactcatatcacatatatataaaacttagtttgtattatgccagttctttagcatagtgaaagaatttttctacgtccatcataaaattctagattcgacaatagtataggttcgtggaagaaaaatattctttttaaaataaacgtttcctcaattatttctcgcataaaatccttactattatttaaaaataattattcagttaaaatagtttatagagtttcatcatataataagatgtgtagtttttcttcgtttacttatttaattatagttctctaaaaacctttaaaaatattgtattcatatatattcagtgatttatatagatcacagatcatatgcatggatattatttgacctttctttttttgcttttggtctttctattttctttttctcttgttgcaacattaaataaatgcttcttgcaagtttgaccccaaaaaaaaaaatgaagactcctacgaagttttacgaaaatgtatgtatttagcgggatcacattttcaaaacgtagaaaactgcataacattcaaggctatataacacacaatacaatgaagtatttttagcaattgctttgtttgagcaaaatggagacattattgttgtgagaaagtgtttcaaccatgtcaaacagctcttcttcaaaccatggtgcatcaccattaaagtagatgcctcccaaccaaacaaccatcctctctagcgtctttgcgtttctcagcaccaaattcataaacgaagccacgagtttcgacgttgcatcattacaacccaacatcttgtagatctcctttgaggtaggaaacacctcacatgttgatctccaacattgatccggatataaaccttttaaaggatgcatttcctgtagaacataaaaagttattctatagagaataaacgcatcttcaatgtatttctctattttttttacttttaagttagagtaactctaaaatatagtagagtttttttttttttcaatgtaccactctatttttctttaaaagtgcaaaaaatagagttagtctaaatgtaaagcaaacatatattttactctattttagaatgaagttgtaaagaattttgctatgtaataaagtttaggaaaaaaagtagagtagacttggagatatacccttgataaaaaatatcaatcctatatcccaacgaaagtgaaagacatgtggttcatggaatgttcctagtccgttattagtatgcatggtcttatatataaatcgacaaggaaataaaagaggtaaaaataccattatgtcgtggcttagctgcaatgtgtgtaatgttagcttctttaatccaggtgaattctgtagtaaccttgatataccagggattacagatcgaacgaactccgttttaacagtcaaagtttggaccttgagcgttgggaaaggaacaccgcggagctcggcgagagatagaatctgacaaaacgagatgaaacccacttagcaagttcatgtttccaaggcgttcttaaccatcaaacaaacattaattaaccaaataatttctacagtttttaggctttagagtatacctgaagaatggtttccccaacagtaagcctctttacgttgtgaaattttgatagcatctccagcgccatggtttgataacgatcagcagtcaagggagagagtaggcgatcgctgataatgttaaggttggcttcgctcaaagaggagacatccactatagtagatggtgtactagagtatgtcagtctcaaataatagatgtgtggcgcaacaatcgcaattggtcctgtgcggcgatattgcctatttatatccaatctcctcagattcggtgatttactcagatcaagacgctcaagtaatctgcatgtatccagtgtcaagctttcgagaattggacagccagagagaatattatgcatggattcgtctggaatttgacaaaaacgcagtgttaagttccttagggatttccaagacactgcgcatgtgggaatcatatcaaaaaagtccaacgtcacgtcgagttgctttaaggaggaactgatatagaagatatctggaaatctgtaagtcttggtgtatgtgaaatccctaacgaacacagacagattttgcacattgcgggagagagcaaactcgatccagctatcaacctggggtacagtgttgtcgttaaggtccataacaagtttgaaactagttattatgggagccgtgtaggaagttagggtttggttcgtctctccgtgcttgagtttaatgtcgagacaaggtgtctcgcaccatacatgcctccatcgtcgtgataagacggaagttctcatggccaaatcggtgggaataaaggagagaatatggtgaaggatatcatctggcatatagttgatgaaatctgcaccatcgattattcgttggattttgcggtggctacgatgttgtcgtcgtcggccccgtttctctcgccttttcgccatgataacgcagatgtctttaggttttcttttgtctacagaagaattacatttaatatttatatacaatcggcctccgattgaaaagacggcaaaagctatgaatcgactaatgacccttttaagcattaccccctcgacggcccaaaatgtatttataagattatggccgggcctattaattatgacaagtttactttaacaaaataatatattgatactagataaagcccacttatttaggcggatgtaagatagaaaaataaacttgatagtatttgaattttgtataataattaatatattttttgatattttatttaataattattgttttaaataaaattttcagtcttctgtattttattttaattatacacatttaatcttatatatgatatttgaattctaaatagtaaccgatccttattttatatttagtttagcatatagaaaaaaaaacgcaaatttctattttatatattcaattttgtaatacggtttaactatctatgtcatcataataaactctatttaaattttacactctttcttttaagtgataacattttcatatcaaaattatatttataacatatcaaatttatatcctagttagtattaaaaataattaacaattaacaaaacataaataaataaataataaagaaatccacaaaaatatttagaaaccaaacattgttgaaaatatattttttgtatatgccgtaatctcgtaagttgattttacatcatgcaaattaatattaaatgagttaaaattaataaatgaaagtattctcattataagtaactgaaaagttaaatcttattttttctcaaaatattatattttcacttatgattacatgagttaaaaaatttagaataaaacataggtatagtaacacatcaaaggatgtaagacactccatcatacgatgtgtgacaaaatataaatcaaacacattcgattttactatacattttaactatctatttcaggataataaaataccttttattcgctccatcttatagttgatatttgaattttatatattaactcatacatttttaaaatattaaatttattattttcttaaaccaaattttaaatcttacaaattaaaattttcaatacaattttaatatctactttatcataatacaatacactttaattcgattgtattaaaattgaaatataagtcgattttgtaatacaaatatagttttattttatacatttcatcttattttcagtttttctttgtagttaaaaaattaaaagttaaatattttagatatatgtgtttcttttttagttttcctatttaattaagaaaaaagtaaatattttttgacacatgtcaatatctgaacgataaacttgacacgtgtcacgattgtatcataatacaatttaaatatctactttatcataatacaatacacttgaattcgattgtattcaaattgaaatacaagtcgattttgtaatacaaatatagttttagtatatacattccatcttatttttagttttccgttttagttaaaaaaaaataaaagttaaatatttttgatatatatgtttttttttttagtttttctatttatataagaaacatgtcaatatctaaacgatagacttgacacgtatcatgatcacgcgagttcataactttgaaaaccatactttatatataaaatttattacatgtgttataagattataatgagtaaaatatatgactaactatcagattttgaacttttaaagataggtcaatagttgaacaattactttttgttggtctcggaaattgagccaggatccacgggtcctcccaaacagagatggatgtccttgaacctactcttttaataagtcttttattaaccagagatctagcttaacaaatacttctccagccataagacggagagcatgattttatattttccaaaggattggatttcctaaaatatctccctttaaaaaccttaaaaaagagagtccgaagacgaaattaaccgcaataactgtttcgcaagtaaggccgaatcaaaatcatctacatcccaaaaacctaaccaccttccaatttactattacacagtttattccaagccatccaatgcatacctctagagtcaccattcgagctccaccaataccttgctaccgcatttgttagtttagaagtaattgttttcaagagcctaaagcaagacatcacataagttggtaatgctgcagctaccgatttgatcatcacttctttctctcctatcgataagaatatagccaactagccatttattctactttgcaatctatctctaacaaaggaaaaaagctttgtcttagagccccctaaactttccggtagtccgagataagaacccatgcctccaatattatgtatacccagggtcaatttaatttctgtctttatagcatcatctactttatgcccaaactgcatcgatgattttgtacaatttatcatttgtctcgaaaccgcttcatattgttttaagatatcaatattactccgcactgttctttatcagttttacaaaagaaaagattatcatctgcaaataacaagtgagaaactgaagggctcgttgttgctacttagatacccgtgatcaattttggttgttcagctttccggatatttgttgttagcacctcagtgcagagtatgaataagtaaggagaaagtggatctccttgtcttaatccccgttctggtattattagtcttttaggttgtctattaataaggtccctatactggactaaagtaatacaccacattatccaagatatcaatttttcgcaaaattccatcttccttaataactccttaacaaaattccattcaaccctatcatatgctttactcatatctgtattgatctcctgaaagagctctttgatccgaaaaatgtccagctgataagtgatgtgcacttgggtgcgtcaataagagatgatatcccagtttggcatttcacaaaatccggaaactataaagttaaatctggctaccatatagcacggatgaaaaacttggtaaataattcatcttttattggtccagaaatcaaagctctaaaatcacatgtttggaaattgcaatgtccgcctaaattacgttattttttacggcaaatattatcaggcgttgtaccggtaacaaacaatttgaggaagaaaggtataatttatgattcaggatgtgttagatgtggcactattaaggaaacagtaaaccatatatttttctagtgtcatctagcgagacaaatatgggcactctcgaagatttctacggtcccagggatttttcccacaaattctatttatgcgaatttggatcacttattctcaagaatcccttcagaatttgattcatctgcatatccatggataatttggtatatttggaaagtaaggaatgaaaaagtatttgaaaatgtggaaaaagatctattagatgtgttatgtctaactgaaaaagaggcacaatcgtggcagttagcgcaagctgagtttaatactgaaaaccacgtttctatgcaatcgaaataacaaattcgagtgagtaatatctcacaagataatacgtactctggcttttgttgttttgtggacggatcttggaaagaaagcgacaagttttcaggactaaggtggttttgcacatctttaaatagagaggcgtcaaccatgggagctgctaacctgcgtaaaagtctatctcctctttattcagaagtcgaagccctaccttgggcaatgaagtgtatgattggtgtcgacaagtaagaaataactttttttatagactgttcagacaagtaagatggtgtcttccccaacagaatggccatcatttttatcatatttggaggagttttagactgacaaggaaaaattcattaccttttctttatctttaatttttcgtaatacaaatgtcaagatagattattaagcacgaaaaattcgtgtagaacgctacacattatttatgtaaacaatttttcacaggttcgtttgtttcctaaaaaatatttcatgataaaaaataaaaaataaattatatgactaaattgggttaactctaaaacatattataatttcacctaaaatttagtaaaaccttattaaaatttattttaaaagatattatattttaacgttatttaattgaaacaaaaatggtgtaaaacatcatttatattgaaatagaaggagtgtattgaaacaataaaagtgtaaattaatatagatttgatactaaccactacaactaaaaatataagattacatatatagtgctcatatcatatatataaaatttagtttatattatgccagttctttagcatagtgaaagaatgtttctacgtccatcataaaattctagattcgacagtactataggttcgtggaagagaaatattattttttaaataaacgtttcctccttactattatttaaaacataattattcagttaaaatagtttaaagagtttcatcatataataaggtgtgtagtttttcttcgtttacttatttaattatagttctctaaaaacctttaaattattatattcattgaatatatttatagatcacacatcatatgcatggatattatttggcctttctttttttgcttttggtctttctattttctttttctcttgttgcaacattagataattgagaaatatatcaatgattccccatttttcgggcagtacgtggtgtcagttgttagactaaccccatagtggtgagcaaattatttttcatggcaacaatgataacataatgttccatatctacatccaaatatagtttacgatatttatcgaaactattaaagcatgagttatgttggaaaattgtaaaactaaatgggtgcatgttacaaactaactggtttccctcatgtatattgggggctaaaagtacaataactaaacgttcacaaaagattcaaataaaacatctgaccttcagtaacgagttctttggagactgaccagagagaaatatacacccgtaggacctttagctaacaaggaagagtgtgttccacattcgacaactttccctttgtctaaaacagttatcgtgtcacagttttgaatggtgctaagcctatgagcgatcacaacacttgtccttccaaccatcaaacgcccgagtgcatcctgcaccatgcgctctgattggttgtcaagagcgctcgtagcttcatcaagaagcaacactgatgggttcttcaaaaccgcacgagcaatcgcgatcctctgtttttgaccaccagatagttgtactcctctgtctccacagtacgtatcatagccgtccgataatgttacgatgaaatcatgagcgttggctgccttggccgcctcgataatctctgactcgtcaatcttgtcagatgctcctccatacatgatgttctctcggattgtcccagcaaataatattggctcttggctaaccaaacctatgtgttgacgaagtgatctcaaatgataagaccttatatcacgaccatcgatctttacaataccctttaacgggtcataaaaccgttcgattaacccgattatagttgatttacctgacccgcttggacccactatcgctgtcgactttccctcgtcaatatcaatggagaagttcttaaatataatcacatcagggcgtgttgggtacgcaaagtccacattgacaaactttatttgtccctttatgttttgtgggacgaaaccatccggtttctccggttcaatgtttgtgtaacgatctaacaccgcaaatactgatccgaccgcatccgagcccttggctagatccatcgtcattgctcccgcgtccgcaataacccgacccgtactcacaaagagtataaacaactcaaagaatgcttttgacgtgatcttcccatcaataataagtctagcaccgtaccagtaattcaaagctgaagtgcatgtcatgagacttctagaagttgctagcacaatccctgctaaccacgattgacggatattttctctttgtggtccttcttgaaccattttgagtaattttaggatccgttcttgtgacgaaaatgctgttatggttcggatgttggatacagcttctgccgctagtttgctgctctcatcttgtgctttaatggcttttttcgatatgcttttgagtacaatgcgttgagtgtagaagcatccaacaaccactggttgtattgcaatcatcacaatggataatttccaagaaatggccaaaccaagtgtgcaagctacactcactgctgatatagtttgtaccaacaacgacactcgttcaccaacaagcgatctcacctgtcataacaaaatattatggaatcattggtaaaaaggttgatttgtagagtttaaattagtaagacagaagacataccacgtttgcgtctttggctagtctagagcaaattgatccgctcgagttctcgtcttcatcgaaccagcttacctcaaaggtcaatagctttgagagaatattttctcgtatacgtttcgttaggtattcacccatgtaagcaaaactatattgttgaatgatactgatcaagaaacataaaacagctagaccaacgaaaagcaacacatagatccttgttttctccttcatctcatcatgactcgttagaaaatacactgacaccattgatcctgaagcatatgcataaattgggtgtaaggctccatacaagactgcacttaagcaaccatacaatgcatgtttccactctggtttattcatcgccatcaatctcttaaaagatggcttcttatcctttggaattgaaccagcaagatttgtatcaatgcttgaagttgcgaaaagggaagaccgactttgaatagaaagtcttgaactatacttcacgtctttgttgaaatttgagaattgaccctctcgcatacttacgctaacgttatcatttgattcttcattttccatgatttgtaagcggactagagaagtgtattgaccatctacattctccatgagctcttcgtgtgatccagtttctacaatctgaccatttttgaatacacatataacatcaacattacgaatagtagagaggcggtgagcaataacaatagttgtacgaccaatagtggcattgtctaaggcttcttggactactctttcggattctgaatctaatgcgcttgttgcctcgtctagcagtagaagtgtcggtgatttgattatcgcacgtgcaattgaaatcctttgcttctgaccccctgacatttgcactcctctctccccaacctttttttgtaaataagaaaaactaaatatccattttgagaaagttaaacaataatcaaattttctaaagttggaatctaacctgagttttgtaaccaagagggaactgagaaatgaaatcatgagcatttgaggactttgcagcttccactacttcatcaaaggatgcgtcctctttaccaaataatatgttctcctctatcgatgtggcgaagagtgctggctcttggctaactagacccatttgtgatctcaaccatttcacttgcaactttttaatagacacaccatcgataagaatctctcctacgatggggtcataaaatctttgtaaaagcgatatcacagttgattttcctgatccgcttccacccaccagagcaacagatttaccagatgggattcttagacataaatcatcaaagattggtgtctcgggtcttgatgagtacatgaacttcacatgcttaaactggacttctcctttaatattctcaagaacttgacctctcgggttgtccgaatcaatatcgggaactctttttatcacttcaataatcctttcccctgctacaaccgcctcggagaaatatttgagattcgacaaacctcgaccaagtgatctacgtaagatacaaaatatcaaaactataataagaataccaaagagccttagacatgtatatatacttacgtgccaccataggtgatgcatatgatgactgcgaagatagtaccgcctttagctccatggtacataaccatccgacttccgtaccaagtcatgaacccccaaatggcgtaagtgacaccattgctcccaatggcgattcctttagctattccttgtctcaaccctagcttcactgagccttcaagcgcagctgagaatttcgatatcatcttcctctcactaccaaatgcgtagacggttcgcaccaacgagatggcttgctcggcaatagaaccagcctcattatactcttcacgtatttttctcgagatgttgatgagggctcgtccgcacatcagtccagggatcaagaggaggataaagaacgggaaacctactattgttagtctccacagcatgatgaaacccacgatgtagcttgcgacaaacgccgatgcactcatcaaaaaatttggtaactgtttgaaacaaatatataaagttttcacttgtgagacctttttcaataaaagaagcaactatattgattatttagagatataatggttagaccttttcactaaggacgtcttggatcacgagggtgtcactagagacactggtgataacatcagaagtgcttgtaacatgaagatcaaagtaacccacatcttgtcttaacactgctcttaagtacttctctctcattcttgatgcttgtctctcccctgtcctagtccagcaatatccttctgttttgtttgtatttggaaaaccatccacaaatttcaataaaatttattatgttgaaatgcaccaaatttagctttctttttggtgttaaacattatctaaaaaacttaccaacgaaacatatcaccaaagatgcaccagcgacataaagcaaagctacggcattctgttatttagccaatgtttgtgtaagaaaaaacgaatatacattagtactcttttcttatatatgataaatattattcacaacaaagggttatagctagatttactccatctcacaactctcgtggttccatttttaaaccaattagcaatgaatgaaataaaatgattcatatctcttatgtattagattggatttatacacgactcataattcctaaacacatgtcgtcattcaatcttgctaagaccaagaacagagaacatagaataaagaagagagaaaaagaccttcatgatggcatgcatgaaggttttatcaccgaatgaggaatcaccgatgtcgttgagtagcagcccggtgatgaaaaatattataggagtgatgaagccatcaccgacggctccgattaaacctaatcccatcagcactaaatccacactgttcgcatgcatgaatattgatcttacgcttccaaaactcttcatgatcttcttccttctccttttgcttactttgggtttcgaaaaaagaaatactaaacgacacattgaccttggggaaacgacaacatacaaagtcctcattttttaagagcaaatggcactattaatgaagactctaaacttaatatgttaaagaaatctaaatttttcgattttcacgtgtgttgtaatttgttcacgtcttcctggtcattttatattgcaagtagcagcaaccgggaagcgagaggccgttggcttttcaatgctaacgaaaaatataacatgattttatagcatttcatataaactattttaaatattttctttcttttaaacttatgagatgcgtggtttttatctttatacattttcaggtaagaaacacaacagtttatattagatagcgctggcaaatcattgcagtgttctaaaacctggttttagaaaaaacatctaaagactgattgaaattgattagtttcagatgtaaatatgtaattaattggtcttgggtagttttaggcagttttcagcggttatagacaattatgaatcaattcctatacttttttggtattagtttttaatttctttttctttattttttacgaaaaaaatattcttagtacaattaagtttatatatatatttttaaataacttctaatttaattttagaaaagcgttcaattctaacgcttaagaaataatcaattttagtaaatagtcagaaaacattctaaatttgggacaaacatgcaatgtggtggttcttccggaagaaatccacactattaagcatattggtgcatttctacctgaccggatcagccgataggatttatgaaataagaacttttgttattgacttattgttatctaattcctcaattatatttacatattttcatctattgtgaaactttaaattttccccacaaaaatgggtgcccatgcaaatgttttaagatgccacattcatggcagactctagtcagttcaagaccaatttgatcataataaaacaaagtaatatatatgtaccagatatgtcatcaatgtatcattgactttagctgtttttgtatagtaaaactaaaattagtatgaaacaaagagaaatgtattaattcaatataaattcactgaccactatacaatagttagaaaaatatatcgagagctgtgcctaaaacttttaatgccccaaacaaacaagaaaagtgtatatatagtctttcatcgaacttttatatcatacaatacaaaaagtaagtgactttgttttgtgaaataaagtgcttttgcaatggtgagaaaataaagtgttgttattgttaaataagttttacgaaattagaaacttatattagtgaatatttgaattattcaaaaatgttatgatatttttgagacctttgaagtcgtgatgagattttagggagtcattatgagatactcgatcaaggtcgttataagactttttaagactttttggatatgagatatctggggtcggtcaggaacttctgtgtttaatcacaagacctatgtgaattggttgtgtgaaaacggaattgtatggttaacaaaaaaaataattattaaccataaccttggcactgaacgtactatgagtctatataagactagaaagtagaaactggtccaactacaaccaacttaagtttacatatcgggtctttaggtatgcgtttataaacgttatttatgtaacttacgattgttccaattctgtttttaaatttgagtatgaactgcaaatgcatgatcatatgtttttatcaaatttctgagttcaattttgatatagctttaatcttaaaataattaaaatcatatttttttttcttctggatattaagatgttctggccacaatccgtaatccaccagatccaaaaccacatcatgtaatattagttttgttccaagcgtcactcgaaccgacgacatctaaacgtcgcataaggtatttaccaattgagctaatgacacttggtaatcaattactattaaacatgaaaaaacagttttaaaatatgtttggtcattgcaagatgtgtctttcattaataacttgtcaaaactaggtggttggtgtggtcacatatgtcttatggacttaatgaatgtgttagtattggcctattgggcttaaaaagtccatctccttctgatctcacttctaaacatagagctccattgaaggagtttggtcctccatgtgaaatgcttccaccagctaaaagactcatataattgatcgtgaagtcgttgaatttactatggatgattcaagaatcacggagaggtgcacgtgccaatggggatctcgaagattgaaatgaccgaaatgtcttctctaagcacaagaaagggatccatatttttttttgatgtaccctatcggctgatttggttagctttgttaggaatgcaccgaagtgttatagagtagacttctctcgatacaggtagaattgagctaccatacagtctgatccgaatttataatgctttccgactaattataagggattgtaaggccgcctacatttctaactatcatgtaaaccagttggacaaagacccaagtgacagacttcccaaacaaatgtatttttgtttttagggataatcgaacttaggtatcagagttttaccattcaccaaaactttcttttgccactaaacaacataggcttgggcagggatccacatttttacactagaaattgcaagtgatctttgttcattatgatgaaagagcttcgttccttttttttttttatcatacactcaaacacccaaaatccataagtgtgaatctccgactccacatgtacaacaagttaattttcttcactggtttatgtcatttaatattttgacttacatagaagatttaaaatttcgaagaagattatattttcgattttttgttgttatgtaaattttttgaatatacttttgtgttcttatggcattacatcaaaaaaagaagatgcgatcttttgagctattagctcaaactcacaaaagaaacgaagccaaagaacgaacaaaaccgaacgaatcttaagatgaaaaaaagattgtagagagaaactcttaaaccaaacaagtgacttcccgaactaaaaagctactgtcagagtcttttggtctcatcttctgatcagtttctctgtctctacctcgtctcgcatctagcaccaaatgttgtctaaacgtcgtgatgaacgcttcaactctctcgttcaactcctcattggataacctccctggctcaaattcatcttcttctccattatactctatttctttcttgtgaaacaagcaatctttcacagtttcctcaaatttagggcaaactcttttcgtctcctccactaaaacacacttcttgatcacttcctttggctcaacaagtaagaaaccttggtcaaaacaagccggttccaccaccacccttgtcttcttcttcttaatcttattctttttctctcgcatcattctcaatctacctcctcgacgagtcttgaaatcatgactcctcccgaggttaggacgagtcgaggtaaagtaaacggctaagagaacgacgttgagtataagaaacaccaacgaacgccattgctcgatcaaatacgatacagaagagaagtgtttaagacaagccattgaaagaacaacaactgcagtcaacaatgaagtacacatgttctcttcctccactctaatgtctctcttcatctccattgttctctctatatctctctactttgctctgtttcttttctccttcctccgatcgattcttatacgaaatttcaagattcgtaaaacaaatatttggtgggtccgattgtggaagaccaaatggcgaacagaaagaacaaaatgaaaatgaaaagacatgagaaggagaaggaagaagaaggtggaggagacaaagaacaagcatgcccttcaaatctgctcttattctagacatattattattactttcttctcaggctttttctcatttcctttgtttcttatgtttttctgcttttcttgttccctttgttttctcttggggaccattttccttaaaccaatcattttcaacttccactatatgcaaatttagtttcaatttttttttcaatcttagtttccggaataaaaataattttaaataaattcttctattgcttgtggatcgcttcttgcaatgtttaccaaatgttacggccacggatgcggacacccatagtttggtctagtttggtctagtttggtctgttgttgtcttgttgacatagaccgatcaatttatagcccacaaaaatattatccatgcggacggatctatttaggtatgtttaaatacgttttacagctctactaaaatacgcaaatataatggccaaataatatcaattgggttattgttttttaggggaacaaaaaaattgagagaagtgttagctactcaaagttaagttcaatgggaactctcatgcaaagctgagaggagggaacatttttgcaggatgtgaaaatgtaatgaaaacttatttttttggttgaaaaatcgaataacaatttttgctataaaaataataattgagacacattacacgcctgctcctatctgtcatgttaattctctcatggtagtgtgtggccccatgtttgttcttctttcccaaacacatgcgttatctgttttgcaaatgttctaatcccaaaacctcgaaatttcgaattgcattgagcaacttttatacaaaattgtttaacatacatttactgacaacttttaaaatctagattcatacaaaaagtttgaatgtttataatttaataatagtgtgtcctaaactcaagaacttacattagaaatcgtaattcgaaagttaaagctatttgcttctaatggtaggcttaagacggcttccattcttttcttttttcttgttaaaacggcttatgagtctgtccctcccataaagcagttttagggcaccaatataaagaaaattttagaactatttattcaaaaagtttgctttggttagttggttatgtatttcatcactgagtcatatgtgtttggtttcattccttcatgttacattttttgttgttttgtgaagcgggagttgattttttttttaatccatttgttaatttttggtccaattttttttttattaggtattaccaataaaatttccaaatttttgatttaacttggttattaggtagtacgacacaaaatcatacacttttcttcttcatttgcatgaggattggtttgattccgtagttacttctgcaacatttcaccatccacttgcggtatattagttctttccgcaaaactaggtgtcaaatgcctcaaggtttggtgcccaatgttgtgatatataacaatctaataatgcatgtttatgaggaagaacatatcagctgaataaagtttgtttcttttggagctcattaatgaaatgagaatctccatatgtcgcaaacctacaatatcttgatacataggtatatggtcgttagatgatatgtcgatgaagcaaatggtattttatacaatgatgttacattaagaccactattacaaaaaaaaataaaaaaataataaacgaaaacaaacaaacaaaaaatggacacgaaacttgtgaaacaaggtacctgaaaactgggtacgttgcaagaatcatggaagctgctcctaagagtgcatctaaattgcttggagtttagtatattcaagatggggaagatcattaccaaacttttgaatgtgagatctcaaacccgacgaagacaaagtcgatcgatgaaggcaaggtatcggcagtatgatgtttcattgatcttctagctggtttctttcaaggtcaaacaatggccttaaccttctttctacctcgctgcattgtagatcgatctcacctgcaaccattgagtaagcagagtggcaagattcatcgtccctgaatgctaatatccatctcccatctactagacctttggacttgagcttctcatagactcctcgctttgttggatccaacaacggtaatgtagatggtcggattctcaagtgtagccatctcgggtgcttttcatctattcggggctgaaaagcaaacaaaagatgatagagatcatgtactatgttaatatttcaggccttcctgtggatcttcacgggcattttcgttaaagaagaagacagtgaaggtgattacgtactttgcagccggctaaaggtgccgttacacggacgattccattatctggatcagcaaggacaatccatccagactcaccggatgataatgctagaaatgagaaatctcgttccttgcctctttcaaaggcaatcctacagggtacagcatcaactgcaccaggaaattgcaaatattagattacctatggataccgagacaaatcaatcaaactggagttctaagaaatacaagagatgacatcatgtaattggttagatggtgtaagtaggagaagtataaaagcatcatgcgctaacctagcttcagttcggtgccaggtttggggactgatacatccagaccagctcttgtggcacgagaagtttcagatcggtcggctggaggataaataggcggctgctcgggtaaggacctaccgagcgagaaaatttggagttgatgaagaagcacgaaaacctataaggaggaaagggttgataatcaaatgtccgtattcatatacataaacgacaagcgctgatagaaatataaagagaaaacgattaacatacctttaccacctcgcacattctttcaccagctgtgaatgatgattcgctaacagagttatctataaaagatcttcaggtgttaatggtttgcataaatagggtttcaacaaggaatgtccatatcattcacatttgtcatcagctaattgcgtagaatgtgtaataaatatcctaccattagaagaggatctatccagctgaagaagaacagatttaggctctttttgaggggatggagcttcgattactgtcaaaagagaattggtatcagaatcattgaacatattcttacaaacgaaatccaacgtatccaaaattcgcttctttacttgcctcttttgcactttctccactcatcaagcagtaccctgatgagtagatcaggccagatacctttaatttccctggtaagggaatttttgcatttctcatacgaaacctgcgataagcaggaggtaaataatcaagagagggagaggggaaagagaaacagtggcaaaccgaaaaaaacatcttgaaagcaacatacattcagcatcttgagatgtttacgattaaattctgcctcactataaggaagcaattggcgtaaaagccatcctccatcccataatgtttctgcagatatgttttctcggcagagaagagtgaccaatgtatccaccacctacaccatatttgtaattaaattaagacaagaacttttgcactgttatgaaaaagaaccaatctttagcatttggaatttcagaagaagctaggctagtaggtcaggtttacaaacattcatatttacctgatgtctatgtacacgggggcaccttgcagccccaggcaatgaacagcacactccaaactgctcctgttgaaggtacttgaacgaatgagtcaatcacagaataatacaacaccaaagagatggagtttaagagatgcagtgaagtacctccaacctccgtagataccaatcaagttcactacttaagccatctctcatggaaccatttcgcggtgaaaatagttgttcttcaccagtgtcctccccaaccaaagattgctgtcagagatagctaccaattaagttttgaataataaggaaaaaaggtagtccatattttttggtccatgctaatatgctttagtagatggtcaagtaaaaggtattagtaacaaaatccatgcagatgagactttccctggcaaaatttgctggaaaatatattacgcacaagaataaaggataatgacagaaactcaccagcaaaagttttttgtgctgcttacgctgaggaagaatgccaaaagcatctagcattgactcttcaagttctaccaaaatcagaatttaagacgtcaataccagaaaaggcaagaagaatctgcacaatgacaatgccactgccaataccttttgtctgcagcagagtggctagcacaaacaaggaaccctgagcttgtacatcatctccttcagaaatatattgaagtaaagtctccctatttacaaagaaaaaagaaataaaaaaacacataagcttaatagtaaaaaaaaaaaaaaggacaatactaagacagcaactatcccaacttcattcaaggtcttatttgctaacactttacctaaacgtcatatgagaattgttgaagatacttttcggagtatcttcactgcataagtgggaatttccatcgtcactcatgcctgccgcagtgcttgaacactgttgatttgcctcctcagtaacacccttgtctggatgcccatttacatatgtaaggccttcaggagccaagctgctattaggtttcactagggaacttgaaatgaatgcttttacagggcagaaaagagtagcagcagtcatatttgccaaatctttgattttaactatccgcaggatgcatgaaagcagataaagagaagtgacaggatcaactgatatgtcctgaaataaccacaaaatcaatactttagtgaactaaaaatagaactctggcaaaaagtcaaacctaacaagggtaaaaaaaacaaaatcccaaaggaacaaataagtcaaccctgaaaataaaattaagaggaaaaggtgatatttggtacatttacagcctcggagcataaagacgggagaagaagtgggagagttagatgctgcagaatgtgatctgttatcagcctcccgatatcaggtatgccagcagagataacatcactaaagtagtacaaggtgtcctcaatcccatcaacggcagaaaacaattttccacctgaatccggagatgggcttctgtagcaaagattaaatgaaaatctttcagaatacaatttatccaaatcatacacaaacaaaataagtaggtagatgaaaaggggttgtgataacttattatcaattttacaagctatttccctgggaaatgaaattgcactgaatcttactttagagtgttcaagaccattgcacttagatccatgcattgcttttggaaaaatgaaattaattttgaaaagtactcggtgtgcggtggactaactacataatcattcacagattcatcgccaactgcaaaaaacaaattaaaggcatcagaaatgttgctaaaggttctgattacttttatcatacaagtgacaaatctaaagaactattagaagtgactgaccgtgatatacattaagagtcagggcacgaactgcagtgcgtatcatgttctcttcatgaaatgcaaattgtatgccttcgacataaagggggaaagaaactactacatcctagacgcagaaacgcagaattaaaataaggcagaaaaatccataaaggaatataaaagttaaaggaacatgaaacaacaagaatactcacgttctcggtcttcaaaagcaacgatattgtatgcttgttcagcttcccactaacagctctacataaaacaaacaaaacagttaaaagacacaatcggtaagtacttcctgaagccaagatatcagccggaaaatttaccttaagaaggatatgtagtaagatagaagctcttcgtgttggaagtcaaatgtatatgttatcaaatagtttacatattcgttactgaacaagtaatctgcaaggagtttcaaaagaaaatcatcaatagactataatcatgagaattctcatagaaaaatatactgcatctgataaactcacagatggcttgttcactttttaggttttggatcattatactcatggtttgcaacaactggacagaaactgttactgtcttgctaaccctcaaaatacgtacaaactctcccattacttgtttctccataaaaaatctgcaacaatcgcaaatattaacaaatgccaaaagaaaaatccaaaggtggctgactgataattagcaaaaaagactcactcaaagaataaggggtcatgctgatccccataagttaatatctccgcaatcgatctcagtgcctcgataacgagatccttcaaaaatgacacccggtaaacagacatcaaagcctaacaaaacaacaatgccaagacaatgtccactaaccttattagcctcgtttactatctgaatctttctcagctggtcagtcaaatacctatataaaaaccaaaactttcaacacttactatgtttcatcatcatctggtataacaactaatgtcgtaacactacgatcacaatgaactttctgagaacaaatcattctcctacaatggtcaacatagtccctttgacccctgagactagggaagatgaacttatatagtttccctacaatggcaccactcaaatcatcaaccctagcaaactacttgcaaactaccaattcaacaaacacccttaaaagaaacatttttcccccacaatcaaaggataatctcagccacaattcaaatgaaccaaaagagagataaatcggaaaaaaaaactgaaacttgttgtaaaaccaaaggcgatcaaagaaacctgagttcggctaaggagaatcgatctctgggtcttaagaaggaaagccacatgattgtttaaatcaatcctttggaaagttccagtcttcttctctggatcatccttcactctcgagaaaacccaatttccattattgcttctcgtcgattaaaccaaattccacaaactctgacgaaatctctgatccagggatcaaaatcatacaaaatcaaatcgtatatcgaggggaataaaaagttcgaatttttcgaatgattgtttagatgtttcttccggtaaaacaacagagattgatgacggcaattgcgaattgaagcaccgatgtgggttgagagctggcgttggatttggattcggattcggatccgggtcgggttcaatctcgaattcaaagaaagaatcttcaattgaaagatccgtctttcgcatttaatttaatttaaggggaacatttatttttcacgttggaccctctgactagagaagaggcttctcgataatcaatgactcacaactgccacgtcatacacattattatttacaaaactaaattgtttgttgtcattataacattggtgatttgcagaaatgaccatgtttgataatttatttaagaatatagcattttaatatataaaactaagtaaataacactagagagggatgaaaagttaagtaactcctcattaaaacatgagaacacgcgcgtgaaaagagaagaagagtgacgtgatccttgacactcttttcggtttatggacataaataaaagagaaaagtgttggctagcgtgatggtggcgaagatggcgatgatggtaatagtaacaatgacagtaccgatggtgatggtgacgacaacagtggcggtgccgatggtaatagtgatgataacagcgacggtgccgatggcgatagtaagacaacagtggcggtgccggtggcgatggtgacgacaacagtggcggtaccggtggtgatggtgacggcaacaatggcggtgtcagtggcgatggtgactacaatggcggtgccggtgacgaaaagataattacaaatatatattgatttaagaaaactaaaccctaagatactatacatggaacccaaacaaaaatcattaaacgaaatgaaatcatctcaagtttcaattttcaaaaatctagcagcaaaatagaatagtacaatggtgatgatagcttcggtgacgattttccggtgatgatgactccggtgacgattttccggcgatggtggcttcggatacgattttccggcgataatggctttaaaagtagtggtggttgtggtggttgtggaagaaaagaagaaagaagagagaagatgttcatgcagaagaaagaagaagaagaggatataattgtatttattacatataatatacacaatatcaccttatggtttttgaagtgttagtttccaaattattaaatttttttaggttatacttgcaaatttcccttataatatttacaaatggcaaaaaaatgattggaatgactcagaactctatcaaaaacgtttacttagatttaaactagctagtagtataaagaagaccactctatttgtttatttcctagtaaagtaacgaattatttcttcttgagattctcccacaattgtgtgccaacatcaaacaaaacaatacaaaagtttataaaggcatgactaaaaatgttatgaagttttgaccattgtatttcacatcatgaagttttcttgttaagcttgttttagttaagtatttcatgtattatttctcaccacgatacatctaatctgacgtactgaatttcaaaacttttgatttgtagcattttatctaataaattacaagttaattctacaaaaattgaaacccattccatcgaatgcgtggtttaagtcccaaatttttatcttctagatttttaaaatttttaattttaaacaaaattaaaataaaaaacgattttacaagagaaagtttttgccttttcgagaagaaccgcaaccttcccacaatctagaaatcaatctccacttctcaacaatggaacaaaaatcttttatatctctcgaattcaacaatggaacaaaaagctttccttaaaacaaaatttttttatgtcaaaccatacgagcacaaaagacagataagtcttttgttattctatatttgatttgagccagaaggaatatctttgccaaaacgaccaaaggcaaagcccattttgtgattgccaagagcaacttatcagtaaaaggttaaaacatagtcaaattaaaccggtaagtgttggactttggaatccaagataattaccaagagaaccaaggattccaccaaataaaaatatatctattgttgtagtttagtatacaaataaatattttattaaaataatactaaattagtaactaatttcatttatcaccaaagtgattacaatagaataatctataactttttgagtgcatctataaaaaatgtcacttaagtaatagccacaatccattagtataaattttcgtttgttgaaaaacgaaggccactagggtgaaagatgattatgctaaggtatattcacatcaaaatatatggtggttctatcattttcattgtagttgtgttcgtatataggttaggttagttaaaaactatttaaactttgtcatgaatattcctatataaaagtgcatatttgaccataccaaacccatacatacctaaccggctaaaccccatttgctctaacaaaaggtctacggtgacaacaccacacgcacgcatatgcaataatagtattaactattaagtatatgaaatacatatgaatatatgcttcttctttttttgttaactagggaaaatctagaaatctagaccaatgcctaaactaattttcgaaatacagaaatcgaattttctttccactagaaacgtttacgggtggctaatctgtgactgtgagacatatacatttctcatgatatgttgatattaagtgaggttgaggctgtgtcaaaaaaaaaagaaaaaaaaaagtgaggttgaggttttgaatctaagcaaagaaagatcatacacaaactccattgagatgcaaatttatctctcctaatccacttagatcatcctcaaggacgtatacataatgtattatgaattagatatttcaccttcgtgtccactacacttcattggtaacaaatactctctctgaatttgaggttttgagttttgcacatctattaagaaaaagtaaattttatatttttagttattattttgttagtttaataatattattattatttatctcattcttttattggtcacaaactaaattaatgatgatacttttacagaacattaatcttaatggaataaattaaaaattcaaaacattaaatttcttggaacagatggagtatatcattaggactaatgattgcagatagtgtgtaatccaactatatcatttggactaataattgcaactagtgttttaagaagaataagttctagctagtaattataaatgacgtttatcgagatatcttggataatggaattaaacttttaagcgtcttccttgtatccaatgaatttttataattttatcaaattaaacatgccagttttaatgctattgtcatcttgttgttataaaaatatcacactccaaaaagattgtaagaatccttaaatatcaaaattaaccaataaaaataactaccatcatggttgacagaaaaaaaatttaactaccactcggttcacaacaagcatatgatttactgcaaaagctcaccataatatatatgaatcgtttccgtgactttttccaaaacaatataaagacggtcgtaaaactttatcatctgcgtaaattgttgtaacaaagtttttttaattgtttctatttatgtgattttctaattttagatctattatatttatcaaaactttagggttttatatgtttatttttgggttttttgagttatgagtccatgagtttgctcaatttgagcttaatactgaaaacacggttctgtagaatcgaaaaaacaaattcggataaaggatatatcacataatatttgtttcgtttttcgttgttttgtcgacggatcatggaaaggaaatgacaagttttatggataagagtgattttgcaccttattaaataggaagtcgctaaccatgggagttgctaatttgcgtagaagtctatctccactacataaagaagtcgaagctgtactctggatgatgaagtgtatgattggtgccgacaaccaaaaaataactttttttacagactgttcagacttggtgaagatggtgttttctccaaccgaatgattagcattttcaatatatgtggaagagttctagagcgacaaggaaaaattcacaagtttccctatatttttaaattctcgaactgcaaatgttatagcggacaatttgataagaaaaattcatactgaaccgttacatattacatatggaaataatttatttaaaaattggcttttctaacttttaaaaaaaaatttgatgataaaaaaaaaagttacaaatccgaaattaattatgaagaaaaagaaaagagtccgaaaataatcaacataatgtttatgtaaaatgatctatctataagataagtcaacttaaggtaaaaaaacaaattatatttcaaatcgaacaaactagtcgaataaaaaagaaattcaactacaaaaaagactagacaatgatggaattttgttataatttgctttgaaaactttacttaaaaattactataataataataataattaaaaaatgacatcaaagtcgacgactactctataatccttgcgacgaccgttcaacacgtctgacttacatattgtctctctgcaacttttcattggcagatacacaaaatctttaattcttaatccaaacccagaaacaacctctgaaaccacttcatcatccatgaaagagatcggctcaaaaccaagaaagttacttcctttatgcttcatcatcttcctctgtttttgttcctctgttatggctgcagatgaagacgacataagatgcttaagaggactcaaagcatctctcacagatcctcaaaacgcgttgaaatcatggaacttcgacaacacaactcttgggtttctctgtaacttcgttggtgtgtcttgttggaacaatcaggagaatagggttatcaatcttgagcttcgtgatatgggtttatctggtaaaatcccagattctcttcaatactgtgcgagtttacaaaaacttgatctttctagtaatcgattgtctggtaatatccctacagagttgtgtaattggttaccttttttggtatctcttgatttgtcaaacaatgaattgaatggtgagattcctcctgatttagctaagtgtagctttgtgaattctttggttttgtctgataaccggctttcgggtcaaatcccggttcagttctcggctttagggaggttagggaggttctctgttgctaataatgatctctcaggtcgcattcctgtgttctttagctcaccgagttattcctctgatgattttagtgggaataaaggtctttgtggtcgtcctttatcttcgagttgtggtggtttaagtaagaagaatcttgggataataattgcagctggtgtgtttggtgctgctgcatcaatgttgttagcttttgggatttggtggtattatcatttgaagtggacaaggagacgaagaagcggtttaaccgaagtaggagttagcggtttagcgcagagacttcgtagtcataagcttactcaagtgtctttgtttcagaagcctttggttaaagttaaacttggggatttgatggctgcaactaataacttcaactcagagaacattattgtttccactaggactgggactacctataaggcgcttcttccggatggttcagcgcttgcggtgaagcatttgagtacgtgtaagctcggggaaagggagtttcggtatgagatgaatcagctatgggagcttcgtcattctaacttagcaccgcttcttggtttctgcgttgtggaagaagagaagtttcttgtttacaagtatatgtctaatgggacacttcactcgttgttggattcaaataggggtgaattagattggtcgactcggtttaggattggtttaggtgctgcaagaggtttagcttggcttcaccatggatgtcgacctccaattctacaccaaaacatttgttcaagtgtgattctcattgacgaggatttcgatgcaaggataatagattcagggcttgcaaggcttatggttccctcggataacaatgagagtagtttcatgactggtgacttaggagagtttggttatgtagctcctgaatattctaccacaatgctagcatcattaaaaggtgatgtatatggactcggtgttgtcctcttggagttggctacagggctaaaagctgtaggaggtgaaggttttaaagggagtttggtggattgggtgaaacagcttgaaagctcaggtagaatcgctgagacattcgatgaaaacattcgagggaaaggacatgacgaagagatctcgaaatttgttgagattgctcttaactgtgtgagttcaagacctaaagagagatggtcaatgtttcaggcataccagtcactgaaagctattgctgagaaacaaggctattcgttctccgaacaagacgacgacttccctttgattttcgacacgcaagagaacgagaaagtgtgaaaatgaaccttttatgatacgaggaggaagtaagagtataattatttgttgtctatatcatcttgtactacttgtagagacactatatgttattgtaaaaacagaaatgtatatgttatttgttttctcttgtgtcaaagtctttagacatgttatgtgttgcaagtgtgtctttctatagtattggaagagtgacaaaataattttttcacttgtattttcttttaagaacaaaaagaaagtgaacaacaggataaagaagatgtctctgcagaatcttactttaggggtctgcttctcgatacagtcaaaatcaatcccagaaaagaagctaaagaaggcaagaaagaaagagaaagacaagtttttagcatctatggtcactcactccttttgaatttcactttgtaagatgctatcaaaattacacagagaatataagattcccaaagttcacaagaacccaaaaatgaaaatgtatgtgattctaaagttgtgcaaggacaagccttgtattaagatgcaaatatcattggagtgggagaatgatttttgaaaatggagcaactttagtttaatggttttttgctttagccagaggaaacataaaaaagcaaactttaaagttaacagattctaaaacaaaaggcaaataaagaaagatgaggaaaacaggaaacagagagttagataaagacataagcctataataactaaatacaaatgttattacaaaaactcttaagaagtctttaatatcttagcaacaatcttctgaatgattttcaatctttagacacaatgttccaaaacgaaagagagagcagagacttcaccttccaaaattctacagagcaagacttcacaaagctatgagttcatagcatatctctaacatctgaagttaatgattgcctcagaaaaaatagtagcttcttgacgtggaaacgtaattgagaggttgaatacttcactgtgtcttgagacggtagaaaaacccgaaaatgaacgaagcccgcatgacataaacattacagtcaatatcatactcttggtggccgtctcgaagtttctgctttcctgaagaaatagatttgaaacaaaagcttattaaagtagagttctttctgcagtaataaactttaactaaagtggtcaaagttcttcacaagtgcctttaattcttctctaaggctttaaaattagataaagaagaagcttttactaaaacatgataacattgtctgctttcaaaagacgagctctttaatgtacacaaaatgtatagtgacactgaaaagaaggaaagaacaagaattctgcatgctaataatctttttagaaaccagtgattatcggtatctgtgtatacagtgacaacaaaaaaacttgaacagaggaaacactaatattggatgattagtttttgtataaacgaactttaaacaaacttcatgacaaagttctcaaaacgcttgatctctggtagcaaactcaaagaagcaaaagtaaaagattgaaaattcgagagagaagggataagaacctgttgtggataggatcaggtccattaggaacttttcgcttgcttacatgaaacagattcacatccttaccactaaaccgcaaagtcttgacattttctgatgatggaacacttggtgcagagtttgctaagataccgacaagaagaaacacaatcaaacccaaagatgcaatcactccaaccaaagctctaatgccatttccacccatactgaaacctatgtccctacagcttcctgtttaacataaacaactgaccaaccaaacccaagaataaactgagcagaacatccatgatgttggtgaagtgactgtcacataaatagagagagatatctttggacagaagaggctcaaaaaaggggaaagcgaaatgggaagcaaaaaacaagcatttaggttgtttttatataccttggaagacaaatccgtgattggccctatttaaagatgaagcaacacaaagcaacaatatacatacgtaggtgtccacgtagagagagagagaggaggcaagagcaagtgaaagttaagaaaaaacatatctttatgtaacatatgggcccgttgagtacctttttctttgctttgatttgtgaattttcatgcagcaaaccattggggacctcacaagctcccttaactacatatattttaagccattttaaaagcagaggacagtgtaccttttgtgactgagtgtattagcaagcctactactttccttaccactatcttaaatcacttggatgtttcctttaaacaataacaaaatcaattaagaatgtaacaatacacaagtaagataaccaaacctgtgaaaaggagctagagcctacaatttttcttccttgttaagtattccctccctaccaaaagccaattagcagcaagaaatgtatgcttgttcttcataacctttaaacgataaactaaagcaaaaacattaagaaacatatctaaactgtgaaaaaaaaagaatctatatctgattgacagctagggaagattgagccagtttgtttccatgacacaagcaaacttccttttggccttggtgggaaagaaaagcttgccttctaacatagtaaagccaaagtttgaacagatctggccccacaatttcattactatatatcagtttctcctatatcatttagaatcttacacatggtcaggatagtgtccttatagcattgattctcacagtgattgtgtgagcaaagccatgccagtattgcactctagaggtgtcaagttacatgctctactgaagtgttatgcaccaaagtaaattaaattagaaataaagaaagaatgatttaacacatacctcagttacgtcactttcggtatggttttctttaatacgaagtgattcttacgattgttacggatgtatatgatacatagatatagaaacaatgagtagcatggtggctctctcagaccttaagagcatcaaaagaggccatatgtaatagtaaaaaggagaaactctaactgacttcatatctcaaactgtatacagattacagctatatctctacttcacagacacacacaagccgacatacaccattaccgattttagaactatcataagactgcaacttgtatccagctttagtatttggctacaaacaaaatggcgactgacggacaaaagcacctgcaaaaatttaaactgaggaactaagaatatgtgacatgaagaaacagaactgaaaacaaaatgatcatgtatcacatgacagaagtaaatgctcctagtcaaagcttttgaaatgtaacagccagaggagtagtgaatatatatactcatttacactggaaacacttacactagtattcaaaggttagaaggaactagctcttcagtcacagtctctcttcattgccttaaaccgaaaaaaatggccagatataactgtcgacaatcactgtggctttaagattttcttggcttctgagcccattttggtccatatatagctagatgtgtccggccaaaccttctatcagtcatctatgagaaaaaatttcccatcaacattcatacaaccccattcatcaaacaagtaataaaagggaagtaattaccttttcaaggcatccacatgaatcaagcattgttgttcgtgatgggtactcgaccaactaggtcagattttgtccaaaagaggacgagtattacacattgacccaaaatccttataagatggtttaaaaagggaaatatatagctactcacaataaaagtattttccccaatcgctggtgacttagcaatctgatccatcagaacctcataatcaacctccatgtaaggtggcgtaacgctgatataatcaaacactccatccttacctgatagtaaagaaaagtcttaatataggttctatttaaagctgaagttaagtggtgaaattgacaataacatcttcaagactagacatacctactaatttatcagcacgttccaggaagttttcaactcgagcagtgtgtataaccgaagcatcaacaaacccagtgtgttccaagtttggttgtagaacatttgaaacaacccaaggatccatctcaacaaaatgtgcctgttgagaaataattcaagtccaagatggaaacacatgtttagtgatcacttaaagtaaaagagaatccaacaaagatcatacaatcacagttctttatttctttgctacctcagaacatcctcgactgattgcttcaatcccaacagaccctgtaccactatacaaatccaaccacctaccaggacgcagagacgttggacaaccaccagcagcctaaataatgagaagaatcatgttaactcagacaccaacaaacgcagaagctcctaaaattagttactcttacctggagaattccaaaagctgctcctttaacaacttccatcataggtctcacatccattcccttaagagaaagcaatttctttcgtttcgccgttcctgcaagaacctaaaacaatctacacattatagatatccaacaacagtaacccccaaagcaaaacacaataaaataagcaaatacacacctgcagtaacctatgagttgttcttggctgtacaacaacaacttcttctacttgttgactattccttccactcattttctcttctttccttctcgccttctacaatgagaactaaaagtttcatctctcaactattcatcacaaaccaaaaaaaaacaattatggaaaaaaaaaacagaccttagattgagacccaaagtcatcattagcatcataaccatatcgttccagcaacaatttcttatcctcacttgccaaaccagttcctgaatctgaaaacccacaagacataaactgagaaaagacagaactttatgaatgattctgtgaaagatgcaaaatttcacacttttacgactcgagacgacgaatgttcgaacacgcagtggagtagaacccttaaagagatgaatttgagggaaagaagaatacgaaacacccagattcttattcatgtcaatgttgattcctagtggagagaaagatgacaacaaaaccgccattgctgataaagttttcgactttgggagcttgcagagagaaatcgtctgcagagaagacgaatgatagaaatagagttaaaaccttcttccagagccagaggatctatttctgtatcaaaaggtgtttaattttgagctttgtatttcaagagacttggttactacttaagtactaagtaagtactaataagagaagagatataacttattgaaaaaacatagttcttgaaaatcataaaccagttacaagagaagtaacaacaatagggaaaagaagggatctaataatcgaaatcattcaagagttgaggaaactgtgacaacatctcttggtctttatctagtatttcgtcaacgaaggaactcgcggaatgacatgttcccgaggcctttgaatcgatgttttgagagatgtattcggcttcgatgttgaaatgatgttcgttctgcgtaaaagtgaggtcgctagtagctgaggatcccactacttgaggaaccgggtccgagagaaggaaatcgctccagtagaagttagtaaccggtgtttgaggtacttggtttggctgagtgatactagtagaagatgatgaggaagagcatgaagatgtggttccattgagcagatgatttggatggctatagaaatgaaatggagtagtttggtactcagaggaatttgtaaacatcattggagagttggtgtaataactctcatggtttgttgttgtgtttctcatcatttcccaagctgagttggattgtgtgagtatagagttgttagatggttctgttttgaaggatgcatttccatggccgctaatgtttctgaattctgcaaggagttgagaaaccggtttatgagtcaccgggtctatccccattttcatcagcttcttcttcagctttgtgttccagtgattcttcacatcattatccgttcttcctggaagctttcgtgcaatggaagaccacctgaaaacatcagaggttacaattattactaatgagataaaaagtttgatagattcttgtcattgttaaaaagttagttagcaattaggttgcttcattacctgctgccaatggctctatgacactcaatgataagctcttcttcttgggtagagaagctgtcatgtttaaggtcaggtcttaagtaattagtccatcttagtctacagctctttccacatcgattcagacctgcgccgaagaacgaaaaataactcagacttgtttgaaatgagatttcttaagagttaagagaaatgagagagtttttttttggaaaaacctgcttttttggggatcaagctccagtttcctacaccatggatagcaacataagcaaggatcttagcgtcttcttcctcggtccagagacctttcttgacattggacttgtcacaacaaggaggtcttcccattttttggtattcaaacacaagagagaagatgaagaagaagaagaagctgagaaatgtctgaaaggacaacaacaaaggctttatggaaatagagtgatgcaatgcaaaagctctgagagagaaagagagagaaggtgaggatctcatgcttgaaggctcctaattaacggtaattgcatgattgttacacttcattagaaatatagagtctcgaagtgcatgacgtagttttggcaactatcatctcatgtacactactactgattgtataatacttaattcagttatcatgtatcgcttgcttcaggttgatgataacataaaccgacttttattaagttttggtctagttatgaaccataaggaacataacttgcacatgaaaccagtaacatagaatcagaattatttttttagtatatagttctaaatttttcattctattgacgatatgtttatctacccgaatggcgaaaacccggtttttcgctatacaaaaattttgatcctttaataagagctttgattttacttgttgttcttaagatgagcaagctttgcaactctttctgcaatatccatggtctttgtctgaaccaaccatgtatgttggattcttctggcattcccctgcctttgcccatttttcgcagctcacattctcgtccatacatccagattgcttattaaacgctctttcgaatgacttaacgtgaatccatctggttgctgaccatttctctccctcaaccactggacagcttccatgtaagctatttgaatctgtggttgcatttgggtgaagattgaagaacagtaatgcatcccctttcctcggtttcactgcaaagatacataaatcagatagagcaatataccatttggaaaaatagttatacctttcattatcatttaatcaaactactacaatccccatttgtgttgagctttcacaattaagccaaacgcatgttcaggatacagtattctatatcaagcaagctatatacagtgatcttacctgcatagccttgttttgcacattcggtccagctatcgtctttcaactgagttgctttaccctacaagaatgtgtgatcaaactgaaatgaggctactcaggaaacgaaatcgaaatattagatgaaaatttaaggaaccagaagtaatatatgtctttaccttccacatgggaaacactgtttctcctcccttttcaacattggacaagtacatcaatactgtggcaatccgatgaccaccgagctctagattagcctggtcgtgaaagtagtcaaaatgcggttcatacttttgaccattctcataatgcaatatttgcatggattcaccattctctgatccgcaacacagacaaaaaagagatgagaagttgtaagcaactaaagtctaaacaaagagacagaattaggaaatctatgtacatatggccaaaaataccttcgggaagaaaggtccacgcagcaagttttgcctccacattacttactatatcatcctacacatacatagaaccataccattcaaactcaaaggttaacaatcagtgaatcacacaatctctagactatccatatttgcaatgaagctgctactttgtctaaccacagaaacagaatcctacagtattgcaggaaatgcatgtttacttggtcaagcgttgatcagtaacatagaactagtctgcctaattgctgaagtaatctaacggagtacaacgcacacaaaagccacattagacctcataataacaatcattctccaatgattagcacgaaactcaacatccaaatcaatccagatacaaaaccaccgcttctaacaagtcattgcaaagttctacgatatagccaacataaatttctatagatgcctacatgttcagaatattaactaacctgtcgtttggagagaaacattccagaactagtgcgtacttcactctcaacactctcaccagaatcattatcagccaccattgacttctcaagcttccctttcgcctaaaaaaacaaatatcacaatcacaaaaacattctttcatcatcatcatcatcactacttaaaaagcttaagtaaagatgtttaagattcaataccaatttgataaaatgatcacattcctcatcagaaagaaacccttcatacaaaaaaactctgcaaaaaaaaaaaacacaaaaaaatcaaataaacaaaaacaaagattcaaaatttcagataacaaacacaaaagcaaacaaacctaggagtccaagagagttgagtgacacgagttggatcaaacccaaaagaagaagcacttgttttcatctttatcactgacccatctctgcaaaagattaaatttctcagtcaaaaccaaaaaaaatcgaagaacagaattcgaatccatctcaaatcatcacaatctaacctagtgttactcgatctagtgaggaagcggttaggtgcagatgaaattagagggagagtgaagagaaaacagagggaaaatgcgagaaaaatccgagaatccattttcgtgagaaagacttgttgttggtgcgaagaagaccaagacgatgaattgtattaatgctctactcagaattgacccaagaatgtttcttcttatcaatttgtttcccatagttttgagattttactgtttcgtccccttttggagtatttatgacgcccactgtatttttctctgactttggcttttaattaccgttgacttagtttacttttgtaggtcgtagtcaatcgggcctgcccgcatccaaacggaccacttgcattgtgcccgatttttttctgatccgcgatggacctgtccgccgacgaccgcggtcttgaaacacgactcgtaggggtggacattcggataagcgggtcggattcggataaaaccctatcgagtacaggttcttcaggtagaaaagtttaggatccaatagggtaaatctaaaatatcggttcggtgtcggttcgggtctaatcgggttccggtcggttcgaatatagagttttgggctcttttttggaaccgataccaaattttcggatgtatatccagatttttcgggtaaatacccaaattttctggtaaaatttcgggttttaggtaaaatttagattttcgaataaaatatccgggtattttcgggttcggtttcggttttttgggtagaggaattttggacccaatagggtaaatcttcgagttcgagttcggtttctggtccaatttttcgggtcgcttccggttcgggtaatcggttccggttttcttgcccacccctagtaggttgtatgattgttacacttcattagaaatatagatatcatcatgcttcattacaaaacaccgggtttttcgttatgtgaaagaatctagtcacttgttgttgttcttaagatcaacaagctttgcagctctttctacaaaatccaagggaagtttccgaacccaccatgtacattggattcttctcgcattcccctgcatctgcccattcttggcagctctcatgatcgtccacacacacaagtttcttcttaccgaatgacctaacatgaatccatctagttgctgaccatttctctccctcaatcaccggacaacttccatgtaagctatttgggtccgttgttccatttagatgaagattgaagaacaataatgcgtcacctttcctcggtttcactacaattaaagattacttattcaaataatgtaatataccatttgaagaaatagttgtatctttcataaaacatagaaccatgctacaactacaagtgtgtacatcaaacttgtatatattttacctgcatagccttgttttgcacatttcgaccagctatcgtctttcagctgaggtgttttaccctataagaatgaatgatcacattaagtgatgatttaaattcaaaaactcaagtgatgatttatggaacaagaagtgatatatgttttaccttccagttgggaaacactgtttctccaccctttgtgacattggacaagtacattagtacggtggcgatccgatgaccacctagctctagagctttcttgtcgtaaaaatagtcgaaatgcggatcatatttttgaccattctcatagtgcagtatttgtaaggcttccccattttctgatccacaacacataaagataagatgagagtaagaaacagaattagaaaaaaaaagaaaaatgtatatgcctcgcggaagtaccctcaggaagaaaggtccatgcagcaagtttagcctcgacattagctactatatcatcctaaaggttgaagtaaacaaaaccaatagtaacttggtcaagactcaagcgtttacttctttacaaaaaaaaacacagagaactagtctgtctatttagtgaattaagctagtcgaatacaataaaaatacatagtaaaattccactgctctcacctgtcttttggtcagaaacattccagaacttgtgcgtacttcactgtcttcactctcacctgaatcaacatcagccaccaccattgacttctcaagctttccttttgcctaaaaccaatgtttacatccacaacacagtcctatatgatcacaaaatctatataattttatgaaaacaagaaaacttaataacatgtttgattctataccaacttaatcaaatgatcacattcctcatctgagagaaatcctttgtataaaaatgccctgaagaaaccacgaaattcactttctttaacacaacagaacaaagatcatgattacgtaattcagatacacaaaacacatacctaggagtccaagagagttgagtgattctagttggatcaacactaaaggagaaagatgaaatttgagagaaaatcaagagaagagaaagggaaaatgcaagaaaatattgagaatccatcaagaaattttttcttgaaaaagagttttgttaaacaattttgttccttatttactaatgatacccaatgaatttttgtccatatgtttttatttctcgttgactagtattttttacttttaataggttctttcactatttttttcaccggaaacaaacttctgttttttttttggttgactaataataaaatttttgagttttcagataatagtaatattgcaataccaataactcaaccatgttccaatataaaacatcagttaccaagagagactaccctccttcttctgatttctgaacctttttttttgggcaacaccttcttaaccttattgtcataatcaattgttatatcaatatccggattccgaaatacgattcgattcgattcaaaaaataaaaacattcaaagttttgattatgaaatcatgtctattgactttatattaatattttctatttcaatttagatcttcttccatatatatttatttatttgcataaataaatttaatttttcttatatttctgactaatatcttcagaaaaatattgtgtggcatctcttagaaatattttaattaatgagtttgaaattttttataataaccaaatttttctataagttggattctaactcacttatccagatc

SEQ ID NO: 478 - DNA, 82890 bp, Arabidopsis thaliana
gatctatcaactataatatgtcatactcatacatttgttcttgtgtatacatgtatatgaaaacaaaattatatttactatttaatataaatgcaaaaataaacaccgacttgatatattatcttaaatccagaaatcctgttgttgatataatatataattaatcaaataaagatatttgaatttatttgataaacttgcttcataactccaagaaacgaatcttaccaaaatcataaaactaagagatagtttaatgtgaataaatttagaaaatcattttaaattaatttttaaaaatatgttaactaaaaaatatcttgtaattagttaattagtcatcttgatttaaattaaatagttccctaaatttaatatttttcacttcgaaatatttacattaaaaatttaaaaacgttatgttttcttcttaaatctaatttaagattaaagtaaaaaaaacaaaaaaagcaaaatcattgataattaattatattgcttcaaaagcagtacttttcaaaacgtcattttcaatgcataaaattgctaaaccgttcaaactttcttgagacattgatgatctcaaataatttttcagcacgcttagagaaacttctttccattgaggctactgtcacaagagtggttagtaaaattcgataagcaataaagatatttggataacaaccaatagtattcacaaactctaaaatctcaataggtgccatcacttcattatgtaaagttacctgcaatatttttaacccagaaaaaactcatccaagtcaacatccgatgaaccactatgaaaaaatgtattataaaaagtagtgcaacgttctcttaattcaatagcatcaagtgactttagcttcactgaattatataagaatccaaaaacagtctcaaacgttctcatttccacaattttacttttcaaagaagcaattgccatatacacaataacctaaaataatcaaaattaaaagtatcctcaggggtttgaattacctcatcatgactgatctcatcaaactgttttccctaaaccttctacacttacttagaaattaggcatcaacatccatgtcatcagcaaaacttttagctacattcatacttgaactaaatccatcaattctataatttccaaaaaaaaaacgacactacaccttctacttgcttcattgcactatcaatacaattagatttagcttgtaattttttactaaccatgttaatagcaaataaaatgtcatgccaaataatcattccaagtaagaactcaaaattttcaagtgcatcaaacaaactttcagtctcactctttgatatagcatcttcacacaaggtatatatttcaagtaaagttggccttatttgaggagcttgatatcttatagccttgattctcccatcgagtattagacatattttttaccgtaaaagatggaacatgcttaagtaaaatactccatcttttggtagagcttgtaaatatagtatagatgcgttgcacaattccaaaaaaaagatacaactttcaagcaagaatgtgccatgtcactaacaacaagattcaagctatgacaagtacaaggtagaaacaatgctttcggattaatttctagcaatcgcttttaaactctttgatgttttcctttcatattagaaccattatcataaccttgtcctctcacattctcaatatcaaaatcaagcgacttaagagcattttgtaattctttaaagaggtctagtcccgatgtatcatctacctttaagaactctaagaaatacttttctattcttatttttccacttgacatattcacacatcgtactattatactcatttgtttttgatgactaatgtcaagtgtataatcaaagataatagagaagtattttgcctctttaataatacaggggatagaaagtccaaccttataagcaagaagagaaatcagctcattctgattatcatgcccaagatagtgatgatgtatcttatgagtttggatgcgtctaatatgatccttcataatcagaatgagctgatttctcttctctcttataaggtttcagcaatcatctcaatcattcctaaaaaattaccattactattttggtaaagtatatcacttgaacctcgaaatgccaaatttcttttcaagagacattttataacataaattattctggaaaaaacttgtccccaacgttctttttcttttgcaatttatttctggaattcttaatcaatagtttgattacttagaaatctaacttttaagtcattccaaatcctcatactagccatatgctccacatttttctcatgatttttttagtctatcactaatatgtttccaatctcttaaaccttttcttgctagtaaacttaattgaccatgagattgaaataacttacagcaaaaacaatacactttatccagatgctgtaagtaaatccaccactttctatcatcaatgtctccattacacaactttctaaaataatacttatatgcaaaatgccttttagttacatcatcaataggatacacaatattcagttttcttttaggtcctttttcaatcaacaaatcccttgttttactgtcaagattattccaaattaaaaaaaaaaaaaaaagattattccaatttctagggtcatagatatcaaaaggtggaagttcatcatcaacattcacgttttacatattagatggatttgacatgttctcatgagactcatttacattatcatctacattttcacttgaatgatcatgaggattgacactaggttctacactaggaatggctgaagcttgactagggattgtcgcaagtgcaggtgttatgaagaaatgtaggcttcggaaattaacttattgttattttgatcttaaaagtttatgtactataaaagaatgataatgtacaagagcagttcttgatttacaattttgggaatgcgtcgtaattgcttcttgtgtgagtgtatttttatctataccagatttaggtcaatgagtaggtaggaaaaaaaacttccttaagtgaaaaaaaccttgaggatgcaatgatttaaaaaaatccatgcaatttaggtatgcagtccataaacatgtcccatgttataagattacataattatctaaagctacaaagtcaagaatgtgaactacgtaattcaaatttgcaaagaacttcatatagattgcaagcaaacttaaaacaaataaaagtaaaagcattaaaccatttgaagattttgaagcaaaatatttaatcaaataggcagaattaaaatttattagatatgaatatcatgaagaacaaaagcaaagatgaaatgaaataaaacttggtagcttatataagaatctcattacaatttcaagtaatacgaaggtgaatgtgaagcttagtactcagtttttggagaaggtgagtatgatggtggtggtggagaactgtagacatatggtggtggaggagatttgtagtcaaccttaggggaaggtgagtagtatggtggtggaggagatttgtagtcaaccttaggggaaggtgagtagtatggtggtggtggtgaactatagacgtatggtggtggtggagatttgtaatctaccttaggggcaggtgagtagtatggtggtgggggtgagctgtagacatacggtggtgggggagatttgtagtctaccttcggggaaggtgagtagtatggtggtggtggtgagctatagacgtacggtggtggaggagatttgtagtctactttaggggaaggtgagtagtatggtggtggtggtgagctgtagacgtacggtggtgggggagatttgtagtctaccttaggggaaggtgagtagtatggtggtggtggtgagctgtagacgtacggtggtgggggagacttgtaaactactttaggagaaggagagtagtatggtggtggtggtgagctgtagacgtacggtggtgggggagacttgtagactaccttaggagaaggagagtagtatggtggtggtggagaactgtagacatacggtggtggaggagacttgtagactaccttaggagaaggagaataatatggtggtggtggagaactgtaaacgtatggtggtgggggagacttgtagactaccttaggagaaggagagtagtatggtggtggtggagaactgtagacatacggtggtgggggagacttgtagactaccttaggagaaggagaatagtatggaggtggtggagaactgtaaacatacggtggtgggggagacttgtagactaccttaggagaaggagagtagtatggtggtggtggagaactatagacatacggtggtgggggagacttgtagtgtaccttaggggaaggagagtaatatggtggtggtggagaactgtagacatacggtggtgggggagacttgtagtgtaccttaggagaaggagagtgatatggtggtggtggagaactgtaaacgtacggtggtggggaggacttgtacacaacctttggagatggagaataacatggaggaggtggtggacagacacatacatgagggtgtggtggagatttgtatagaaccttaggggatggtgcgtggtatggtgatggaggagacttgtagtatactttaggagaaggggagtagtatggtggtggtggagaactgtaaacgtatggtggtgggggagacttgtagactaccttaggagaaggagagtagtatggtggtggtggagaactgtagacatacggtggtgggggagacttgtagactaccttaggagaaggagagtagtatggaggtggtggagaactgtaaacatacggtggtgggggagacttgtagactaccttaggagaaggagagtagtatggtggtggtggagaactgtagacatacggtggtgggggagacttgtataaaacctttggtgaaggagagtagtacggtggtggtggagaactgtaaacatatggtggtggaggagacttgtagtctaccttaggggatggtgaatagtatggtggtggaggagaactgtaaacatatggtggaggaggagatttgtatacaacctttggagatggcgagtagtatggtggtggaggagaactgtaaacatatggtggaggaggagatttgtagtctaccttaggggatggtgagtagtatggtggtggtggggaactgtaaacatatggtggaggaggagacttgtatacaacctttggtgaaggtgtgtagtatgggggtggtggggagctgtagacgtacggtggtgggggagatttgtagactatcttaggagaaggtgagtagtatggtggtggtggtgagctgtagacgtatggtggtggtggagacttgtagtctaccttaggtgatggtgagtagtatggtggtggtggagaactgtaaacatatggtggaggaggagatttgtagtctaccttcggggttggtgagtagtatggtggtggtggggaactgtaaacatatggtggaggaggagacttgtatacaaccttaggggatggagagtagtatggtggtggtggagaactgtagacatacggtggtgggggagatttgtagtctaccttaggggaaggtgagtagtatgggggtggtggggagctgtagacgtacggtggtgggggagatttgtagactatcttaggagaaggtgagtagtatggtggtggtggtgagctgtagacgtatggtggtggtggagacttgtagtctaccttaggtgatggtgagtagtatggtggtggtggagaactgtaaacatatggtggaggaggagacttgtatacaaccttaggggatggagagtaatatggtggtggtggagaactataaacatatggtggtggaggagatttgtaatctaccttaggggatggtgaataatatgatggtggtggagagttgtaaacatacggtgatggtggagatttgtactccaccttaggggatggcgaatagtatggtggtggtggggaactgtaaacatatggtggtggaggagatttgtagtctaccttaggagatggtgaatagattggtggtggtggcgaactgtaaacatatggtggtggaggagacttgtagtctacctttggggatggagagtaatatggtggtggtggagagttgtagacatatggtggtggaggagacttgtactcaactttaggagatggtgaatagtatggtggtggtggagatttataatcaactttaggcgctggagagtattctagtggtggtggtggagaactgtaaacatctggtaatggaggagatttgtattccactttgggaagtggcacagagtatggtggaggtgagctatctgtgtatggctcatatgccgcaaccattgttgccatgatgataactcctatagcgtagacgagatgggcagaaggccccattttagaagaagatatcattggcaaagtatttcttgttttggtttgtattttaaagaatgagtgctgaggtttatatagcaaagattttctctaaatccagctatactttccatatttttttggactccatctaactaagtcgtggaagcatgtctacacgatactagttggagacgacgtgcaagaacgttgacgagccgcttttctttttatatttagcaaacatcaactttaacatgttggtggatgtatcatattggtcaacgggctagtttaatcttttgtttttacctttttggggtcacttcatatcaatttttagatttttgatggatcttgggtataatttataatcgataattttgaaaaaaaatgtataatctattcaaatgtttataaatatgtatttatacatatatcttttgtaaaattagtattggcctatttataaatatttattgtgttgaatattgatgacttttttaaaagtttttttttattatagaattaaaatacttttgcctaacatataccatttttgtttgaagattagtgttctaaaatttgaatttggattctatctgtatagtgtccaagcctccaagatttatacatgcgttattaacagtctaaaggatcttccaaaacataaaatagagtgtcttctcgagtactctctgacgctcaagccaatagaacaacatgattatacaaaaagctagttctcgagggactagttatgcctcagctctgagtgttcttcgaaagtggttcaagactcaatttgaaccgaatatttgaaccgaatcgatccaaaaaatattcgaactgaactcaaaccgatttaaaaaaatacttgaatagtactagaacctttgtacctgaagaacccaagatccgaagatagccgaaaatatccgaaatacaagtatatatctaaaaaagattagttgtacttatacatataataaacctagtaaaaacgaatccgaagattatacttcatcttctataggattgatcttcatctaaaattttacttcaatctggttgaattaggccagtttgatcacagcttcaatcgaattcacagtggcaccaaaaagtgttgttgaaaccatggacctattttaggtggacattacttccttagccttcaaagttgtcgttaaggtgttttatcaacatatcaaacttgcgcataatgcttacttgaatttttattgacaaacgacattttagttgttaggaatttcattacttagataattgctattacgaaaccaggataactttacaattgtgttttgaattcaagaacggttctaaaagcttctcataattaatataaatttatttcataattccttgatgatttgcgtttattgaatgctttttgttatattttattttatcaccttgaatattgaaaactcttgtttattttagctttattcacattgcattgcttggttcctgtaaactcgatcctaaattactactgcaattgttaccgtgcacttgcggtaaattgatttggggtaaaaagcgttacagatatcctacggatttctcaagtcatgcatagggaatgacagtaagagtttttcttggggaaccttattttcgacgtatcttcgatgagccgatgtattgtctttctgtcctcatgttcaaataattattggtgactaataattcatcccagcaacaaccaatcattcgaaagtattataactgcaaatacatgggtttaaaattaaaaattacaggactgatcaaagtcaactttgataattcattccataattattaagaaaactatgtacttgtttcttgaatttcaaaactcaatacaaaaaaattactaactagttaacaaaaataaattatgtgctaaaacaacctattaatagagaatagataacgtgtcaaccaagcttattaccaaaaaagtatcacacactatacatttaagtggactaatttaaaaatgatctattgacgtcgaatttataaatatttaatttatcacccaaaaatagagggttaattttatttttctaaccctacaagtttgatattatgttattaacgaaatcatatttaaatataaaaatgattggaacagtgaaggtaatacctttaatcctctaatccacatgcgttcttatattaataacaaaagaaatggatacagaagtgtgtgcaaaatagttggatattgcattttcaattgaagtcttaattgttaaagagtgaatgttagaactaaaccaatttcaagagaaaaaaaatatttgattgcattttgtcataatttcttactcaaagttataagtgttttttctttctttctttataaactaatgagtgataacgttcactttttacggaatatagattatcaactgaaaaactcaaaaaaacaatgtttatcattctaagtattgcaaatatttttgtttgttaattctcctagcattgtcaatttataatcatttatctttttacatcaattttataaaataatattttgaaaccctaagtgaagaaagtgtaacaaaacggctgcgtttgattcacttgttgttggatacaagactgcaaggcatcaaacctttgcaatcacgtaagtcctgatattattctgatagcttttcttttttaattcataaatttccagtaatcacaaaaaaaaatacaaagcccaaaggccagacccaacaaaggaaaatgacaggacctgcaacaagaccacaggcccaacaagatcagaagagagagagcaacatgttgcaggagcatagatcaaaaccattcgatatagattagacccattctctagatctcaacaggttgttcctccttctttctatttagttacttggtttcaattgtctcttttttacatatgcttacctaggcttgaaacaattgaaaccaagtagctaaatagaaagaaggaggaggaaacctgttgagatctagagaatgggtctaatctatatcgaatggttttcttgatatccaaaaaaaaaaaaaaagagtaagggactatggaacatataagcttcagcaacttcatgaagttttatgaataattgaatacccatttctaaagcttcaaaggctcttaaattttctaccaacaaaaaggaagtaattccataaccaatttctctgtctataaaatttacaagtttaatattgatggaacaaatctctctgtctataaaataaatgaattttcagtaccaaaacttttacatcaccactttatttttacactgcacactttgctgcttgctctataattgtggtcagaactcagaatcattttggtccccacacctagcttcaagctcatagcatcttcatgagcagataaacaaaaatctttgaatactttttagtcaaattcgtactcaagaacgaaaaatatgtatacgaacaaaccctaatttcactgtattataaagatttttttttttaatcaaaataacaataaatttcgtggcatttttgagacactcaaaaattaaaacaagagtaagataaatagagagtgagtggtttagaagcgatgtgagccaaaacagagcaaaacttgacaagtctcataagaaacagaaagcagagagagtttcgtggggcacaagcaaacacaaagatgcttgagaccggatcgatttggggtttcacaggctcaacgatgacgagccttatgttcttctgggcgatgtacaaccaagtccacattgagaaatacatttacaagttgatgggatgggtttcgaattctgttcacataaagttcaacgagtattctggagaaggtcttgagaaaagtgaagcgtttgacaccatacacaactacttgtccacgaaatcaacagctcttggaaacagattaaaggccaacgagtctaaaaaaagcaaatctttggtgcttagtttggatgatcacgagacagttgaagatgtgtttcaaggtgtgaaggtgaagtggtcttcaagcgtgagagagaaccagaatcagtctagtacgaaccgtgataagggttttgcggagagaaggtacttgactttgagtttccatagtcggcatagagagatgatcacaacgacttatcttgatcatgttttgagagaagggaaagagattgggttgaagaagagagaaaggaagctttacactaataactcgagtcatgagtggatctcttggagattaggaacaaactggagcaacgtttcttttgatcatcctgcaactttggagactttcgctatggatccagagaagaacaaagcagagaaggaagcttggaagaagagaaggagaaagcgaggaagattactgaggaagaagagaagaacaaagcagagaaggaagcttggaagaagaagaagaaagcagagaatgcagagaagaagaaattgaagccataatcagaaggaagctgatgtaaacggtgacgtttgattcatttcttcaactacaagaaaactacgaagaaggatcagagtttgcttgatgctagatcaattaggattatgatcggaatgtttcttgatgtttttagtttatttgctaattggatattttaagttctatcttagaacatgttttaaatgctttttcttggtaatggtaacaaatatataatgtctctaatttttcctaaaaccatctatatatacatttttgcagtcattttgtgaaataaatcatgtagttgagacttatttacgatggctgccactggattttaatgtttgtttttgataattataaagaaaatcttcgaattaaatatttgacatttaacaatcttcctaaaatctctccacattaactacacgattatttactaaaataaaacttccaaaatatttaatatcatttaattacaacaaaattatcatttttaatattgcttttctccatgactataacaattcgattataatcatcaaagcgtagagatataatttgatagcatttaattactacaaaattacaaaatatttagacaatgattcataaacatatcataaataagatcaacattaataaaataaatgggtttttttacgggacgggtttggcaggacgttatttaataacatttgtaaactataaaataaaaatattttatagatagatacaatttgtaaacttttatatatactaactttaaaaaataaattgttcccgcggtacaccgcgggttaaaatctagtatagctacaatcttaaagaagtgtgagtactataaaatcttcctttagtttgtgtattgttcaatgtccatgactcgaaatgaatttcatgaatttattaaaaaaactaatgtaacattttaaggatttttcagttcaaattactttcttagtaacgaatagaaaccagagtaaatacgaacaacaactactcaataacttatggtaatacgacttatcccatactagactactatactagtcttgttgtatattatgtattttcttgtccttatataatagaaaagaaataccaattaataaacgtatggacatgaaatggatcaccaaaagattcttttgaggcgaatctttgaagatatgaaagatggtattggtaacttgtcccacaagaaatcatcttctcagtcctatcacaaaggactgtttttggtgtgacaacaaagtacttctttcttcctgttcaaaatcatctccactccactgctgacaaagatttctaatctcatgaagttatgatcaggagtaaagatatttagtgcaagtgtgttcataagaatttttttaaaaaatattataaatttggtgtgattttttaggttacatagttatatttgtgtgatggatataaattgatctaggataaagttatatatatatatatgtatatattaactgattatttgaaatgttggaacaatttacaatgcaacttaattttctttagccagaaattggtccccatacccctatatgacgtaacttcaaagatcaaagcccatagtatcatctctattattaaagcaaatatatcaaaatctttgaattatattttcagtcaaatcccaagaagctgaaaaggacatgaaatttacaccagtatactttttttattatagaaaacttggttatcaaggaaaaatagaaatttgaagatttctagttttagaagaaattaaaaaaattgagaaatttccattaaataaaaaagaaagtgtgaaaattctttctaaattaaggaaaatggaagaagatttcgttaattacagtatattacactaatactaagtaataatgcaaatgtcctatttctaaaaggaatatgtaaatgaataatacaaaataactaaagagcaaaaacaaaaagaaacttccacatcatcaatcactacgaagacaactacataaagaaacagagagagatcgccacaacaagaacaaagattatgacctaaaaccaaatcgagagaagatcaaaaacccttcatattctttttcttttggtcgaatcttcatatccattaaaaacaagaaaccagttattgaaatcttaatgagatcgatcgtgaagccgatgtttgcagaaaacctaacgaggattggatcaaacgtggcgggtctgttcttcgtctggtcaactctcaagagatacttccctcgacagattcagcaacttctcttcaatgcaatccaacgaataccaattttcaagaggctctcagacaagatcctcgaattcttctcaccttacgcttacatcagattccgtgaaatcgaagggtatagatacaactacgcttttgcagctgtgaagacctaccttggtgcaaaagttaactctgaagtgaagaatctcaaagggaatcaggttaaagagaacatgtctttggatttgaaacgagacgatgttaagatagaagaggagtatgaaggtgtgaagatgtggtgggagatctttagatgtgttaaagggaagaaaatctgtaggcttacttttcatagaagtaattgggatgttgtgactggttcttacttacgctacgttgttgaagaagggaaatcgattaaggcgaggaagaagaaagtgatggtgttgatgaataatccgagtttgaattggaaaacaagtatgaaaggtctttggacttgcactgagttcgagcatcccgcaacgtttgatacattggctatggatattgacaagaaagatgagattttcagagatcttgtggcgtttagagatggtaaagagtattacgataggattgggaaagcttggaagaggggttacttgttgtatggacctccagggacgggtaagtctacgatgatcgcggctatggcgaatcttatgaagtataatatctatgatcttgagttaacttcgatagggaacaactgggagttgaagaagctgttgatagctacgactaataagtctatcattgtgattgaggatattgattgttccttggatctcacgggagagagggaggttaaagacctaaaaggcgataaagaagggaagaagagtaatgcagttacactctcagggttattgaactttatagatgggatatggtcagcttgtggacaagagaggattcttgtgtttacaacgaatcatgtagggaaacttgaccaagctttgattagaagaggtcgtatggatatgcatattgagctatcttattgtacgtttggtgcgttcaagattcttgctaagaactatctgaatattgattcgcatcacttgtttggagagattgagtctttgcttaaagaaacgaagattacaccggctgatgttgcggagcatatgatggcgaaagaagttgatggttcacttaagggtttgattcgagctttggagaggattaagtggagtcaaaacgttaaagtcgaagaacaattacaacaaggagattaaccaatgagattctagtgatgcaatttcattagctgctttgaatttctgttcatattttagactcttaagtcaccaattctagcttgtaagatcaaacgtgttgaatttaagagctgagattaatatatctactacttcagcctcttgtagatctttaacagtgcttggattgacttactttggtgagcctcaatcacttccttaagcttctcgtagcttttggtctcatactccatgaacacttcctacaattttcagatcaaaccagaccaaattagtatatgttagttgtttattagaccacatatgaatagttaacagcaaactagtacctgcacatggaacttgactcacattgacaatgagtacttagccaaatcatttgcaccttccaaagttggtgatcaaatctattatatggccacaaagttgtttgaaactcaacctagatagaggataaaatttcgaaagcttcaaaatttagagagaggaaaaccactttctcgttaaagtctttgccttgcttcacaagtttgaagctttccactacagagagaccctgattcagtttaccagtaaaagagaagaagcaaatgtgtgtgagaattggtgattagggtctcacctccacttacattgtattctagcaccttcaacgaaagaaagggggttgacttgagatccaccaataaagaagaaaaataaagctcctcactttgtatagagaagacggcaaagaactcacttgaaattgcagagatcccgacgacatgcttcaggtctgttttggtttgtagccgattaaaaaagctttcgaagactgagtgagatgggcttcggattgggcttatgtattgggcctaaaagtttgcttatttttcttaccaaaaccctctatgagtcaaagagtcctttatggacatttaagtcttctcatttgtgcacaactctgaagacaactccacaattcgattattccaaaatcaagcttcacaagagaagaagaactcgttttttgaagtcttcaaaaacagtcaaagccacaacaaggagatttcactattgaaaaccaataaaattctattggtgctatttcattagctgttttgaattaaataggtacattaatgttaatgtaaaagttcacctcctacactttgtgtttaatatggattatttttgtgattagtataacagagactatagctagtaatagttttcgtaaatctgaataaaagttgcaagatgtatgtacaacaaatagtaattgtgttttatccatctaatttcaacaacaccaaaaatgatctcacgttgatattgtgggatattcaaaaagttagtacacgcagattgtccaccatgtgtgtcataacatcaacactttatggtaaatcaagaatgatcagagtaatgattagcaaggttactctaggtattcgcgatgctctgtaaagttggagttcatttctccattgccaattcatctcctcttaataacgctaataatatgctgatttaatgttaagaaaataatctgtctccttaatttcattatggatactcagtttgagagaaacgaatatcaactaatcatcttgagacataacatgttgttgattggtggtgataatatttatagaaagtatatagaacctctctaaaaaagcaagagagtttaaaacgattattcgttttttctataactaaaattttaacttttattcgtaaagcttattatattagtttttgttagtcatataaatactatgatatttaattcatgtggatcatcatattacaaaacttatttttggttgtaattgattaagtgtgaaagtcaaaattaagcatggacatgtaaatctaaccgacctttccaaactaaaccagagttgtaggattatcagatgtccaatgcaggtacaaattacccaaccagtggcggacctactaaaaaggtagggggttcagttgacccaggttaaatttacatattagttttaatgcaaaggaatcctaacggagaaagtagcacagttgataaactcctcttcaatgatccacctttatctctagtttgatcctcccttcttagacttttggtgtaatttttgttctattacatgatcaaaaaaaatatatgaaccaggtaaaaattaatcctggtccgccactgtacccaaaaagtattattagtcgttgacaataaaaatttttaagaaagcatatatattattgatcgaaaataattcatgaaattatttatatagtttgatgctactttattagctggtttaaatttttttctacttttgtaaaaatcaaatttttaacttttagtcagaaattctagcttataagatcgaacttattgaattaaataggtatattaacaactaacagtcttcgtagagctatgatgtcaaaagggggtcatttgaccccatcaatatttgaaatttttgtttacaaggtttaactatttggtagttgttcatacttttgtttaaatgttaatgttaacccccttgccccgttttcgaatcttattcttgcactcttctattattttatttttccatttatgcagtctttaactctttccacttttgtacatatcaaatttatacattttaaaaaaaaaattgaggaacaaaaagaatatatcatatcatttcttcaccactaatatagaagaattttgtaataaaaattggtctagacggtgcgtaggcgtttgacttggcgctcatgagggtataggcgccttgatttttttctagacggggaagcaaatcggtggaccggtctaaacggtcaaaatcggtttagacggtcaaatcgtttagtttataatttggtaattttattgaattttgtattttcaaagcccaccccatgatcaggcctgttgagttttgttatatatattattttccaataataatgagtttgatgaaatcaaagtggaaacgtccaattttaatgagttttatgcccatttgggctttcatttaataaaatgaaatggtcgacaaaaaaaaatcgtccaattaaatacgttatcgttctcggttcagtggacctaaaccaattcttcaaatgtctcaatccgtgactgtgttagttggacttgagcttataatagtatgactgtatgagtaacagtcgccctacgttaaaaagacaggcgtcttcctggaaacggatacacactatgacacaaaccacgagaactcaggaaatttgttttattagatacattatttcgctatcatgcattttaatggaccaagattcttaagttttctaatggatagattatatttcatgtaggaaaatgatcatcattagcaagaactaaagagaaaatcctaatgatcatcattaacaagaactagagagaaaagtctttaaaactacatagtggggttgtctatttgtttaaagctcgtcaaatttggaggaagccatatatataaaacttgactaacaagtttgattagtcaataaagcacatttgagttcttaatccgagcaatttccttctcttttcgtcttttcgacttttgttttttatgcccttttccatataaagttttgtcgtaaggtaatttccttgtgatgtcacatgtgcatgcgcatacataaaaaaattaataatataacgttgataaagacttctcaagtccatataactatcatttagctcttgtgtaccagaaccaccatcttcttcccccataacactcttcttctctcatcaaaatctctaactcaaaccttcctttgatcccaagaaatctcttccaaagccctaagccaaaagcttcaagagaaaaaatggcgatgatgggtcagttatggactaacacaggctctgctcttgcaacactaatgtttgtatacacaatcttcaaacaattcttccctctcttcggaccccagttggaaccattcctttatagactcttcggtcgcttctacccttacatccaaataacattccatgaatacagcggagagcatttcaagagaagcgaagcctacttggggatccagagctatctaagcaaagactcttctgctagagcaaagaaactcaaagccaacacaactaaaggaagcaaatctattgttcttagcatggatgataaggaagagatcactgacgattttgagggcattagggtttggtggcagtcgaagaaagagggagctactaggcaatctttctcgttttaccctgaagctaatgagaagagatattacatgttaaggttccacagacgtgaccgagaagtaatcatagagaggtatcttgagcatgttatgagagaagggaagacgatagagcaaaagaacagagagaggaagctttattcgaatactccgggtcagagccatggaaacaacagtaagtggagtcatgtaacctttgagcatccagctacgtttgatactctagctatggaagagaataagaaggaagagatcaagagtgatctgatcaagtttagtaagagtaaagattattacaagaagatcggaaaagcgtggaagagagggtatcttttgtttggaccacccgggactgggaagtctacaatgatcgcagcgatggctaatttcttggagtatgatgtttatgatcttgagttgacaacggttaaggataatacacatctgagaaggttattgattgagacttcagcgaaatcgattattgtgattgaagatatcgattgttcgcttaatctaacggggcagagaaagaagaaggaggaggaagaggaagatggagacgataagaacacgattgagaagaagatgatgatgaagaatgaaggtgagaataaagagagtaaagttactttatcagggctactaaatttcattgatggtttatggtcagcttgtggtggtgagaggatcattgtattcactacaaactttgtggacaagttagatccggctttgattaggaaaggaagaatggataagcatatagagatgtcgtattgttgtttcgaagcgtttaaggtattggctaagaactatttggatgtggaagagagtgagatgtttgaggagataaagaggttgcttgaggttgaagaaatcaagatgacaccggcggatgttggggagaatctgttaccgaagtcagaaaaggaaggaggtgagacttgtttgaagagattgatcgaagcgttgaaggaagagaaggaggaagcgaagaagaaggtcgaggaagaggaggaagagaagcagaggaaaaaggaaaaggtgaaagaaatagaggcagagaaagagaagaagaaaaagattgaagaagagaattgagtttgaaggaaatttgttggattgtagtatctaactgaaataattgtagtctgattggttcatcttatgaatgttttgtgtttcatttagctaatcagaagattcataacattggtcaaccaggtaacatgaaaaacaaattacgtatagccaagaaacatcgctgacgtgtacataaaagaaatgtgaacgtaaagcgatcctagctctaattgaaaactcgagtttgtcaacagaaacatactcttgtctctacgagaggttgtcactaaagatcatggattgaagcctgaaaaacatttcactgaataagtgtgtaagtttttggaagtagctcgttgaatcttctaaatggactttatgtccgtttaggccttggccggataagcttggcctgtttatgcccatttagaacccatttgtcatgtttaggacaatttatagttagcccacatgctacagttgaccattttttttttttttttttggttatcaaatcaatttttttaagggtgaattagctgtgtagccatatttggaacaaaaataaagaatactagattttaatctgcggtacaccgcgagaacaatttattttttaaaattagtatacataaaagtttgcaaattgtatctatctataaaatatttttattttatagtttacaattgttattaagtaacgttctgccaaacccgtcccataaaaaaatcatttattttattaatgttaatcttatttatgatatgtttatgaattattgtctaaatattttgtaattttgtagtaattaaatgttatcaaatatctttgcggtttgatgattataattgaattgttatagtcatggagaaaaggaatatcaaaaatgataattttgtagtaattaaatgataattaaatattttgtaagttttattttagtaactaatcgtgtagttaatgtggagagatttagggtagattgttaaatgtcaaatatttaattgaaagattttttttctaattatcaaaaacaaacattaaaatccagtggcagccattgtaaataagtctcaactacaggatttatttcgcaaaatggcttcaaaagtgtatatgtagatagccatataatttagataactgagcaagtaaccaaaaaccctaaataattacaagtctatccctgcattatttccttattttccaatttgccataactctgaaacgcatagccgcataggtgatggtgatggtgacaacaacagtgccagtgccgatgttaatggtgatgataactgtggcggtgccggtggtaatagtgaaacaacagtggaggtggcgatggtggcgatggtgacgataacagtgccggtgccggtggtgatggtgacggcaacaatggcggtaccggtgacgatggtgacgacaataatggtggtgccggtggcgaaaagataattacaaacacctattgatctagaaaaactaaaccctaagatactataaatggaacccaaacaaaaatcattaaacgaaatgaaattatctcaagtttcaattttcagaaatctagcagcaatattgttggacggaagagagattggtcagttgtgagatttggtcgtcggaacagtgacggtggctttgacaagatggaggaaaaagacagtaaataattgggggtataagtgtatatattacacattctatacagaatatcgtagtcgttttttgttatggttatttatttaatttgttgttttttatggttatctactccaatttccctttttttaacagactaggttttaaaactatgttacgcatgcgtttatttaatatatataaatgtaagctgtattcaagtcatgatagttattaatattattttatataattataatgtggtggtctctagttttttaaattactagtttagaaaaattacattcgaaaaacataattttaataattataaaattctataatgtttaagaatcaaatcagattaaaagaatcaaatctgactaaaagaatcatgaatcaatcttgttttcttatattcaaattgctgccaacacatgtcattgtatacttttcatattccttcttgtaattttctgttgtcaaatttttatggtcgttgttatcgttattttcaccgtctgtttctctgttatactaatcttttccttcctctcctctttcctcactttcttcttcatcctctccatcttcttctgtaacaaacatttgttattatgtggttaaaaaacagagtagaaaatttaaacttactaacattaaccaaacatatatagctcaatatgcatgtggattaactattcaaaacaatgttgttcatttaaccttttgaacttgaaatttgatgtctttctaccataatttagttccacgtctcctacaaagtttcagaatactcctactaaattataaattattcagagtatgtttagatgttcgtttaatgtctatacgggactggtgagatctaaaacttcagaaaaaaatcttttcaagcaggttgaagaaacttagataaaacaaatacacacaaaaaaaccccgtttaaatctatatcataccattaaacctacatacattaacaccagaaaccatatatccacgtttctctctttctcatttatttttttttacgttgaaagcgaccctctttgatacctagattatgacgtcaattgttcataatgcaagggaactctcaacaattaaatttattatctttcttatgtcttgccaattcccgttcttgactggaattggtactccaaaaagaacaaaaaatttcacaattttaacaaaagtctccatacattttacctggttagatttcatccaactaaattatatacaacctaagtttttaaaaagaactacacaataagttacctcattagccatagatgtacttgcaatttcacgtaaactatttttactatattggtctaaacatcttttccaagagaggtttcttgcatggtcttacatgtatgattgataatttgattcatgttaggttgtttgatctactttttgttaatattagcttcttttgggacttatttctcttaatgcatgtgttcggattgatcaccaaatactgatccaagggattaggactcctatcgggtaactctaatcctaaaaatagtgttaccaatccttcgtgttgttgcttgcgatagttgagtaacatgacttagtactaagtgaatcaatctttaatgtgtcgaactatgcgtcgttgcttgcgaaagttgagtaacagaatatagggagttttgactattagacccatagcctggactaattcgtttactcagccgttcttcctttgcggtgtctatggcggagttggtgacgttatggtgggtatagctgtgtgattcggtggttagcgactgttcctttggttctgcttggcttgcgtgaatttcgtctccagaggctctaatatctcaagcctatttgggtagaatctaatatatatatatatatttttttatttaaattaaaatagaaaacaaagagctatggaaaatagagtagaaagtatgtaataagatagagttgaaatgtagtacgtagtagaaaatggtctagacgatgtcgattaccttttagaaccgcggagacgaataaacaatgaatttagacagaaatgattattgaatggttccaaggacgtgtagtgtagcaacgcataaaacagttcaacactattaaaaatgtgcgtaaataagttagttcatgcatacatattggatactgttatcctatacgtggttttgtcggaaaacgtacataagatgtgaccacattaacatagaaatcaaattgtaatgatttactaagaaagagtggtgtgaaattggcttttcaaaacacgctcgacaaagcgttcacattacacggttctttatttcgacaaacacatatttaccttgttccataagttgtgggaaaaatgtggccaaaactataatatatgtatattatatatattttatttaaatagatccgattttgaataccgaaagaagatcacatgaaaatagattggagaaggaaaaagacaagaaaaaagctaggaaacttcgaaaaagtaaagttacgtatagctttttaatcataaaggttggaaactcgttttgctacccaattttctaaacatcaaaatttctttctttttctgaaaaagtgaaaattatactatatggagactaggctaatgtgatttgtgtgatattatatccattaatatttgagatatgatatgatgatcattagatcatatgaagattgatatatatgttatcgcaaaaggaaaaatataaaagaaaaaacaaaccgaccaagttgactctattggacttcaatttcatcatccactactacaaaataatatactattagaagaccgtcttccgaaaggtcttagcctcttaggcaaataattaacgaatacataccttttaaaacttagagaaatttcttagtgttcaatagtattacaatgagagaaaacaaattaaaaatgccaaattatagcgacttttcattaattgaaccaaataaagcttattggagtacattataactaataaagataacaaatcaatacaccagcatgaaaatcttctaaaagatactccttccattttataatataagttgttttgaatcaatttttttttttcataatataagttattttcaaatttttatacaaattatatattattttaatattttatgattatttatattatacagtctcttttatgattagttgaactttttaaaagtaaatattcttaatctaagttcttttagttaaaacaacttatattgtaaaacagtgtataacaagtcaaattatggcaactgaaaaattgtttgaaccgaataaagcttactataattttctacaactcaattaatattggtagtgaaaaggaaaaataataatttggaaaaaagtaatagggggggcaaggatttccaaagtggaaacatgcacatacatatatctttttgttgtcttttcgaatagacacatttcctttatatatgtaataaaaactatatatatactctcatacccaaccacgaccaactactcctaacaacaaaaaagaaaaagatctcaaatacgatctgaaaaataatgatgatgggaaatacatttggttcaagtttggcgagtttattcttcttgtgggcaactattcaacaaatcttcccaaaccatctcagaatcgccattaaagagtttcttatctccacaatacaacaactctcatttgtccagagattttccgacagattcatcaacttcttttcgccttatgtcgaaatcagcttctctcaatacgaagattatcaattcaatcacgcatttgcagccattgagacttaccttggggcaaaagcaactgataaagccaagcatctaagagcaagccaagttaaagagagtaaaggtttggtcttgaaacgagacgagactaaagtccgagatgagtatgaaggaggtactgtctggtgggagatggaaaccgactccacaggatatagaacattcaaactcactttccatagacgctcgcgagatattgtaaccgactcttacataaaatatgtttttgaagaaggcaaatcgattcaagccaagagcaagcagatgaagttgttcacaaataatccgagttctcactggggcactagcaagaagagtttttggagatatattgattttgagcatcccgcaagttttcacacgctagctatggatacaaagaagaaagaggagatcttgaatgatcttgctgcgtttagcaatggtaaagagtattacaagaaaataggtaaagcttggaagaggggttacttgctacatggaccaccagggaccggtaaatcaacaatgatcgctgcaatggcgaatcatttaaactatagtatctatgatcttgaactcacggctatacgtaacaactcggagttgaggaagctactcactgctacttctagcaagtcgatcatcgtgattgaagatatagattgttctttggatcttacgggaaagagaaagaaagagaaaaacttgatgacctcgagagaagatggagaacaaggtaccgaagaagacaagagttttgtaacactctcggggcttttgaacttcattgatggcatttggtctgcttgtggacaagagaggattattatcttcactacgaatcactttgagaaacttgacccggctttgatcaggagagggagaatggacatgcatattgagttgtcatactgttctttcgaggcgtttaagattctcgccaagaactatcttgatcttgatactcatcctctattcaagaagatcgaatcattattgaaggaaacgaagatcgcaccagctgatgttgctgagaacttgatgaagaagaatactgaaatagatgctgatggatctcttaaagatctaattcaagctctggaggggaagaagaagattcatggagctcaagtagatgaaccgaaggacaaatataccaagaagttttataaagcattttgcatgtcatctaaagcctgatttctcatttctattgtttttaatttccttcatatcattagactcgattgctaaaagttaagttcggcagttatacaaaaattgttgtacttgtaaatttttataattaatagtattcattattcaatagaaagtaaacgttatacagctttagtcacatcaaatttcctaggtggagagactctagaccaatatgatgttgagttatataatatgcagtaatttgtgagacatgaatgaatgatgatcatatgaaattgatatttggtatcgagagtgtgaatataggttttaacctaatccctacagaataaaaatagaccgaccaaattgacttgtgaaagttgtatcatgcactttagcatgacttttttttttttttacataactttatcatcatcactactacaaaatcatatagtttaagaagaccatgttcagaagggtgtttaggcaacttttgaacggaattttacgtgtttgatagtattacgaagagagaaaataatatgaaaattgacaatataattacatgagtcgagttattacgcctcttcactaattgaaccaaataaagctaatttgattactcaatctgtttcaatttatttgtagtttagaggtgtcaataaataaaatgtatctaaaagtttaaccaattatattttacagtatagtttttatttgttgaattagttataattaataatgttttcgtgtaaaagaagtaaattaaatatataaaaaatatgattttttaatctatctgccaaaatcttgaactacaagtaaattgaaacagaggaagtatataataacaaggaaacaaaccaagataccaactagaaaatcttctgaaaaaagtatatatgagtcaaattatggcaactcataattatttgttgaaccaaaatttgaaaaggatcagtaacaaaatttggaaaatagtagtacataacttgcagaacaaggacttccaaagtcgaaacatagaaagctttgttcttgtttgtcttggaacacacacattacttttgcaagtaatagacactatatatactcatagccaaacacaaccaactcatataaaacaagagaggatttgatctaaagattaagatgatgggaaatatgtttggttcaagcttggcgagtttgttcttcttgtgggcaactattcaacaaatcttccctaaccaccttaagatcgccattaaggagttttttctctctacaatccagcaaatctcttttgccaagagattttccgacaaattcattaactttttctcaccttatgtccaaatcaacttctctgaatacgaagattatcgagtcaatcacgctttcgaccctatcgagacttaccttggagcaaaagcaactgataaagccaagcatctaagagcaagccaggttagagagagtaagggcttggttttaaaacgagacgagactaaagtccgagatgagtatgaaggaattcgtgtctggtgggagatggaaaccgactccgcaggatataaaacattgaagctcactttccatagacgctcgcgagatattgtaaccaactcttacataaaatatgttgttgaagaaggcaaatcgattgatgctaagaacaagaagatgaagttgttcacaaacaatccgagttctcattggggatccagcaagactagtttttggagatatattgactttgagcatcctgcgactttcgagacgttagctatggatccgaagaagaaagagcagatcttgaatgatcttgctgcgtttaataacggtaaagattattacaagaagattgggaaagcttggaagaggggttacttgctctatggaccaccgggaaccggtaaatcaacaatgatcgctgcaatggcgaatcttttgaactatagtatctacgatcttgaactcacggctatacagaacaactcagagttgaggaaaatactcactgctacttctaataagtcgattatcgtgattgaagacattgattgctcgttggatcttactggcaaaagaaagaagaaagagagcaacttgatgatatggagaaaagatggagaccaagacaatgaagaaaacaagagtttcgtaacactctcggggcttttgaacttcattgacgggatctggtctgcttgtggacaagagcggatcattgtcttcaccacgaatcacttggcgaaacttgaccctgctctaatcaggagagggagaatggatatgcatatagagttgtcctattgcactttcgaggcgttcaagactctagccaagaactatctggatcttgattctcatcccctgttcagtaagatcgagtctttaatgaaggaaacgaatatcgcgccggctgatgttgctgagaacttgatgaagaagaatcgtgaaacagatgctgatggatctcttaacgatctgattgagtctctggagagaaagaagaaggttcagatagctcaagtagatgaacacaaggaatatagtaataagatagttgaagcatttcgcaagttattttaagcttgattcatgatctgattcagtttcttttcactattgttgtcgagtcttaacataaaaattcacagataagtaaacttgtatcgctgcacagaacattgatgattaattaagttagtcccgtttggtttacctgtgtagattttctagtcagtttcaagatgactgcattctagtgactcttagactttctccaaagctctcctttggtgttgaatcaaagcatcactctgaatcatctcctcatctttcttgaaaagatcttccatctcgattcaaatgacgaagctgcagaaactaaacaagggaagctttcatcatccataaacatatatacattcacaaggcaatgttcaattcttagagatgaagaaagatggtaccttgacttacagaatgcaagcacaaagccatggtcttcctgtacttgaagcttttgcaccacctctgatttctccatagtgctgctttaatctaaatcaacaacaagctctttacttttcaaattccttgaaaactatgaatcaaaagctcatgccttaagcagaaacctcaatgtaaccaaaaagctcatgcctttttgaagcagaaacctaaatggtaatcaaaaagctcaacaagcactttgctttttagattccttaagatctacaagtcgaaagctcgtgcctttcgaaacagaatctaccaaaatccaatttatattcataagcatgaagggagaagagacgatgacgaaccggcgagcgaaatccgacatatgttttgatgggttcggtcgtggagagaatgagataaacggaccagaccaggaattagatttggggatctcttgcgattggatgcgaagaagaagatggactcggaacttgggtttggaaagttttcaaatttttgaaacccggagctttagagttgcagcaatggggaacgtcatcacaattctctcgccatcttcatcatcttccccataatcacatacgcagaataattcgacttgcaaaaccaagttgaaccgaaccgaaccgaaccaaaccgaagctgaaaatttaattggattaccggtttggttgggttcggaattgatttggtttaagctctgctataatgaggtatgtttataccaacaaaaaaaaggaaatacaacaatatatgaccgttaaaacatgcttaaagtaaaaaacaataaggaaattagaaagaaaaaaggaaattagaaagaagaaaggaaattaggttaacgcgttacaacaaactataatcagaaaattttgcttatataaacacaacaatacactttttgtgacatctccacaattacaattttctcaacaatctctcttccttacgaatcatcatcatctttcactctgtctctgatcagttttgttcaaatatcactcgctcgacaatggaaacagaatctttcaaactcgatgttcatgtacaagctttgtctcaagatcagtcgttagggttcgtaagtacggtactaatcagtcaatacagagaagtagaggaatttctcatcaacgagaaggatgatactgtcacaagtctcggatcttacccggaggattcttctactagtcacgacccactaatctctctgaaactcccaagtttcaaaccaaacgacgtctatcaacgtctccagacccatctccacgatcatgacttgtccgaacaattatcttacaagattgtccaagcccaacaacggcaaaaaagacaaagtttttacttgccacaacaacgacctttattcatgatcgtctctgtcaaattgacacacaaggtttacaacgttgtgtcttgtgattctgctccgttggcaacagatttcgaccaagagagccaacaagaagaagaagaggaatcgaagacttgtgccatctgtttggagaatttgttgagatcggaggattactgcgagatgcctacttgttcccattattttcatgaaccatgtctcactgagtggttgactcgagataataactcatgccctctctgtcgcaaacctgttgacaaactacacagttgactacatgtttactaaattagggttttcacttttatgttttacttgttaacttgtttcacgtttatgttttgtcgaagatgcagattagggtttttcatagtttatgtatctgtttttgttggcaactatgtaatacagtaatgattttatcaatttcatttacaagtttgatactagtatgcgacacatatctcttgcaacacaaatcactgacttaaaccaaatatagtttcaggagtaaactagatctgattcagtctctggagaggaagaagaaggttcagagagctcaaatagatgaccacaagaaatctagttacaagatagttaaagcatttcgcaagttattttaagcctgattcatggtttaacaattttagcttataagtttcgactctccataagtgttctctttggatgtgaattactaatattagatgacatgaaatcccattcaaatataagtactttgctgtttcctaatatgcccttaataacaatattaacaccacaaataagaaaacaaagaaacctcttttttctctaatccaaatgaaagaaactaaaaaagggttctaaagtacctgaaattgtttcacatgaatgatcttcaatccaatccttggaggtaaaatcgcagctgtggccatcaaaagatccctgtttcaggtatagccaaagcgaacgtcgatatcattttcgaattccaacatgaatgttttaatgaaatttgctggaaagagattggctttaaaggattctgtatacaatttgtgacagatttttgtaattttatacaaaagaacaataatggagattttcaaaaaggctgaaaccgtgcgtttacgtagctaccacgacaagtatcttctagcagaggaggatgaagaatccgtgagccaggacagagacgggcggtctatgaacgcaagatggacggtggaggttgtagaaaaggcggatgtgattcgtctcaagagctgctttggcaagtacctaaccgcttcaaacatcccaatgttccttgggatgactggcaagagggtgacacaaacgctgccacggaggctagactcatcaactgaatgggaacccgttagagaaggtgttcaggttaggctcaagacaaggtacgtgtctactttgatctctcttctaacgtgaccgtctctcccctatatagtcttcctgaatatgaatagtgtgagagaatttgcattcaataggtatggacagtatctccgagctaatgggggtttaccgccatggaggaattcgattacccatgatatacctcataggtcaaccacacaggattgggttttatgggatattgacattctggaaagcagaaagaagaaagcacccccagtggctgaaccggcttatacgcctctcccccctcctccaccaccaccagagcttctgcaagtaagaaaagatgatcatcaagagcccaattcacccaaaggattctctctcaggtccccaaggttttccaaatccgaggttggatcaattctacactattatattcatcactaaaacaagcagttgtagcatcttatcaaagatcacttacctacacctttcgttttgtttttacattttatgatcagtctgatgacactgtcagctcaccagtcaaggcagatggcagactaatttattatcggattggggacgaagatgggaacgtggatgaaacagcaaaggaagagcttttctgcttcaagggaatgggactagaagagctgaaagagaagcttatagaagagacaggtctgagtgatatatcaatctgttccaaaaaccctttaaacggaaaattatatccccttcggttacatcttcctcccaacaacacaaagatgcatgtcgtattgatcccttcgccttcaaaaggttaggtctctttttatcagttcatacttttccaatttaccaaaacaatgaaccatggaaaaccaggacataaattagacacggaatcattttctggttttctggttagatttgagctatggtttccctgaatcattaaataactgaagagcgcgtggtttgcgaaattttacaggggatgctgcaagcacttcttgaagtatggttcaaaattacagagactctgtttatccaagaccacaaacttatagtttctgtattgtgtaatttggtaacacgttgtagatcgacaaaatcttgttacgtgtgtacacctacatgatgctaagagaatatgtgaaacgctacctacgcaactaaaacccaatactaaccaaacattaaagaagatattgtgtagggatttcgtaagacttcccatcaagttcttgtcaataagcttctttcattcttagtgagatgctaatgagagcaaattatatgagtgaattcttttaaataagatccgaaatgtttaaatttttacatgtcaagaaaagtttctaagaagcagcacaacataacttaaggcagcaactgttatgaaatacaagagtgtacctgagcgaaccattgttcccgagccaagacaagacacacacacccttatcaatcaccagtcacctgcagtaacagatttgattacctagaatatatggattaagaaaatggaaaatatactatgagttatgtcttacgttatttattcagcttttcactgtaagagatttaatcctctttactctctacatgctaaataggtgtgcccaaacgccatacaaatttcaactgtagctattgttttcttcatgcacttctcttcctctctccagacacctaaagtctgaattagacacttctttacaacggtactcatcaatttcttcaggccttgcttacgttaccagttcctgtctcgggggagcaaaggttgcatcataaccagaagctcctcttggtccttcataagtactcctcgtctgcattgccacataacctttggacaacgctccagtgtgtagtacgggtcagaggtgctcaataaaaaatctgtacaaacgagagaagtcaagagtgtcctctgataagatttacagctttacgagtgaatgctagagaatctgcaaggcatcaacagataggagatgaatcactgtgtgaatttgtagaagatttgggtgcgacacatctcccgaaacaaatttggtaacattcccatccacctctaacacactccatcctggtgtctttcttacccccctctgctctatcatcccacgaactttagatgcctcgggatttctttgaacactaaagtaaatattagatagttgaacaagagctgcttcctcttcctccacatttcccttctccaagtcaagaaggtttttaacagctagttctccgagttcaacattcttgtgcgttcgacagccattcagtaaagcaccccaaacagatgcaagcggtttcattggcattttttcgataagattaagtgcatcatctaatcttccagctctgcacatcaaatctactatacagctgtaatgctcatgctttggagtaatttcgtatcgagcttccatattttctaacattgatctgccttcttcaagaaatcctccatgagcacaagcggctaagaccccaagaagaactacactatcaggcttaataccatcttctcgttccaaccgttccaaacacgtcatagctttctttgcataaccataagccgcatatcctccaattaaagctgcccatgagaagacattcctcctagtcaactttttgaaaacttccacagccgtctctatgcaaccacacttagcatacatgtcaaccaaagccgttcctacaaacacatcagactcaatccaactcttctttttaacaaactcatgaatccacttcccctgagctaaagccccaacttgtgcacaagccgttaatgccgtagtaaccgaaaactcatcaggctctagtcctttaaccaacatctccctaaacacctctaaaccctcagaacctaaaccacatctaacatacccattcatcaaaacatcccatttcacaacatctggttgtggaatttcatcgaacaccttgcgtgcatctaacaacaatttatcttccacataaatcctcaaaactccagtctgtacatgactatccgataaaaagacaccatttttaaccacccaacaatgaatttgcttacccacagagaagaaacaagcttttaaacacgcaacaatcaagaaatgaaacgtgagataactaggagctatatcttcttcttcttccttcaccattaatagaaaatatcgtaaacccaggtgaggctgagagcttctggagcagattcttatcatagtatcgtaaacgaatgagttaggaatctcaatcgaatcgaatatagaggaagcgtagtgaaagtgtttgtttaaattgggaagatggagaaaagctgtgagaagtttgctaattgcgtaagtgtttcgatggaggccatggatgatgaatagagaatgtgttgatttgatttgcttcactgtgttgcaacgttggcttgcgagaatcaaactcttccatgattgatggaagcttgagacgacgctcatcgtctatgttgacgtttcaatgtcattggtttaaaggcaaggtttatttaacggttctttttcaaaaacggcacgatgtttgcttaagcctaagaaaaatattagaaagtacagtacgttttgttgttatttgttttgcaaagatttttctttttcgtaaatcttgaaatatacttagattattaattcaccttctttcagccaatcaaaatcagccatataataaaaagaaatacaattattttaattataaaatctaatttaccattaaaacgaaattatacatcggtttaggtttagactaaaagattatgatttagattttatgattaaacgaggttaaatatccgtttgagtttataaacgagtttagattttacaggtaaacaaaattaaatatcagtttgggtttagaaagtatggttatgatttagattttacaattaaacacaattaaacgagtttgaatttacaaatgagaattaagatttattgtgtatgtaataagattatatatcagtttgagtttatagaaaagtgtctaaggttatagattttataattaaataatatatttatttattaggtggcatattcaaatttgctaaaataaaagaggatgaataaataggttcaccctaaaggtgaactcaagtattgttagttttttttctttgcgcaaaaattacttgtgtttaaggctgttaccaaattgattggcttggttttaggatacaagagattttctgggaaacaaaaattgtgacaaaaaggaaacatgcaaagtacaaacatcattaagacatttctagtgtgatgtttcattttcatcttggaatttaccaaaaaaaaaaaaaaagagaagatggaaggcaaagtggaagagaaagggctatgatgcaaagtttgaaatccgaagtctgggcatggactttttcagtattaagagtaccgaagtcgcaataacgatatcattgtaaaagcatcttcaacccttaattctttataagtgtctaaagtgttttcctaactagaacctggaatggaatccggaacggaaaatgaaactagaactgtaaccaaaactaaggccttgaatgttttgtaaattttgtaagagtttttggtttttatttttcaaaaacttattttcatattaatcaaaattttaaaattttggttttcctacaatttagaaaaactattttgttgtagtttttcattcatgattttagtttttttagttctcctaaaatttaggaaatgtagtttttactctatcaactttatttttctcaaaacccaaaccaaatttttagagttttttaaacaaaaatataataacataaatctaaaactaaaatctaaaatctataatctataaactaaaatttaaatccaaaatttgaatcgaaaagcagtatccattcagggcctaaaactggaaccagaattggaaccaagattataaccagaaccggaaccgaacatcccacgacttttagcattttgtttatgtaaatgtcttataagaagtttcaaattttatttaacaaaatttgtaatttttgaatttatatatacaataatagtaattcatactataataaaaaaaatataatctatttttctaatttttagaagagatacaaaaaggaaataagaaggaagaaatacaaatagtcaaattagataaatttgtaaattttcctttccataatagaattaggggtagctaagttctatataaataagggtctatggaaagttgttccataagactcaagaaagacataagagagaattgagagagattttagagagttatagagatttagttttgaatagtttttaaatcataataaataaaaataaaagttgttatttaatctcttttattctttaatcatgtctccaatgattcaaagactaagtcagagcaagtcagctttgaaacaaccccttacaaatgagtagctaaattacgagagatttgtgaagccctgttgaagtttcctcgtaaatctatagcactttatcccaaaatattcccacaaatactgttatgactttgcaaataaaggtttgcgagaaactatttactcgcaaatcttgtaactgattttctagtaacttgtatcagtgtatgcgagagaaaaactgtttacgttcctcgtaatttgcaaagaatctgctactgcgaggaacgctaaactgtttatattatgataagaagctagagagtactaaacaaaacccaccttaattattttatgatttatcttgatcgtatcactatcattgttagctccatgtgtgctgtcataactttggcatcttccttctttcgataatctgattaatacaatgaatcaaatcttgcttttatcgtcagggtaatagtgattttctgttattttaattaagaaagaaagaaaacttacatgtcgaagtaaacaaactaatatagatgtactatagtgttgatattagcgtttgactttaaaacacaacttgcactaatatagatttttactaatcgatttactttatttaattaacaagtagcattaatgtaattagagtctatagaggaacaactacattgatctattcttcacaaaaccaaagtgctattacgaaaaatattaactagcagtctagcattatctccatctccgctaactgcaacagccatgagtttgaggttagaaaaacatgagcattatgtagatctcgtcaaacaacgtgatggcttggaatgcgatgtttgcgatcgatcgtatggtgatggcttctattgctctgaatgtaaatttacagttcacaggaaatgcgcggttgtgtttttgttaaaagatatattcgaccatccttctcatgttggacattatcttaagctcctcacaaccggagctcccgaccacaccgacccaaaatgccatctctgtggtaaaaataccaagcgcattctttaccattgctccatttgcaaactcaatttggatattgattgcatctttgattactttagtgatcagcaagcccatctgaatttttcgtggcaccaccatcctctacactttattagttttcgtcttcacttgcagtgcgacgtttgttatatgttccgcagaaaaggttacttttgctttcagtgcaagttggtagttcataaggaatgcgtctcaaaaattgaatcagcagtgatcactcatccttttcatgctagacaccctcttaagctactcacagatggagctccagattacacagatccaaaatgtcatatatgtggagtcgaaactgcaaacttactttatcattgtgatatgtgtatgttcaacctggatattggttgtgcaattcgaaacccggaacgagtttctctttcaaagctaaaggtacatgagcatacactcacactcatgccaaaattgatgttctttgtttgtgatgcttgtgggatgaaaggtgaccatgctccttatgtgtgtgtgcaatgtgattttatgttcttccatcaaaaatgtgcttatttgccacgggtcattaatgtcaatcaccatgagcaccgcgtttcctacaagtatcctcttggtcctggagactggatatgtggagtttgttgggaagagattaattggtcatatggggcttattcttgttcatcttgtcctaactatgctattcattcaagatgtgcaacaaggaaagacgtgtgggatgggaaagagctcgatggagtaccagaacttattgaagatatcaagccatttaagatgaatgatgacaacacaatcactcacttcgctcatggacataacttgagcctcaacaaagacactgaagaaggcagcttttgtgaagcatgtgttcttcccatcgactcttacacatcctacaagtgttcaaaatcagattgttgttttattctccatgaaacttgtgctaattttcctaagaagaaacgtcattttttgagcccagaacctctcacccttcgcccccaaaaccaacgcaagaaagaaagtatttgccgcgcttgcgatcaagttttttgccaaggattcgtctactctacatatcggaaacggaactttgacttgttgtgcagttcaattactatgccttttaaacatcgaagccatgatcatcatttactctacctcaaactagaggttgatcacacgaagacttgccaaaactgcggcattgacgaaaaagaagtcgtcctaggttgtttaaaatgcaactactttttggattttcgttgtgccactctaccatatacagtaaggcttcccaggtacgatgatcatccactcactctttgttatggtgaaaaggcaagcggaaaatattggtgtgatatttgcgaaagagaaacaaattcaaagacttggttctacacttgtaaaggttgcggggtcactttgcatgtcttttgtgtacttggggatattcgatatgctaaaccaggaggaagcatcaacaacaatgttgaattggtgcctaacaatagatcttcaagaccactttgccacaattgtcattgtcattgcccaggtcccttcattcttaaggattttgtcgaagaatgtttttgttcttactattgtttcagccgttgcaaatcctggatgtccatcgtgaagaaggaaaaaggcatatgccctccatgggcattataaataaatacgatatccggatccgggattcagttatacaggaccacacgtgacactcacacgtgcgacatcaagtggacaaaaagaagaataaagaagcaacgcgtggcagagggggattggaggactgcacatggccgttgtgacccgactatatgagcattgttagctcaccttttccttttatcgaatattttgtgaactctcaatttctctgtaaactttgctagatttctctcatcttgagagctggcttatcgtttgggtgttttctatgaacatcgattcgattgttactggttacggagtttaatctgagtttcttattattcattggagtgatcggaggtttcgctgtatcattcagacaagtatccatgtttctcttgttggtaagagttacaattccatctttttgcttcttgtttgtcatttaaactaatgaaaaagccaaaaagttttaatctgccaaaagaaaaagttttcttgtgtttgcgtattttctgttcgtttcagtcactgaggtcaacataacagttccagtttttgtcgattctggttcagtcatgcaaatgtgtgacaaagatggtttttaattttctagttaaattttgaggtatggtttccctgaatcattacataactgaagagattgtggtttgtgaaatcttacaggggatgctgcaagcacttcttgaaaaatggttcaaaattacagaaactctgtttatccaagaccacaaacttatagttcttgttactgtgtaatttggttatatgttgtagatcaacaaaatctttttacgtgagtaatatccaacatgattctaagagaatctaacatcaggctgtatgtgaaatgctaccgaagcaactaaaacccaatactaagccaagcattcaaagaagatactgtgttgggatcttgtcaataagcttctttattcttagtgaaatcctagtgacaccaaattatattgagtgttctgttaaacaagatcctaaatttattaaagatcaaaattttacaagtcaaacaaaatttctaaggagcacaacataacttaagacagcaactgataaaaaagacaagcgggtacctggttaaaccattgttcctgagcgaagaaaagacacacacccttttgaatcaccggttacctgcagtaacaggtttgattagtatacagaaacaagaaaatagaaaaatatctcatgagctttttatgtcttacattctatattcagcttttcaatgcgaaaagtctcagttctctctactctctagatggtaataggtgtgcccaaacaccatgctattttgaaatgtagctacagtttttcctttcttttgcccatgcacttctctttcaatgttagataccatcaagtctgaatctgacacttctttgcaacgccactctcagggggccttgtgagaggttcatcattgtcttcaggccttccttaagtttccagttcaagttttgaggggtcaaaggttatcatttgatatataaggtatagaactgcgccatgtccagaagctcctcttgattctcatagtaatttttttttccatccccacatagcctttgcacaaccctccagtgtgtattgcaggttacaggtgcgcagcagagtctgtagaaacaagaggactctatgagaaagtgctagagaatctgcgacgcatcaacagataggagatgaatcagtgtgtgaatttgcagcaggtttgggtgtgacacatctcccgaaacaaatttggttacaattccatccacttctaacagactccatcctggtgtctttcttatccctctctgctctatcatcccacgaactttaaatgcctcgggatttcgttgaacactaaagtatatattagatagttgaacaagagctgcttcctcttcctccacatttcctttctccaagtcaagaagattttgaacagctagttctccgagttcaacattcttgtgcgttcgacaaccattcagtaaagcaccccaaacagatgcaagcggtttcattggcattttctcaataagatcaagtgcatcatctaatcttccagctctgcacatcaaatctactatacagctgtagtgctcatgctttggagtaattccgtatcgagcttccatattttctaacattgttctgccttcttcaagaaatcctccatgagcacaagcggctaagaccccaagaagaactacactatcaggcttaataccatcttctcgttcaatccggtccaaacacgtcgtagctttctttgcataaccgtaagccgcatatcctccaattaaggctgcccatgagaagacattccttctagtcaacttttcaaaaacttccacagccgtctctatgcaaccacacttagcatacatgtcaaccaaagccgttcctacaaacacatcagactcaatccatctcttcttcttaacaaactcatgaatccacttcccctgagctaaagccccaacttgtgcacaagccgttaatgctgtagtaaccgaaaactcatcaggctctattcctctaaccaacatctccttaaacacctccaacccctcagaacctaaaccacatctaacatacccattcatcaaaacatcccatttcacaacatctggttgtggaatttcatcgaacaccttgcgtgcatcaaacaacaatttatcttccacataaatcctcaaaactccagtctgtacatgaccatccgataaaaagacaccatttttaacaacccaacaatgaatttgcttacccacagagaagaaacaagcttttaaacacgcaacaatcaagaaatgaaacgtgagataactaggagttatatcttcttcttcttccttcaccattaatagaaaatatcgtaaacccaggtgaggctgagagcttctggagcagattcttatcatagtatcgtaaacgaatgagttaggaatctcaatcgaatcgaatatagaggaagcgtagtgaaagtgtttgtttaaattgggaagatggagaaaagctgtgagaagtttgctaattgcgtaagtgtttcgatggaggccatggatgatgaatagagaatgtgttgatttgatttgcttcactgtgttgcaacgttggcttgcgagaatcaaactcttccatgattgatggaagcttgagacgacgctcatcgtctatgttgacgtcgatgtcatttggtttagaagcgcgttatttaacggttcatttttttaaaaaacggcacgatgtttggttgataaagacatcaagatgtgcatatgtgtgaacataagagcaagatgtgcataaaaacaacaatgtattttgaattgacaattagataaatgcattatagactgatagtcttaattagctaagttattgtataattatcgggaatccaaaatcagttagtgtattttgaaccatgaaaaaacacagatattccaatcaacgattttttgtatcgaaatttgttatatccgtaagataattaaagacaaaaatttattttctaactttaataacaaacacatatacgtttttgtaaaagagttgatgaagatatatgaaaattagatggaaatttggattgccttcaaaatttaagaattaatttattgttgttgttatgatagattcagttaggattttgttttgagaattaattttgtaaatgtagtttggatttataaacctagcaaaattatatttctaaaaggtatagaaatatatactaatgtgttaatctaatatcagattacatgttcatgaataatatttcacttaaactattgttttttcgtttttaaattaattaaatcactatataacatatttttgtatttgaagatatatatataataagggataatatgttggaagtaatattcatatgcaaatgtaccattacttgcaaatacaaaaatatgataaatagtgttatagttagtttgaaaataacagaaaataaaaatgtttatttttaatgcgtggaaagagacgatagataaggaaggagtacagtacatcttgttaactttttagaattttgaccttttttattacataatttactgcatgcaatttcatagtcctatttaaactcgtcggagggttacttgtcagtccacaaaactcacaattatgaaaaaatgcaaatttctttcgcgtctagttcaaatgtctatttttataatagaataaatttggaaaatagcctctttttgagttttcattgaaaaataccttataacctttttcttttttaaaacctatttttaagtagattaagttacttaaatagacttactaaaaattagtaataattaataataattgatacttaaattaaaaatttattaattaagaagatcccttgcaaaaaactgatgcattaaacggtataacatggtggaaacaagagtggcaagtccaacgtgtgtgggctaacactaatttagcaaagatagtggcaactttaaatgagttcaaatttggatttccattggtccttattctgcaattcaagtcactggtttgttcaaaccattgaaactatcgttggtttgtagcattggagaaccattcacttgacacaaagacaccaaaaacaacatttctctttcgcatctaacaaaaacttttatggctatgtctaacaatgaaaaacataagaaagtaacatctatcgttattcgtaacgtaagatgtatcgcaacgtatcgtaaggaaaagtaaagaaagttcctaaatagaatattaatgtggagaaaaaatttagtattaaaaaatttaaagctcaaaccaaatacaaaagaaagtaaaaaacaaagctcaaacataatctaaaacaagaaaaagactatcttcttagatattatattataaattttaatataaataaataaactatctttattttttaaaaatagtaatttgaaatcgtttttttcttctatatttcgaatttaattttgatttactaaaaacacaggggtttttaaaatctggataaaattgtcattttatatatttgaaattgtagtttttattaaaaatcgaaaaaggtgtatttttcaaacaaaaactcataaatatggtagttttcaaaatcaccctttataatattacagtcattaatactagatgattatcgactttaagcgtcttctttaataaatctcctaagatgattctttgtgttgttttctatatttgaattgttactttgtaattgttttggaaatattgttttaagaaaatattttttggtataatctcaaattcttatgaatgataaacaatagttagctattaaactagagtttgtaacttttgaaatagtataaatgttatagtcaatgatttattacatttgctagagaaccgaaccaaaacattttcgattacttttagtacaaattttaaaaaccaaaatgaatgatctgttgggtttacccgaagattcagagctaaaaattagcatgagccctattcaaaaatacatgaatggccacaaaatatttaagtttgccattttataagtatcatgtatccaaaaaactttatcattaatttttgacaatctatataaccaaccaaaattaaatgttttaacattaattgtaaaataaaaatatccatataatttccacatttaataatataaatattttaaaaaatttagttaagacatatttaaattaatattaataaaaatttaaaatattattaatccaccacttcaatactggttaaatcttcatttaattatattttaataccatcaatacgagacatatcaaaataaactgatttatataatattgtgtaaaataaaatttattttataatatataatagttatttaatgacagttgtacacttaacgaaatataaccattctaaactataaatataaatattttagaaaataatataatttacaacttttaatatataatatataattataaaaatcttaaaatcacaaatgtttaaaaacaaatctattttgttagagtaaaatttaagacccgaattgaaccaacccgactagaatggataatcgaatgtccaagccatccggcctgcactgtgtttaaaccgatcgagccctaaatgtatcggtgactgatgagttaatgagagagacaccagtcaacggttcaacaaaacggaccttcttcatcttcttccccaacaattactcaattctaaaaaggaacgatctttcgaaaacaggtaacgtttctctctatttcacctcttcaatttcttcgcaaagtgttctcttttccgctttagggattcaattccgtttctgggtttttgaatttcgacaaggatttatctgatttcgatgaaaattctccatctttaggtttcgttaattctgggatttcggaaagatataatctttggctgttgcagataatggtgaaagcagtggttggagaagatactagacttacttctgttgaagatcgtctctctcactcagctattcctgctgaagtaatgcttaattcattgttattgtaaatgcatgttgttggctctgtattgagatttttgatgtgattttcatttattttgagcataggtgggtcttgtgatagggaagcttagctctgttctggatcgtggatttgtctttgatttgattcctacaccaagtaacgatgatggtgaaccagcatgcgcggttttggagaccaaagatgataaaaggaagccttctaagtctaaatctcagtcatctgagtcgtcttctttatcgattgattcagattgggttgcagaacatgctcgacaggtttgctattgttgtgcattttgtgactaccatttttgttgttagatgtatgtgtatggtttatgatattaacaatggcattgtgatggatcaggtatcgagaatgctgttgggtggcatgaaggttgttggtatctatgtatgggctagtgacattgcttttaagaattctactatgatcctttgccaggtaactttgttggagatttgttttcttgcagtaaatttcagttgagatcattctggtaggtgcccgtatgattgtcttggaaataggagatttcttatgattgtgtctttgcgctgataatttgagatttaggcttaatgagttaatcttatggatgctactaaaactctcatgttgatgggtttaagttatgggaacatttatcaggctatgaaggcagtttcggatgcaatacgacatttggatcctagcttgaatgaagctcttcttattcacatatgttacagtccgaggaggtattccacattttaaggatttagtttgtagaaatttagtgaattatcaggtacttaaagtaaagatgatgaaatgtttgtagatggaattgccgaacttgtttgctgagttcaagtattacatcaagtaatcttcgaccttgtgactttaagctgggaaaggtgttaagttctctacagaggtttaggtgcagctacaactttagtttcaggtatgtcattgcatttagatttagcttatgttcatgttttagaagcattcaggcgcattcatctgagtcttctgaatgcagtatctatgaactcttttttctttctttttttgtatttattcctgacctcattctattgattgttttcttcacttttacacaagtagattaccaatttacggtgagggtgggtcaagtgcacaaacgtttactgataccatccgtaaagaacttgcaattcatgcaaaggagctaaatagtgcaaatgcaatgattgatggagacttggtgaggagacagtaatccctatgcttttttatatgtttctgtgttaacaaaattactagatgttgaatttttgaatcgttttggagcatgaaaatcttgaggttttgagtgatttaatttgttactatcgtttagttaagttatccttgtgaatggcgtctgtctgaaacacatcaaccattgctattagtctgtttgaatatagtttctttgtaggcattgctttggcgcttaaattatgtagtctactactaagggagatatatcggctggaaataaccgtctcttgtttgtaattaactttgttggactgaaggtgcataacgacgagccttgtaacacggatggtgaacatgaaattgaattgttattcccattcatgaaagatactcgtgctgagggtatgtttttctcactctaatttagacacagtgatttggtttgctatgaggcttgtctttggacgattgtatctaatattacggtgtaatgttgagaagcatcaactgcaaagaacgttactggaattctactcttcactggttctgtattctcttacgcctacttgaacgtgaaagaaccagtttcacaagctattgctgatattaaggtactgcaacgatgtctcgtgtcagttctaccggacttactgaaatttaaaaagttttgttgatggtggtatatttctcttcaggctgacattattagaagtctgcaaagtagattggacattatctgtgatgagtccgagcaggatctcaatccaactgatgtgggagacaatgaaaatgcagacgggatgtcgaaaattcccatctccaaacttatcctcaattcatctatgtgagtcagttgctaaacatatcgtttctgaatagtctagttatcattaatgtttactggaactcgaaataagttaacttctcaatgtttgtaaacagaaaagcgtgccatctccgtcttcccaggagagttcttgttccgtggctgtccggtatgttcatctgcgattatctacagccgttcgaatcactcgaggtatattagccacctgcaatgtcttaaattctttacgctttgttgaactcttcttccaaatattaatacacattttgttttctgaaaaggtggtaaaagaacggtgtatcgagttgatgtccatggaacattcttctatagacgaatcaaagatttcagaagtggaaaccgaaacgtctttattgatcgcggaatcaatgtgggacgtgatatctcctgcgacatctgcttccagcttctgcctaggagggaatgtggaaaggacaacggatggtgaagacgaaaccaagagaacgagtaacgcaagtactgcatcaaatgtcccgattttggtcgggattttcgtacttttactctcaattgtattaggattcatgctttaccagagcgattagctaatatcacaagtgacaagtctctgttttgatcaaaccacaaatgaacttacttttgtttcccgcattagagtagaagagagactattcttctcgtcggagaaaatatacaaaaccgtgcctctttatatttgaggataccttcaatcaatttagtacatttttttttggattttgcaactgagcttcaatctcaagaaccttttgttagatacgagaaagaagaatgtggcaatcacacccatgaaaataaaattggtagagtgagactcagactcatattgtggaaatccgggtttagtggtgttgaacattgtggtggtgagtgtttaagttgttcttcttatataaacgcatttcaatcatctatatagaatttaaaagttcttattaattaaaaagttacggatgttagttcgatagagtatcgattttactaaaagaagaatgagaaacattggaggttgaaaaagttattatggtatttagagggaatttgagatgagtgtagcaccttcctttcaaaagtgaaagggaaaggcgtaagatttttgttgtcttgagttagtgcaagaatggttgacggatttacaaaattttttactaaataaatacttgtatttttttttgggattgaggttatcgtttgatggcggagaaaaatggaagctttaaaatttggttaactgaaagtgttttcattgcttagacctatagcttcttttggttaatgatgaacatggagtagcttgtttactacttaacataaggcatacatttgttcattcttatgttttgcttcttttttttcttatgttttactttttttccagattattgctcgacgcgtggacgagcttgttcgcggtggtctaggcagtagcacactgtcgcgaccaccacgatcacaaatgcaactgacgccatgactccgaacagcaccactaagccggaagaagagtgagactgatgtggtggaagcggaaagtcttgattcgttgagttaatcatggtgagtgagttgcttttccttctctcttcttcttatcattatataaaacagtgaagatcaaaacctgcaaactactgtgaattgccaagagtgtcaattgtagttgaaaaagtgtttttggtttttctaataagtttgagataaacgtattacctagaattcaaaagtgatagggccgttaaaaaatttccgaattgttgatctttataggttttgaattgttgatcttttattgggaattctgaataatgacaaagcctgcctcgttgcccgattccaatgaaactgtctttaagtcacgttgcatattaattcataatcattaaaagtatttgatatgaaaattatatcaaaacatttgttttgttaataaaatgtgaaaaacgtaaatatatcaacttttttccaaaataataatcaattagaaacatatgagtatttaactatttataaattttctttactgtttagctttgtattgagatatggaaaaatggtatggagaaccaaagatcgaccgagacgacaaggctaaaatatgagtcttgaaaacattatttttcattcttatgttttgcttggtttttacttattatttgtttgggacgagttggaagatgcaagctaagactcgctcaactcagggatgtttcttaacattttgaaggtttgagtggttttgtagatacatccacttatgtattgattgaacattttaaataaattataacttgtaattttatttaaatggatgcttaagtagacaatgtcacactgatatggatagtctggatagagagaaaacttttctattatatattgactagggaaattccgggctacaaaacacaattgttgtgtatattaactactagattttaatatattttgtaacagaaaacttcacctgccatccccatgccctatcgtcatttgtcatctgatacgacggcgacgacataccataacaagaaatatttcctctagaagcaaccacacctgcgacgaagaaacttttatgaagcctcatcatcatgccgagctatttatccctcagcattatttggatataacaaaaggaataaaaaaaaagtacctgcgaagatctggtctagtagatcactcttagtgtttggtgggcttgtgttaatagcctcacacaacctggcaaccgagaactgattgtcgctgtattgagctgtcctcgcgtatatgtaactcacatagcttttgagttcgataatgtcgttcaaaggactaataaatcaatataaaaagataaaaagaatattaaaatatgatagattcttttatactctctataaattgggagaaatctttttacttgcacagcttgaaatttttgctgaggattgagagactgttaggtttggcagcaatcctgtctatttcatcccaagatttatgtatcttgttatgacattccttgctcatttccttaaggacaaaatattagcaaaacaatatgagtaatgcatgttgttaatagtataattatggaactgttttaagttaccttgaaaactttggttactatgtaaaagtaaccatgttttggaagtgtgtcttcaaaatagaggaggggggctgaggatgctaaagccccgagcgctatgtatgggtattttagcttgaaccaagctgccaacactttgtgtaccgcaccatgaaattgaaaataaaataaaattatttttgaagcataacattttatcatactaaattaaatatccatatagtgaaagaggaatggaacattagggaaagtgagaagagcaaatttcgttccaacattattttagatgtatgtcaattatttttagcaagactagtaaaagaatatataactatatattttcaatatatatatagcatgtttaaaagatatgatacttatgatcacactcaccatataacattgttctgacttctgatttttttgtttataattatttagaaaacatatatattggaatacaaacggtttgttaatatattaacatttatgatattttaaagttaattaatttagttttaatattttaaatttttagtgtacatgcaaaaatcatgtgatgtttatttgacattttaaaaatatgttcgatactatttactttttaaagtaatttatatttagaaattccagtttaggaaataaaagattagtgtatatagtattttgacgttaatctatatttctcttttaatttattttgtagtctctaatatttaaattttataagagattcattttatcttattccaaattccctagttctttatgtgtaatatcaattttgtgattttttcatgttgagatatattttaattatttttatttttcaaaattatattactatcaaattactccataacttacattttgcaaatttgataagttagttggatattttaccaaaacgctattgagaatgcatggttttctatatgtttaagaattcataacttcataatgccaagttgtagcgcgtttttttttttgaactttgtagtttgtacaaattagtagataattatggaatagatattttgctggactaaaagtttttttttttcttaagaatttcaaaaatgatgaaggtctttgggaagttacttttgaaaaacctttatacaattcagaaagtggatccataccatagtcatctttgctgcctttgatgtccttaatcaattattgttagatcttcttggcatgcatgtgcagtctttccgctatttcctttcttgcttgcccgtagtgctagatcccccattaacgtaagtattttagctgttagcctacaaaattgaaagattaacttgacaaaaatgattgagtgttgaatacagaagggacgacaagtcaatataaagatggaagatgcagtgaaacttgtgaaagctattctatgtgcgtgtaacttgtgaaagatggaagtgtaaacgatttggctttgtaacagtaatttgtgttattattttttaagaacattaatttgcttattgagagactatcataaataccttggcccaagatgttgaagtcgtaatatgtgaaagaggaagtggaaatgatttgaatttgtattactaactagcatttggcccctgttatgcagggacaacattgttttaaattatatctgctacaactcttaactaagatttttaaaataaagcagacagcataaatatacaacaaatttattatcattgactgaagaatatacaaagattaagaaaaagatataaagaaggtacaatttttctacccaatgaatcaattgcgatagacagtaactaacaaatcaagagtttagaaatataagagagtataagtacgaaaattatgctgggtatatacatgtccgcttatttcatcattagctccaaccaattgtaatgtgttcttcttctcatcatcagtaattcagtttacaaacattcgttgacacccaaagcttggaagtctaaaaaaaaatgtaaaatgtgcacaagtaagtaattacatgacgcagacgctgcctttgaaacaatatcaaagatattgcagatataaagaagtaaaataagagatgactttaaaattgaagtatttgtattaatacaaaaatcttgcgtgaaaatacaattgcggtttaatacaaaaaaaaattgcagatataaagaagtaaaataagagatgaaagaagaatagtaaaaagtatgagaattaatttaccattaaaaaaatacttgagcttcgattaagatattaaactcacccttgttttaaggcaactgttcagatgagaagccaaaatttatcgttattccttgagtgtttgtgagacgggagaattataggcattgattgtattaaagaataatcctatggaaaaatggagatgtatgagagaaatcgaattcagtcaaataaagaagatacaaagcaaaagaaaaaaaaaaaaagccatagaaatctagaagaaggatatatgattttcgaatctatggagaattctatatatataaaacaaaattacaaacagaaatagaagatggtaaattggttcattgagatgaacaaaatacctgatttctgagtaatcgattaatgatgttgagaaacccatctttgagattttacacagtagtcatggagtttttggaagagagaaagtggaaatgtggagatcgtggggatgaaagaaaaaatcgtttgacaaagaaacaaagttaaataaaaacgacacatactatgcgtgaaaatgaaagaataaaaaaatagtactaagctgatgtgtcaatcactgaatacatcagttattggaaaagtgactgctgatttagtatatttagatttgtgttattatgttcagatgaattatataatagttattgtacactgaataaattaatatcaaaaggggatgtagctcagatggtagagcgctcgcttagcatgcgagaggtacggggatcgataccccgcatctccacttttctttttcttattttatatttataccacctcaatgtttcaataattgtatagtttgaactgtttatttgttggaatactaatgttaaaagttttaaaaaaaaatcttgttagtaaaacttgaaataaaaattacgtgttctatattttgttgtactttattagttactttacatcttcgattaattaataattcttttgtaataataaaatgtatttttgtatattatttttttaaccaggcctttcccaaaatctccttcaattttaaaacaaccatattaaataagttgaactttgaaccaaaaacataagagaactaaactcttaattttatttcactagaccaatatcttattaataaaatgtatatttgttacaaaaacaataaaaattaaaaagataattgtcctaactcctaacatcacaagtttcaacatattgaaaaaaaactcaaattcatctcttttaaaataaagctctccctttttttctacaaaagtttatgtcgccacctactaagattatcggtttcaatggctttttcagccggggtttctttgttttagtctctctaattttgatttcttatgagtttgatgttatctgaatcttattttcttccaactatttcagatctaactctataaagtctaaatcctttattcttctggatttgctgtttattttgtctccttcatccttcatctgcagctttagttccgactgttccaaccataaaggcaggttttgtcgatccttcaacgcttcaaatacatatttttcactattaaagatctcgatttccttcctttcttcataagactttggggtaagaagagccttggttttattttctttagatagatctctagtctcagatatgtttttattttttaatttaattcggacttacacttatactttagttttgaaatctttagttatgagtttgagaaatttgggttcagtatcaatgttgttgtttttttatatataattttggatttttcctcctttggatctatctttattcgagagatatcgtttgctcgtcgacttagtttttggaatgattgttttttttgctgacatatgtatttcaccatttgtattccatctctctatcaatgaaactagtgaaaaaataaataaattaactcctcacatcttgttgagtataagagatagtcatttagttggtaaggttccatttccactagaaatattcatggtatcgttataacgttattcaacaacacatattctagatgttagatttgtcttatattaaaatccataaacaaaacaccttatacatgttaccatcggtccttgtacgttcgccgcatatctccgacttctctccgccgtccactggtgactctacgctcactctaaaaatctgtttactatataaaaaaaactaaacaaaagagaggattagattcattggtctaagtctagagtcaagaacaccaccaccacctgtaatcccaacaagtttagttgcctaccgtttatcgttatctaaaacaccttaatgtttccacgtgtcatcatctcacaagaatgtcacaaaaaagcttatattcttctagatgtaacattagcataactatatcccaaaaaagtctaccctttcgtcttgtttattttaacctcaattattacctttttatacatataattatgggactatatatgaactgattaatactattttcgaatcttaaaatgagttaataaagttatcaacatacactcatactcgcttaaactaagatatcttaacatttctaagatctaaagaataatttggtgaaagagaacaccaaaatatatcatcaaattttacttagattatgttacaataaaaaaaaattaaacatgtcaattgtaaaaataacattaccaattattcttatttttcatagaaaaattttatgtaccaaaataatctattttaaaccacaaacaaaatacatattaaattattattccaactcttttttaatggtaagaaattcaaatacttgtagaagacaaccttgttttgtcatgtgttataatatctatatattaattggaaattaatttctgttaattaaataatattttttaaagagctaataaataatattcttacattcaatttattgcattgaattattaacatatggtaaaaagttcttacaaataaatatataattttttcgaaaattgttataaaaaaaactttatataattggccaaagattatattgaccaaatcaatcatcattaaatttctattcttgtacgcgtattttataacaatttaagtaagattagtgtaaacattatacaagattataagttttcataaaaataagatttgtaggcgtactttatttgttgcccaagctgaccaaattacttatctctcttactcaagctgcccaatctgcccgttgctgaccactttcactctctctctctctgaagatgccctttcgtagctctctagctctcacgcacgcaaaaaaaatctccccttttgactaaaactttctccaccaatttgttttcttttgttcttccttctcttctttgtccccaattaaggagctcaaattcacttctactgaactgggttttaccatttgcttttgatctttggtttctgttcgattttggaggaaaaaaggatcaaactttatattaagagagaattgggtttcgttgatcttcatctttctattgatttcattatctgggtttgatcaaagttttgttttttggtacataaatatgtgatcagagagagtgatctactctagggttgattcgcttgactttttttggtttttgaattattggtgtttgtgtgttggctatggtgatttgatttggaattagggttcatggctacaaagttagagtcttttaaggtggtggagaaattgggtgttgagaaaggtgaaaaagggaagatgatgagtaaaaaaaagaatgttaagaaagatggagatgagagtgaaagtgggttttggtttagattcaagtttatctttagttgtatctcttctagatcaaaagttgatagttccatgaatgctactgctgttattggtataatctctttctcccttgtatacatatcataaagtttaaagtttgtttgtatttatgtttttgtgtagatgacaaagttgctttgagattgttgttgagattattatcttttgctgacgcttgattctataacaagccttcatttctagcgtgtagtatcctacaatctgtcccgtgtttctgtctatctgcttcaccttttatcttactgcttgagtgtgggacttggtttcgtctatacttcaattctttagtgctcactttcttttgttatatatattttacagcagaacctaagaaagttattgagaagcttgaaggtcatccagctccgactaaagacactggctgtgcggagagcggttcctcaacacctctaatgagcggggaattgaagtattcttctaagctacggattttcatgtttaacgaccttaagttagccactaggaatttcagaccagagtctcttctcggtgagggtgggtttggatgtgtttttaaaggatggatagaggagaatggaactgcacctgtcaagcctggtactggtctaactgtagctgtcaaaacactgaacccagatggccttcaaggtcacaaggagtggctggtaatgatcaatttccttaccttgatactggttatggtttcgtgctttggtttctatgaacaatgttgatagttctgctctttttgtgcaggctgaaattaacttccttggaaaccttgttcaccccagtctggttaaattagttggctactgcatggaagaagaccaaaggctgcttgtttacgagtttatgccacgaggaagtttggagaaccatcttttcagaagtatgtctatcgcaaacctctgcacatcttcttctttctgagggctttgaggtgtctcgtctaattaccatgtttttcttttttcatttgggttcagggaccttacctctcccttggtctgttcgaatgaaaattgcacttggtgcagctaaaggtctcgcctttcttcacgaagaagctgagaagccagtcatatatcgagatttcaaaacatctaatattttactggatggggtatgtctgaaagccacttaacccgataacctcaactctgtcctttctctctatgtttataaattttagaaaaaaatgctcccattgcaggaatataatgcaaagctctctgattttgggcttgcaaaagatgctccagacgagaaaaaatcccacgtatcaacccgagtcatgggaacttatggttatgctgcccctgaatatgtaatgactggtaagtcagctatcttgaacttgtttttggttttcgcattatagattgagcttttgaacttagaagttttaatatgaacatcaggacatctgacaacgaagagcgatgtatacagttttggagtagttttacttgaaatattaactggacgaagatctgtggataaaagtcggccgaacggggaacagaacttggtagaatgggtgagacctcatctcttagacaagaaaaggttttaccggctattagatcctcggttagagggtcactactcgatcaaaggtgctcagaaagccacacaagtagcggcgcaatgccttaaccgagactccaaagccagaccgaaaatgagtgaagttgtggaagccttaaagccattaccaaatcttaaagactttgctagctcttcttcttctttccaaacaatgcagcctgttgctaagaacggagtcagaacacaaggaggagggtttgtgtcgagaaatggaccgccaatgaggagtttgtctagcttaaacttgcctcaagcatccccttatcgttatgcccgtcaatcaccaaagcctaaaggaaaagagccatgactccaaaatagatattaatttagttcttcatgtctgaccaaggtttactgatttgagctgtatgttcagctttctgtttcatcgatcctttccgactcaagacgggggctgcagccttttactcagatcaaaaagatggtctgtgggaaactgaagcctggcaagtttggaacgtttcggatcctggtttgtgttctttgagttgaaaaaatatctttggtcctgaaggtcttatgattttgatcttatgatgattttaatgtgtagaagatgtaaagtttgagagtgtaaagtttccataaatgataaaaaccagttgtctgtaaaaccttatgtaatatatgttctgatatgtattgatttttcatctttaacttgtttaaattataactaacccctatagtaaataaaaatcaaaggtggaaaaatccttttaatggatacatagtagaaacatttcaatattttagctataaaacttttattaacataagcaaatgtagcatcactagattttaatccgcggcacaccgcggaaacaatttattttttaaagttagtatacataaaagtttgcaaattgtatttatctataaaatatttttattttataatttataattgttattaagtaacgtcccgccaaacccgtcccgccaaacccgtcccgtcaacccgtcccgtaaaaaaaacatttattttattaatattgatcttatttatgatatgttgatgaattattgtctaaatattttgtaattttgtagtaattaaatgctatcaaatatctctgcggtttgatgattataatcgaattgttatagttatggagaaaagcaatatcaaaaatgataattttgtagtaattaaatgatattaaatattttgaaagttttattttattaactaattgtgtagttaatgtggagagatttagggaagattgttaaatgtcaaatatttaattcgaagatttttttttctaattatcaaaaacaaacattaaaatccagtggcagccattgtaaataagtcccaactacaggatttatttcaccaaatggctgcaaaaatgtatatgtagattttaaaatgttaatttcattgaccaagttttttttttttttctcatatgttattaaagaaaccaaaagttggttataaggccacaaagcccacactgaatttgcagaaaataagaaagtgaagcccaacaagagtccaccacaaattacatcgaaacaaaggagatttagcatttggattctatcaaaacacgtgtcaacttgaaagtacaaccgtaacacatgttgatgagttaacagaagtctatcgacatcaactttcgtcaccgacgaacaccgaatctggtaaggaaaacatagccgaaaaatcgcacgaagaatccttgtttaccaccgaaatataactgaacgaagctcaatttaaagagacgacataaagatcttgtaataagcatctgaatgttcttcgatcctttgagcaagacataatctcttgattaagttcctgcaaatcaaggtttctaaagacacaaatcgaaaacattaatcttaagcaatcaacacctaaaaactaattctcaactgagatctatagttgttattgaaaaacacaaaagaaaagataaagtcaatcggcaaaaaaacaaatcgacgacgaaaaagagaaaagtcagtcaaaaccgtcattgaaaaccagattaacaaagttatgtaattattttaaataattatctacatttggttctgcatagtgtaccaatttgtgtaactaacaaatatttggggtcttttattaagttcataaaagttagaggtgccttttcgtaaatagtaaaaaacaatgtaaaagaagaaggaaggataataaaaaagtggagatgcggggtatcgatccccgtacctctcgcatgctaagcgagcgctctaccatctgagctacatccccattcgttgatgatatcatattataaacttaaatagcaaatatactaattctcttcttaatcctcccaagttccgacttctctcgtcggaatctgcaaatttcgaaatcgcgaagatgctgagaaaactactaacgcaaacatcttctcgccgtcttctcttttccggtgttcctcctctcttctctaaatccactatttcaccgttttcctcattatcctcttctccggagccaccgtcctcagagagtcccgccgttgaacatcccggaacaacaatctccatcgatcgttcttctctctatactcctcccggttcgtatctcactctcacactctatgtttgacagatttggtatctgattgttggaaattttagatcactctcatgaatccacacctgattctgagctcgttaagcatctcaagagtattattaaggtagaattcgattttcatacatttttatctttcatggtagtgacaattcaaagaatctgaagtggtttatgtatcatagtttcggggtggaccaatctcagtagctgagtatatggaggaggttttgactaatcctaaagcaggattctatatgaatcgtgatgtttttggagctcaaggtgatttcattacttctccagaagttagccaaatgttcggcgaggtgatttacttggcgtttgttgatttgagagttatgcatttgtgttttggttctatgtttgagcttgagattgaagttttgttactttgtgttgtgatcttagatgattggtgtttggaccgtgtgtctttgggagcaaatgggaaggccagagagggttaatcttgttgagctaggtccaggtcggggaacactcatggccgatctccttcgtgtatgtatttatgctcttgtatccttgacagttctagttccgttccataacctcgatgatctcattactgaatactaaaacctttgacttgtagggtacatcgaagtttaagaatttcacggaatcattgcatatacatttggtggaatgtagtcctgcattgcagaagcttcagcaccagaatctgaaatgtacagatgagagtagttcggagaagaaagctgtaagttcactagctggaacacctgtgcactggcatgctactcttcaagaggtaccatcaggaggtatgcatcttttgttaaatttctttggaatttaagacttacgaattgtgattatgaatgaggttgtggtctttcaaaacaatgatgtttttcatcttttctcatggtgtctcttttgcttctgtggcagtaccaacattaatcattgctcatgagttttatgatgctcttccagttcatcaatttcaggttagtttggagattatggttcatagttcatcgttatatgtggaaaccaacttgcaatgtagtcttcttctccttttagtttagtatgtgtgtcttatgtagactcaatatctgcagaaatctactcgtggctggtgtgagaaaatggttgatgtaggagaagattcaaagtaagtatcagggaaatcaaagaaaaaggagatatatcagtcttgggatttgcaaaatcatgaatagttgttgtgttgttggtttaggttccgctttgttctatccccacagcctacacctgcagccttgtatctcatgaaacgttgcacatgggctacacctgaggaaagggagaaaatggaacatgtcgagatcagcccaaaatcaatggacttgacccaagaaatggccaagagaataggttctgatggaggtggagcacttataatcgattacgggatgaatgcaatcatttcagacagtcttcaggtttgttgtctcaacatgttctgatcatgtttaatgtgacaatcattttctgactctgttatggcaaaatgtcttcaggctattagaaaacacaagtttgtcaacatactagatgatcccgggtctgccgatctaagtgcttatgtcgactttccttcaataaaacactccgctgaggaagcttcaggtttcgttcctatactggctactagtcattgtgatgtaggtagggttagcttacttacttgacaaagcaaatgtgtgtgttctgcagaaaatgtctcagtccatggacctatgactcagtcccagttcttgggttcgcttggaataaacttcagagttgatgcattgctacagaattgtaacgacgagcaagctgagtctttaagggcaggatactggcagcttgttggcgatggtgaagcgcctttctgggaaggacccaatgaacagacaccgattggaatggggacgaggtatcttgcaatgagtattgtcaacaaaaaccaaggcattccagctccattccaataaagaaagttgaaactttcagagaaggaaaccttctttttaacttggtttatctctcagtaaaagtaataaaaagtttttgagttctgaagttattgcttggattttacttagcctagcttctacttgaacataactatgactaagactgaatcatagtgcaaaagaggttgaatcattgtgattagactgcaagtatttcagtatagttcagctcaaaaaatcactcatgacatggaatatctgaaaaaggttccgttatgtgttatccaatatcttgatttaaccgtgtatttactcgatttggtatagtgtcagacaattttacacttcttataaacactcgattaattggtatattgataaactaggctgatatccatcctgtgcgaaataattttatacactaaagtagtatgcatgaaaaagtgataattagatatagaatctcttactacactgctgtcaaaaaaaaaaaaaaaaatctcttactacactatgtgcaatggtttactctttcaacatcatacattatacttcatatcatcttctctttcttccacctaatcattcaacatctatttatcttttaacatatagaatagtttgtttaataatattcaacatccaaccccactaattttatctcatatattttttttttttatgtttttaactacatattaataactcttatcaaataaatttaatttaagataattaaaagttaaaaacaaattgaacataattttgttttaattttataattttattgttgaaatccatttttctaaatgtttaaaagtttaaaaaatatatataaagataatttaaagaattatagtaaaataaactctctcttttttatgtccaaatcaaatgaagtaagtctctttttttatagaaaaaaaatgattaattttgatagaaaatttataaaaactaaattagtttattataccaaaattgatcttaaatagttatggtgaaatatctaaatctttagaattttaacatctaataaaaagaagacacatgtctatgtggtctccatttttggttttcaacatgttgaatctattcaactctgttgaatccacgtatgatttttcgccttttcaacaccctcattgtaagagttcaacggttgaataatttattcaacaccccattgcacataatctaataaaagaaccccaactaatttttattgggttgcctgaattttcagccctatactagttggaatctcaactttccaccctaaacttttagacacttgaaaaaccaccataaacaattttaatctcgataaaactacatgtactttcggatttgttcttaaaactacgcctccaattgaaccgaccagttaaccgataattatacatccggtttgacttacccataatttaaccgaaactaatccgattttgactctattttagcctaattttgacccacacaaaatgtaaataaattgtcttattaagaagtaaaagtatttttattaatttgtatttgtgataaacaattaaaaatattaaattattacttaattttagcaaaacttaatatgacaaaatataccccaaattatattttgagctacattttgttataaaattttgataatatacaaacatatacatttatcgataaattaatatctctttaaattaataaaattttgcagtcccaacaatattaatttatagaggttttactgtatgtctttttttaaacaaaaatattcatttttcttgaaatcataatatatgacctttgaactctatatatgtaatgaaattcaaaatatatgccaaatttatttttatagatatccgtaaacaccacaatcaaaatatatattatggtatttataaatttatttttctttatagattcagttttctttttatatattcaagatgagttatatatgtatatatatatatatatatatatatatttatatatgattatggtgtttttaaaaagaaaatggcctttgaattattaaatttagagtatataccaaatacatttatatatataacaccattgtatttataaaaagaaattgttgtctattttgttatattattttgcggtatattttgtttattaccaaaatatatactaaaattttattatataattttgtgtggtatattttgttattttattattttggtaaaattaattaatttatttttaattttttatcaaaaataaattaaaataaataaaaaatatttttcttctagagaatatattttttgggtataaattgggttaaaatagagtcaaaatcgtattagttttggttaaattatgggtaagtcaaaccggatgtgtaattatcggttaactggtcggttcaattggaggcatagttttaagaacaaatccgaaagtacatgtagttttatcgagattaaaattgttaatggtggtttttcaagtggctaaaagtttagggtggaaagttgagattctaactagtatagggctgaaaattaaggcaacccatttttatttgaacgtttaatacccaactgtttttggttggaaaaaaatacatgaagtaatagacttgtaaaatttaatacccaaacaaataaatgtttttatttttataatatgcaataaaactgactaagatgcaataaaactgactaaaacctcttaaaatctaattttgtaaagactttataagagttttaaaaagattttaaaaggacttacaaaggtttaaaaatccttgtaaatccttttaaaactcttaaaaaactcttgtaaatcttgtaaaaggttttaaaatgatttacaaaggtttaaaaaggggttttaaagtatttacatatgttttaaaagactttataaagattttaagaggttttaaaataatttattagggtttttaacaactatccaagcttttcaaaaatttacaatgtttttttaaagagtttttaaaaaatttacaagcatttggcaggaaaaagactttttaaaagcattttttggcgggaaaaatgtttgtcggaaattttttttttgacaggaaaattttagtttctaattacatgttttattagatgagggtaatttggtcattctttttaagggaaggggtattttttcaaattgacaacataaaagggtattgttgcaaaaaggtagtaaaaaaaagttgttttacaaatctccctatattttagattacataaagaatattaatacataagataatattttttaaaaagtaaaaaacaatttgtcaatttaatgataaaatgtcttttatttttgactttagaataatggatagtagaattaaaagtgttgcctattttatttctaaaatatgtggcaaaaaaggtggaatcaatctatatatataaaagattaccatctatataagcactaaaaactctttttattatataaaagattaccatctatatataattgaataatatgctaccaatccaataataaaaaattaacatctacaccatatatataaaaagtgtttcaccgaattaaaaccagaaattacttaataaattaatgaaaaaaacctaaagataaaagcatagaataagtaacaaacaataaaaatagtattaaaaaaaatctaaataaaaattgaagaactgattaaaagagatcgtaaacactcattttctgataaactaatccaaaacaaccttttttgtcaaaacctatttatttttagatataaatgatttcgtcatagaaatggaaatagatttttaaaatacttcagactaaaaagtttttgtatttttttttttttgataagatatagagaacgtaggattttccaatttgaatccgacgcatgacttatttagtaattttaaaatatataattttatatctggacgaatcttgatcgattgtgtttttttgcataatacagattattagctatggtggtagacaaagagaaaggtttaccgaaaaacgtcaaaaagttatggtgggttttgtaagagttaaaaaatgattgtaaagactttatgagagttttaaaaagattttaaatggatttacaaaggtttaaaaatccttgtaaattcttttaaaactcttaaaaaaactcttataaagaaaaaactcttttaaaactcttaatacgataaaactcgtattaaaaaaaaatctaaataaaaattgaagaactgattaaaagagatcgtataaactcattttctgataaactaatccaaaacaaccttttttttggaatcatctattacaaaatcaaccgatttcaagaaatacttggagtcacggcactatcgcggggcaagcacaaaccagcacgaaaggagaacccaccggaactttttaacgtcttccagtaacccctttcctttgtctaccatcatagctaataatctgtattatgcaaaaaaacacaatcgatcaagactcgtccagatataaaagtttatattttaaaattactaaataagtcatgcatcggattcaaattggaaaatcctacgttctcctatatcttatataaaaaaaaaaaattcacaaaaactttttagtctgaagtatttttaaaatctatttccatttctatgacgaaatcatttatatgtaaaaataaataggttttaacaaaaaaaattgttttggattagtttatcagaaaatgagttttaaccgatctcttttcatcaattcttcaattttatttagatttttttatataagatttttatcgtttttacttattttatgtttttatctttagggttttcattaattttattgggtaatttctggttttaattcggtgaaacactcttatatatatggtgtcgatgttaatttggtattattggattggtagcatatttttcaattatgtatagatggtattcttttatataataaaagagagtttttagtgcttatatggtaattccacatttttgaaactattttaaagatgaaataggcaacacttttgattctaatatccattattttaaagtcaaaaataaaagacatttaccattaaataaactattttttaacttttaaaaatattatcttatgtattaagattccatatgtaaattaaaataaataattatatgacctgaaatttataaaaatctcatcaagaattggactttgcccgctcaaaaataatttataaaactattacgatttctttgaaatcattttattttattatatcttgttaatgtaaatcattttaattggaatctaagaaaaaaatatttacttttttagaatttgaagtgattgaatctttgaaagaaaagaataacattttttcttttggtatgggtaaacctttttttaaataacatttatgttttttttttccgtctaattttatttgtattgaaaaaaccaatgtctgaaagtcaagaaacaaaacagaacagagaaacttaaaaaacagagcataacaccactcacattaacaactgaaataaaaatttaaaagcccaaagatcatcttctcttttcttcttccagacgcgataataaccacgagggtcctccccgagctaagtaagatctactccgcccatctcgcgtgacgctagtagctatatcccttgtaatccgatttgcttttggggaagataactgaaaagatactttaccaaagctcgggacaagatgatgaatcttgttaagataagacgcgtaccgtggccaatgtaaaggctccaggatagctttgatggcagcattacaatcagaccagatttcaatgttatccaagtgtaggtctcttaagctttgcaacacccatataaatccacgcagttctccagcaatgcggttcgaaaccggtaagaacatatcacgcgcgtgaaaaaccgcatcaccaaagtgatctctgataatacaagcaccaccacatcgctgagaatcgtttatccatgaaatatgcatattacatttcatcacattgaagggaggttttgaccatctgttactaataaacccaaaacgggagccgaagaggaaagactgtggtggtgtatctcgcagtttattccacaatgtagcttcatcaatagcatgagcaaccattaccgtcaaatccccttagtgtccagcatataagattttgttgcggtgtttccatagaccccataggaaccaaggaatcgccatacgcacattggaaggtatgcttacattctccatagctttcaatacaaattccaaattgtcagaaatagaatttgtgaacccttgtgttggccgaggcatatctgacatctcccacacttcacgggctggccagcaatggaaaagagtatgactaattgtctccctatcatgttgacacagatcacaaccaaggttaatgttcatgccatgagctcgtaaacaatctgaaactgctaatgcaccagataaagttctccataagaacatcttaatctttggagtagttttaacatcccaaatcttagccttaagctgtttagtttcttgttctcgttgggatagctgaggaggtgcgtgtttcagctgagatagcagccaattaccgcttttaaccgtgtaacacccatcccgattgtaagcccaaatgtagctgtcccgtgacaaaacgttaggagggtatgacattattctaaccacatccagagggagaaacagctccgatagtagaccatggttccaagagccttggggggtaataaggtttgaaaccatgagatctaaatcaaaaagagactgcttattaaaaggccgacgaggtactttatcaaaaatccacttctcgagccaaacattcgtcgaaaggccatctccaatatttttcataagccctttagccagcaaatcacggccatggatgatactacgccatgcataagatggacgtgatccaataagagcatccaaaaaccccttttggttataataccttgccttgtaaacacgagctagtaatgaggtaggctgtgtaaggagacgccacgcctgttttgctagtaatgcttgattaaagtctccaatatctctgaagcctaaaccaccttcttttcttgttctacacatcttttcccaagatacccaatgcatcttcttgtgttcttcacaagagttccaacaaaaactcgtcatagcactggtaatttgttgacattgatactgcgttaatctaaaacatgacatggcataaactggtaaagtcatggccactgattttagaagcacttccttgcctcccaaggacagtgtttttgcataccaacctgtcaacctagttttcagctttgtggtgatgtaagctagaatgtcgcgtttagaaccactaaaacactccggtaagcctaaatacattccctcacctccttccttaaagattcccaaaaacagtcctaacaaatgtttcataatcggctcaatcttcttaccatagataatagacgatttttggagatttatttcttgtccggaagcatcaccatagatcttaagacattgtagaatttcagctccttctttaaaattagcccgacacatgaacaagctatcgtcagcgaaaagttagtgttgtactgagggacaatttcttgtaagtcgtataccgcttatccgtccttcatgttccgccttgttcatgatatgtaccagagcctcagcacataagatgaaaagaaaaggtgagagtgggtcaccttgtctaatgccccgttctggtctgataaagccataagagttgccatttaggaggacagaatatgttaccgatctcacacacttcatgacccaatctatccacttactgtcaaaaccaagtcgagagaaaagctcttcaaggaagttccattcaacacggtcatacgccttagacatgtctgttttaatggccatgaaatcctcatcgcagttcgggttagttcgcaacgcatgaatcatctcatgtgctaacaagacattgtctgatataagtcgacccgacacaaaggcaccttgtgcttagagacaatatcaggtaaatagaccttcaaacgagagcataagatcttggatataatcttgtaagaaaccgagcataagctaattggacggagatccgtcattctgtttggattcggtttcttggacagcagacaaatttgagtaaaattccattcatctgggaatgagcctgagtcaaaaaaattccttacttcctcacatacttgctgcccgataacactccaataagtttggagaaaaaggccagtcatcccatcagcaccgggtgcgctactacctcttatgccaaagactgcttgtctaatttcttcattagtgacaggtttagtcaactcaacattcatactagcggtaacccgaggaagcataccagctaggagattggatgcatcacaaagttgagaagatgaaaatagcttttggaagtagtccacagctatgttacccttcgaaccatctgaaaactgctccaccccattgtcatcaattaaggaaaaaactttattttgagctcgtcttccgttaacgctaccatggaagtatttggtgttcttatcaccatcatttaaccaattttctgaactcttttgcttccaatacacttcttcttgcctataagcatcagccagttcacccttccatctttgaaggagaaaaaatctaggaaattgcttactcccttcctcctctaaattctctctcagcatcttaatacgtgtcttggagttggattgtgaagatcgtttccagcgagataaggatctacgacatgccgcaatacgatcaaaaaggcttatatctccagtattaccaccattatgccaaccttgtctaacaacttcaatagtttcaggcttagaaatccaccttttatcgaacataaaacgcccgctgaaggattgattttcattcacaaagcgggttagtagtggcctatgatctgaaccaactctctccaaatattctgaatgaactcttggaaacaaatgaaaccattccgagttaccaagagcacgatctaagcgaatctgaatccacatatcattgcgcttaccggcccatgagaacttgttaccagaaaaaggaatatcccgcaacctacaatcccgaaccatgttgcgaaaaggaagaaaagaagactcatcccgagctggaccaccaagcttctcagaattgtcccatatctcattcaagtctcctactacaaaccatggctcattccttgtcaaaccaatattaattaaattatccctcacttcttgtcttgaattccaaactgggtctccatatacaaacgatgcaaaaaaccataaggacccgagcttgattttggtatcaatgattctcttgtctgaatctaacacttctacttcatatgacgctttccagagaagtgctaaacctccactcaaaccttcagggtccacaatatgggcattatcatatcccatccaccccttaacattcaaaacattattactggagtttttcgtctccaggagaaacagaatatccgggaaatgatcacgtctcatctcccttagtataggaattgtcagcgagctcctcaatccctgatcattccagctcattatactcataactgctttggcggttcctcatgcggaaccacctctgtttctgatcgcttagcaatctttggtgatgataatccttcctccacagctttcctcttcaacggtgtcacttcgtcccctaccggctttattttttctctgtaaaccaatgttgttttacgctccccttgagccagcttagcagcctgagccttcctctggtgttgactaggcctacgacgatatttcttcgtgatcacacttgtcccggatgaactagcatggccgctagtttgaaaccccgtagaacaaggaccgaaattgatgtgatttgtgtctgtcgctggcttagcaatgtccaaatgaccattttttattgagaggttaccagctgtaatagcagaacttaacagcttctctccagtgacacttgtgttgttgttcttccttgtatcaaaatcaaaaaccaggcctttgcctttgttaatttctgtggtgatttctgttgcaggttccaaacgcaatagcggttttggctcttaggatctccttctaaatcccacacagatcttcgcactctatcaatgcgagcttgtttctcagtagcatctgacaccgatagatagcttctcatctcgtccaacacgtcttttgaaatttttggtcttcccgtggcagcatcaataccaacatcttcattagttagaactccaaaaagtggatcatcaggacttatttgtggtattgtacgtccggatacgattgtagccagcttcatcctccccgtagcattaggttgccggttctgaggattcagcggacaccgtgtcctatcatgagtaagacgctgacattgaaaacacctttttcgcacacgttcatactcaacgccaatcgtcaccatctcaccagtaggcagttccacctccttcgaattccacaagggtttattgatctcaaacagaatcttaactcttacaaaacccttactttgtggcttcaatggatcaaaagcaacagtgacaacttgcccaatactctcaccaatttcttcaaaagtgtccgctgtgtaaaagttcaccggaatatgacgtaaccgaatccacagaggaaggatttaaacatttatgtttaatatttttaaaaattattaaatagcttgctgacatggcatttggagaaagcatctaaaaaaatctgatgggaacacactgagaaagcctcaatgagctttcgaattgccctctccaaagctggatgtgggttgggtgattcaacaaaatcgagaagaggagcatgaagaatttttcaaagaagattggttattcatatactcatttacttaaatatttcttctgtttggtcttcatatgcaagtagaaagaaatcagccgctaaacttccaagagttagatcagtcctatggagttgcagttgaaaatattatgttgtggccgcgaaagtaattcgtatgcatcataaataaatttgatcttacaagagtgtatggccaacaacaaacaaacaaataaaagagattcttattgggagatactcaatacacgcactctggtaaacacagagcgacagaaacagggaatgtaaaaaccaacgattgtacatgaggagcgatgaagaaaaccagactcaagatttcacatttgtttatgtgtttttgactcaccaccagaatcagaacatgtagacgacactgtcgtggatcctggacttctggttctgtgcaacacattcagatatccacataaggttcctgatctcctgctctcttaacctcatatacgcaaagaataccgcgtaatggaactgcaaaactcaggtttgaacaaccattgttagtataatacatgaattgagagaagcataacacaatcagactctctaatgtattagtccagaagttatcattgaagcaactaaaaccgaaggttatcattaaagcctagattttgtggactttggaaagttctttgcggttcatttggggagaggaaaacaaacctgctgctcaaaggctaagcaaagccttctgacttcttcttcataaaatgctttgtcgagcatctggctctctccataagacatcttcgagaatatagcttgatacggaggatatttctccataacaccacgaacctaccagtgaatgataacggaattaaatgagcaaaattcgtaaactcaatatatttaatatattagcttgagatttacctggtctatatcctcgcagatagcaagctcttcgtgaccatatggatagctgcagaagaaaaaaatccaaaccatggtgagaactgagaaatataaacatctagtggaatatatcatttgactgtagaatgcttcttacagtagaccaaagttagagtacagtttctttctgtcttctcttgtgagctcagtgccaatgctgcatagcaaagaaaaccaatttcagaaacaaagcttatgatggtaacatcagctggttgatattgatattcactacctttgttgttttatggaacaaaacagtaagtaattacctgttgatagtgatattcactgctcttctatcggcctcaaaggccaaaaggtcagacataatctccgctgttgcgccaccaagtttctatttcggattgaacagcaaaaaacaaaaaaaaatggggttagctagtataggtagattctaaattcctggaaaatagattgagaagtcaactaagcacctgacagaacttgtaaaaatcctcaaggtatgctttgtagagggtgttcctcataatctctatgttcatgtcatcgagatcctacacataatatgatatgcatgtgatactacaatcatagcagaaactataaaacaaactgcacatgattgattaaaagtaagaactagaataataaatccttgagctttgtacctctgacgttaagcattcagaaaagtatggagccaaaggagtatccacaagcaccaaccggtagagttcccgcatgttctgagcaactgctagtgtagcaatactggaaaaaaatgagagagcaagcatgagaaaaacttaaaagtgaacaagaaaagatgaggtataaaagatggaaaaggttgatgcgggctacctgtcaaacatgcctaaagggtgacatttctcaatcaactcttgaacatctctctcatgcagggttccagtaacaatgagcacgacattgtcaatcatgtggccatatctgcattacaatatcaaaaaaacaaacccaatgcgtcatatatttgacagactgtatactaaacgacacccagggaagaaaaaaagaagctaacaatctcagcacaatatctgctctgttctagtttgatctcggtaaaggtggaaacttcaggaaagtaacaaatcttacactaggatggatagcaaccttaactctagaaactaataacaagggctacaaagaaaaaaactataacagcatccaccattgatctagactcatgattttagtaatggggagagcaagaaataagtatctcacacattacctgatgtactctaaaaaggtagacattggctcagtagcttggcaaagcatatgcttgtagtcatcaacaagcttaagagtacacttctccacaatggtggtggtatgcagaggtgacggttctgcattagaaaacatcagattcagatacaacaaactagcaattgtgcagacctcaagcacaacaacagtagtatttatggagatacaaatacagtgactcaaggaaccaatgtatcgtctaaccatcagatttcaaatccacttaataagatgaacaacatttctaataacatgatttccaaatgcctaaaacccagaaacctaaacgcaatgaagcaaaattcaaagtcaaatcatcaaaattcgtattacaacaactgagtcaaaatttgagacaatcagggatcatcataacgcaccgttttggagataagagccgtatttggtggcagagagatgcatcttgatatcgtctaggttctcacactgacatagattattgtaatcggcggtggtgagaagcccagcacggtggcctctaacgatcgcctccaaatatccgccatggatgttgaaggtaagcgcctcgaatccgtacatctttctctccttaacgtaagatattcagatctcaatgattgtcgccggagatctgaagaagaaatcgatacagagatcaacgcgaagaagaagatagcttcgaattgattggatttgtttgcaaactcgtgttggcacgtttaattacggttgtgtcctttaaaccggtgtgttaaaccgaagaatgtacgctgcaaaattattttcgtctctcaattttgctttgatttgttttggtttatcgatataatataataaataaatataaagacagaatttcagaaatccagtactttaataaaattctgatactttaaaatccagatgcaacaaatatcttgatatccaaatggtatctttaataaataaataaaaaactaatatgtgaaaaacaacaaacttttatttatatggaatatttacattttttaaatatttttattcgtagcaaaaaaatatgtgaaataaatccaacacaaaacacaaaatgcttgggatattttttggataagcaaattcgaatttatatgttttgagagaacaccaaaattgtgttagattaccggtaatatagattatgtgattcaactcatagaaaagtgaatttatctacattttttcttttatctggacctctagaaaatcgtagattgtattaagatggtgttgaaaaactaaaaatggtttgtcattattttttatttactttaagtagaaatgaataataaattagttgaagattagttttatgaaagaagcggtaatactttattgagaaactcccacaaatagcacacttttaagttttttggacaaaaatagcatgaaaaagttttttagacataaatagcacttaaataattatttgagaaattcctaaaagtagcactaaaataagttttatggacaataataatactacaattttatataaaatctattcaaccaaaataaattagaaataaatttaaaatattatatttgggttctctatttccaatttagagaatatatttcaattatttaaaagaaattttgattcattttaatattagtttatggtattatatttgggtttcctatttccaatttagggtatatattttcaccatttaaaagagatttttcattttaaaattagtttgtaatattatatttgggtttttttatttccaatttagagtatatatttctactatttaaaagttttttgattcaatttaatattagattagtatttgctctcatttttatttggaggattgatacaaatggtaataaaaaaacttttattatttaattaatttatagaggattaaaactttatatgctatttttggaagtttcaaaagaatatgctatttttggaataataaagtttttagtgctatttgtcttaattcccctagtttattcaggggcatagtaaaagaggtttcatagctcaatcgtttatttaaacgtagtttgaacttttcaggtaacatattcgatcaaagatattttattttagaatttggaaaaatttaagaaaaatttattgaatataatgatatagaaaattctacaaattgaaatagttcattagagttttactgtgcaaaaatgtaaagagatgaaagaacttaggttgccaccaagaacataatgattcaagattaatacttttataaaaatgaaaggaaaatgcattatattgatgttctaaacacatatttttagaaatctctactagctaaaatcctaattatatgggcaaatgtatttaatcgtaagattctatcttagacctcttatggactctttaattgatacttcttgcaaacttaccgtaatatcactcaggtacattaaaatgagaagctagatatgaagagatgaaagaagtcgagtcgaccaaagcaaggcgtttgtacatggaaagatatttctctagatatcatactttagatcatattatcaaaagataggtacgtagagttgtactgtccgataacactatcttttgtttaattttaaagtcgataacaatctcaacatttaaatgatattttggaagttctaaagttcacaattgaaacatatttttttgcatatttttaactttttttcgattcctcatttatttttttcattggtgagaaatgggaactgagatcttcaataaattaaaatttaaactttaaagagaaaattaatgaattaaagttggacagagaaatatttaaccgggtgtgcgtgtcttcgatttagcagaccggtttagggatactggtttaaagcttgcaaacaaatccagtcaatttcaaagttatcttcttcttcgcgatcacaatctctgcttcgatttcttcttcttcttcagaattcagatcagatctccggcgataatctttgagatctgaaatttcttacaatcaggagagaaagatgtacggattcgaggcgcttacgttcaatatccatgggggatacttggaggcgatcgtcagaggccaccgtgctgggcttctcaccaccgccgattacaacaatctatgtcagtgtgagaacctagacgatatcaagatgcatctctctgccaccaaatacggtccttacctccaaaacggtgcgttatgatgatgattcctgattgtctctcacaattttgactcagttttgataatttgacttcgattctgggttttaggcatttcaaactctcccaaatcaccaatttaatctgcgaattgaagaaatttcgatgtgaaattttgtagtcttgttaacaaaatgttgtttgtggatctgaaatctgatgtttagacgacaaattgattccttgagtctcagtttctagtttttgcatctgaatcgttgttttgtaacgcagaaccatcacctctgcataccactacaattgtggagaagtgtacgctcaagcttgttgatgactacaagcatatgctttgccaagctactgagccaatgtctacctttttagagtacatcaggtaatgtttagctctgtctcagtgtacatcattattagtgtaagattttttgctctcctcaagtcacaccattagttacctagatcacagagcaactattcatttcactatgttgagggaaagattatggtaattctgaaatgctagcttagattgtgtccttgttttcctcctggaataatttagtatacgatctatctgtcatttgatgtattgggtttgtatgcagatatggtcatatgattgacaatgtcgtgctcattgttactggaacccttcacgagagagatgttcaagagttgatcgagaaatgtcaccctttaggcatgtttgacaggtagcccgcatcgagcttttgcatcttctattatacctcctcatcccttagctgtttcataacccttttctcgttttcccacttttatgcttttctcatgctctctcactttttccagtattgctacactagctgttgctcagaacatgcgggaactctataggttggtgcttgtggacactcctctggctccatacttttctgaatgcctaacatcagaggtacaaagctcatggatttttattctagtttttgtttcaaattaatattatgcaatttcttttctagtttctgttatgggtgtaatatcacattcatattgcattatttgtaggatctcgatgacatgaacatagagattatgaggaataccctctacaaagcataccttgaggatttttacaacttctgtcaggtgcttagtcgacttccagatcttttattttacttttgaaatttcagaatctacctatattagataaccccttcttctatatttcgtgtctctgaaatagaaacttggtggcgcaacagcagagattatgtctgaccttttggcctttgaagccgacaggagagcagtgaatatcactatcaacaggtaaattacttcctgcatcaaaccacaagctgatgttaccatcattatgttgctgtgtttatctatgctctgaaactgattttcattgctatgcagcattggcactgagctcacaagagaagacaggaagaaactgtactccaactttggtctcctgtaagaagcattctacattcgaaagatacactcgatccaattgctgcataaaattattaactatggttttgatttttgcttttgcagctatccatatggccacgaggagcttgctatctgtgaagacatagatcaggtaaatccacaagctaagatattgtataattatatacggtctatgaatttggctcagtgaatcacattatgtttcactcataggttcgtggtgttatggaaaaataccctccgtatcaagctatattctccaagatgtcttatggagaaagccagatgctcgacaaggcattttatgaagaagaagtcagaaggctttgcttagcctttgagcagcaggtttgcatccctctcccaaaatgaaccacagataactttcctctagaactgaattttaattggattcagataagagaccatggagtgcgattacataatgtgatgtgttataggcttatataactgtttctcaattcacgtccaatactaacagtagttgttaaaacatgatatttgcagttccattacgcggtattctttgcgtatatgaggttgcgggagcaggagatcaggaacctgatgtggatatctgaatgtgttgcacagaaccagaagtccaggatc

SEQ ID NO: 479 - DNA, 82430 bp, Arabidopsis thaliana
gatcaagagcatcaagattcttagaaccatgtgttacaaaggcttcctttacaaggtatgtggaaaaagttattaaagatggaaagatggagaaattctcttggaaaagttgatgagtgtccaatatgttgtgcaaacttaaaggcataacgcaaatgaggggaacatctttagggtcaataataatgttggtcaaatccatttttcatgaatttgtctagttatcaatcaagttgttcagaagaagagatgggttataattataacctttgtttaaagctggccacaaatatttagcaggaatccaggggtcattccatattgaaattgactctatagaaccaacttttttaataagttcttaactagaggtcgagcagatagaatactctctcatccatataatcaaattggatctaattcgatccatggaatttgatttccaaatatatcttcctttaaaaaccttagaaaataataaatcaaagatcacaataatgcagtattaatgtcttccacagtctgaaaagatattccatctatcgatttattgcgacataacttatgccttgacatcaagtgtatactttttgattttccatttgaactccaccaaaattttgctaccgcgctggtaagttttgatgtgaccgagtttgataagtctaaaacaagacatcacataagtatgtaacgcagcttaatcatcacctctttctcacctttagataacaattttgatgaccatcaattaattctatcatttaaacgctctatgacaaaggataaatacttattcttagagccccctaagttttccagtagtcccatatatgaacgtgaaaaatctataaaaaaaacgaacttttaaatttggaatgaaaaaacatgcattttcgaaataccatttaaatcacaaagttttagtttgatttatgataaaatgatgaattttcgttaacttgactatttcgacaatgtcattaagttttcttaaccagacgatcacatagttaatttttcgttagaagcctatatagacttagaacgacatagttttgaaagctcgtaaatgacatcatttcattagaaaatagatggaaaacctacgagaaagcaaactactaacctattggactcataagagactctcaattgctaaactacgaaaatatcttggtataatagcaaatactgcatacatattttgttggtgtaataagattattctttcctaaattattaatgaaaacctaagacttatggaatacagaaaattagttataagacctaaaatttatataatccttctcatatatgaatcctaaaatttgtagaattcttaatcctatatttatatgagaatgattgcataaattttaggtcttataactaattttctatattccataagttggcagtctgttaaatctctgtaaacaatttttagaaaattatgaatctttcgtcaaagcgaaaggtcttcatgggacatttctaacatgtacaccaaaaaaaatccaaaaagattagtcgggcattcgtatacacactcatgctcattagctttcatagattaattatcaccgttaaatgtagatacctctcattacttcgtcaacgtcatagtcatttataggaatgcaataattatgagccggtgcttacccaacaaatactatcctcaataattttattagaaacggaaaaatgtatatcattaatattagttgataacaaatttcaaaatcgaaatatttatccaattgtaacaaaaatagtaactgaaggattattcattatttatttcattcggcattgttttttatttttatatttgactaacacaatcaagtttagacatcacaatgtccattattttttaataaatatcagaaatttaggagactactgactagaaattaatgtaaatttctgtaccaaaattccaaagttcataaaagataaaagcacgtcgcttgatatataaaggacgataaagattacatatatagataaattaataaatactatattaagaagttataataaaaaatattggaaggttacatgagtaagcttctaatcacggcagcttcagggctatcttcatcaacagagtcaagaagctgcgacaaacgatcactgagattgtcaacttctctatgcaattttcttatgtagttgcatgtctcttgtagtacctttgatgctgacacctattttgaacaaataataatgttaggattctacattttcaacaaacatcatcaagaacattaatatatatacacacatgtacgaacaccacataaacaagactttttcgaagttcaaaaatgttgtcaggagtcaaatgttccgacttttttggtttcttttgtttgatttaaatgtagacgaaaagatcagttttttttttttttttgtatatacatgaatgaggtgaaatgaatgtatatatgtcgtataccttatcagaacgacgccgttcgtgaatctccggcaaaaactgacggagcttactaacgaggtcgatcatctggtcatcggagatcctcgaagcattcgaagtttgtcttgatcttctgttagacattttcttgtttttactttgtgattaggtgtaacactacaatgccgcaagaaaataacctttatgttgtatgctttctctcttttctagattagataatagagaagagattgagagagaagggtttgttattaagaagagagttttaaaaaaaaaaaagtgagagaagttatgtagaaggtttgtgtttattctacaggttttatatttgtgttgaagaggtgtgaaagaaagaaaaagaagagcaacgaaaagagaagagaagagaaaattgtaagaaagtgtttcgggtaatagagacacttcgagatataaagaaaatgagaaagtgataagagagatttaaagaggtcaaggaccacaagggagagagggaagagatcaataaacctagacaatgatgtaatgggagagaaagagatttgaatctttgataaaacctcaaacaaaatttgtttaaataaaattatatttttctttatctcatctacatagagtaacatagattagaaatgaatatttataataaaaagtactcactaatttaaaggaaaacttatatagctttatcatatattattaacttttaaaaactatttgtatggatataaatcaaaatttattttgtaaaactagtaaaagattaataattgaaagaattgtatataatatagttatgctgaataatggacgaggattttggacattttaatggagaaatagatgaaaaagctgaatgttcccaaagctggtgttgaagttgaagtgggatttaagagaagtgttccatgttgagctaacaatgtggccctttatgtgcatgtcactaaaaggcaataccatgtgatgaccttgactttctattttcatttcattactatttacgatattatcccaccttggatccatagaattatagaaagatctagaattgatctaggaagtttgtggttgatccgaaattgaacataactttccattcaagattatagacctaacttcctgtcatgtatgatatgtcacaagaacacatatgtagtaatccaaatcaatttagatgaactggtttagttaaattagtgtgttcacatggcttaaaacttattacacatagcttgtagtagcacaaataattttgaatcaatgtgttgatattccttattgaatctatatagaccgcaaaaaaaaaggaaaaaaaaataaagcagcgtggactttgattcggtcttgcaatggattacccaaaaaaagtagtcatgataagttcgtctgcttcctaatttaactcctatgtttcggaagcttgagagatttagtatacttgatgtttaatggcatatatcatatatgtcccatatggttgcttcagatctcagattatgcctccttagattctaaatcatgattaccacggggacacaaggtacttaattatgtcctttatttgtgtgcattgtttgcataacatacaaaagtgtcagtaaattaggaaaagtctactaattaattggtattaaatctaatcaactgaaccatgttttctcctccaacttccaagctaataggaaaatatataccaggacttataattaaaaatctaaacttaattaaggagaagttctgtaattattaatacctaatttttttttatgatttagaaacttaaaacaaaatttacatgtagagcaatagatggaggcgaacatattaatagcttattttctacaatacacatacatcggatttgaatccaaattgtgataagagaaaaagatataaatcaaaatgttcatactaattatttcgtttttatttatttctcgtcctttatggggacatctaagtatgtgattgttacagctttgtttgccttagcttcgcatcacattaattaaatttgtaatatggttgttttatcctctatttgaatgaaatgcttttagtgttaaacacatttcaattagctaaacataaacaaatagttatagactaattgtactgttttattgatcactgaacccgggaaatttacattttggtgactagaatattgaaatacattgaaggtaatgagtaaaataaatttagttattacaaaatatgctaaacaagtagtgcaaagtgaacagagtaatggtaaccataataattaataagattaaatacaattaacaaaaaatgtataaaattttgagtgaccgtaacgtaagcacgcatgtcttttgttgttttgttgtaatgaagacaaataagacgtctcaattgaaggcgtatagctaggttgagaaaagtactcgacatatatacaattgtccattaaacgttatctacataattatattgttaaaccattcgtaattatcaagaacaatactacatagcataaatgatacgtattcatcatcatattcgtttcgtttgcatatatagattattggtattgtctttgtttttttgcaaattaggaactttgcctatgtgttttctatttctgatcttagtttttgattttttgatagtcaagtctttagtctatctgcaatgtgagtttaaactcataattttacaaacgaaagaaatatatttcaacaaaattagtcatgtttaaatttgtcgtattactataagttctatcaagagaaaagccatgtaaaattacggtcttttatccgcgcattttcaaaattaagattagctccgaatagttattctacacacaatggagcagacaatgcgtaccaaaaattataccatgcatttataacgatattgacgacaacatgaattattcaccataaatatacattaaaacgatgtgtatccaacgtagacattaaaagtcaagagcccttgtttgagaaggttcgttctcatattcggaaagaagctaatcactatgttttggctctgtttttaccttaaaactcggatttgttatgacagatttttgccattataacttttggatttggtttacgcagccatacttgtgttgactccacttttttcttgttaataaaagtttgcattttcagtgaaaaatagaagaaggaaaaaaatcaagtatctaaccaaaactccctctaatattcttaagaaaaacaatgcacattataagtatacattatatattactgtaaattaatagctaagggagatgtaacatgttagtccatgtgggtttcacgtactgaatgttaggcctcttaggctccacgatgtttttatgtccaacgatcccttttgatttttcctatcaattttggtccattcaaacataatgtaacaaaataagattattcaaatttaagttattgataaaataatgagaaaagcagccttatgcaataatgcaataattgaattttccgatataactatatacatgttttaatttctttttgtttgaatagttgtaattttcgtggttaggtttacgctgcggaatcaacgtagtttaagcaatacgattttacgaaaaatgcgtaataatatactattattcagcatgctataatagtgatttcaacgagtcataatacgtcttgacctttttataagtagaatactgtataaaaatatgctttttttccttgttgaagaaataaaaatatgtatgcgttgcaaacaaaaaaagtttgttttaaagaaagggaaaattatgccccgacaaattacttaatgatgtttaagcacacttcatctacctttgctttgcgctcaacaaaatactgattgatcaatttaccaattaataattgttataactcctacactatcttccttttaccaacgtcgaatgtaaaacattttatgatataattaaaagggggagagtataccgtaaatgtatgttgcagtttggtctcggcattgggatattcatgttggattctcattttcggataaaagagtttaagagccaatagagtaaatatagaaaattggttcagtttcggtttcgcttcggttctaattcatggtggttgagttaagatttttagaactagtaaccatccactaaaattgattgggtcttgttagaatattttttatatgattatatcggatactcattcgaaagattgtcccttatgaatctaataggttagatgttcgattatatgtggacgcgagttttgcatcattagtttctaatgaaaccacgtcgttttggagctttaaaaacgacgtcatttcgatttattagacatttctaacagaaggttgacatcgttaattatgttaacggaaatttaatgacgtgtctaaaatggtcaagtcaacggaacttgacaattttttcaaaaagtcaaacttaactttgtgatttatatgatattttgaaagttcatgtttttttcgtctcaaatttgaaagttcgcggttattttgacattttttcttctttaaaataatgtcgttttcattgtttaaaaataacaaaatgtctctcgagggattcgaacttaagacaatgtagaccatggccaagtgtgagattagttaaacagtaagacattttcaactctttttacaaacacattattatttccttctttatcatagccttataagtcttttaatttgagtttgtttacggcacttttgaatttagtccatgtgtattgtgaccatttttctgaggcatacgacaaaaacaaaggaaatgctctagttgattttggttcatgggctggctcattgtgtgggccaaaatatttaattgaaacaaaacaaaataaaagtccaaattaaggcccattataaagacattgaaatatactacttgggctcataatttgtatgacttatctcagtttccttgacagtatgcttacattacatacatgggtccgtaattcgtatatgtcaccatcgccacattatatttaactatttataggataagtgcacgtaattgttttttaacaattgtaatcttgtgcattgtcattttatgcaaggaaagtctttaaatatctacttcaagacctacaatttgtttttctgtacatagaaacttgatgttttgttattttctatacggtgatgatatgaaataatagaacattttagttatcttattcggattcgtctctatcgggttttgtaatttatggaatgtgaacaggacgtacgtaacttgactatttttctacaccaagaggacccatgtatcaaagtggaaaactatagaagaaaacaaaggtttgatatgtcgatttcaatttgcaaattcaaattaaaacatttcttaagaaacaaagaagagcaaaagctcctcgcaactacgacgagaattcatattcttcggttctgtggcaaccacaaaaatttccgagttttgtggattcggaatctgtgttttttcttacagtttggccaaatgctctctttttttatccaaagcaattgaagtagtaatgttgtttttaagttctgttggttgctttctttcatttctagtgtttattgttataatctctgtctaaaataaaaaatagtctaaaatttcgttctttaccatgaaaaaaaaagagcaaaatattcaagttgtgagaattataagattggaagagttaaggtacagtgtcagataaggggccctatgtttcaaacagaagcaatgcaatagtcaacatcttatcattatcaaaaccaagttcatgcgtatctcggtacattgtacaaattactcaaaatcttctacatatcatatattagtttgtgtgaattcatgtgttatctgtctctaagtgttttgtcattgttttcttaactgaagaggagatttattatgagatttatgaatttgattggtaacacaaaacggtataatatttttagcgggtaaaaaaaatgattaacggtacataaatagttaaaaacagtataaaatagcatataaaggaaatggtaccaaaaaaattgatagtattttttgtatcggttttaatatcgtttttttattagttacaacgaattagtataatctgtattgtaacagtaaaagattaccagtcataaccaataactgatagatgattcagcaagtcagtataattatatcgcactaaaatgttatacatcctactatattatttgggaagtacattttaaatgtaactttattttttgtaagtaattacataagtatgccattagaaataaaactttaaaaagtaaattaattcaactctttaaaaattaaaaagtcaaatactcatttaactaattaaatttaattaaaaaacgaaatacattattaattttcaaaaaagtaaccaattaaaatcaacaaattagatttgatatctaaattatcatattaattttttattaattattatagttcacctctcatctttatatgattctatttttacgaaaaaataatatcatcgttataaaaaataattagagttttttcgcatatgtcataatttgaattttttaaaacgaatataaactgttcaatacatgaaaaaatattataacgggtcaaaaatagattcttcattcatggaatcattattccaagggttttgggatgttttatataatgattttggcaggatgtaaaatttttcgaataaaaagtagtcagcaaaacatatgtttttttgggagtttttagataattaaatcagagaatagggctggacatatgagtaacccattcgagctcgggtagaacccgttcgggtttaagattaatggtatatgatttactacccaatagaatacttctaaatattcggttctggttcgggtcgggtccagttgggtttgggtcagtttggataaaaagtttcagaccctaaaaatactcaaaaattagaaacggatattttgtatgtagatagtgggtctccaaacaaaaaaaacttttaaatttgttaagttttaataaatttaattatatttgaataaattttactaaattttgacaaacataacaaataatttttgaatagtttaattattttggatatttaggtccaaaattaattgacatatttagatttataattataatcttagataatgagattatattacgattaaatataattaatattttggatattaaattaatgtttgggtttttgaataccctttttggataacgggtaatttccggaccaatcggatattcacgggtttactaaaactctacccaataaggaaatttcctaaaattttaacccgccctaaccccgttttttggttcgggtattgagttggttatcggatccgttttttcgtcagccctatcaaaaataatctaatatagggcccaattaggtccataaatataacaaaaatactatacaaagactaattccaatttgaaaaattctttctaatgcctttttcacactaccctttttaattctactctttcctatttagcatttttatttatactctctttaaattattaatgaccattttacccttatttgtaaattgatttatgttaacaaaatgaaatattaatagttttcgtctaaaatattccaaaataaaatttccctccaaaactttcccgccaaaaaatttcgaaaaaaaaatttcctgccaaaatttgttttcaaaaacatttttcccgccaaaaacttttgaaaaacaaaattcccgccaaaaaagttttcaaaaatatttttcccaccaacaaatttcgaaaaaaaatcctgcaaaaaaaaaatttcacacacatttttcccgtaaaagtgtttttttggcgggaaatagatttacaagagattttaaaagggttttaaaagattttaaaagatttacaaaagattttaaagggtttaaaagatttacaagggattttaaaaaggtttttaaaagatttacaaggaattttaaagggcattaaaagattttataaagattttatagggtttaaatgtgttttaaaatatttacaaggaatttttaaaggattttaaaagatgtacaagagttcttaaaagattttaaaagaatttataagaaaaccctttaaaaactcttgtaaatctttataaaaccttttgtaaaggttcacaagaattttaaaatggttcaaaaagagttgtaaatgttttaaatacttaaaattctttttctaagagttaaaaactgtttataaagactttataatagttttaaaaggatttacaaaggtttaaaatccttgtaaatccttttaaaactctttaaaaactcttgtaaatcatgttttacccttttataagcttttaaaatccttgtaaatcattctataccacttacttatcctttaaaaacgattgtaaaccatgcaaaccctttttaaaatctcttgtaaatcattttttgacacttacttatgctttaaaaacgattgtaaatcatgttaaccccttttaaaatcccttgtaaatcattcaatgtcacttagttatgctttaaaacgattgtaaactatacaaacacttttaaaatcccttgtaagtaattctatgccatttacttatgctttaaaaacgattataaatcatgttttacccttttataagcttttaaaatcccttgtaaatcattccaatgccacttacttatgcttaaaagaacattataaaccatgctaaccctttttaaaaatcattgtaaattattctatgccacttacttatgctttaaaatcgattgtaaatcatgttttacccttttataagcttttaaaatcccttgtaaatcattcaatgccacttacttatgcttaaaaacgattgtaaaccatgctaaccctttttaaatctcttgtaaatcattctataccacttactaatgctttaaaacgattgttaatcatgttttacccttttgtaagcttttaaaatccattgtaaatcattcaatgccacttacttatgcttaaaaaacgattgtaaatcttgtaaaactattgaaaaaagttttaaaataatttacaaaggtttaaaaaggggttttaaagtatttacctatgtttttaaaaactttataaagattttaagaggttttaaaataatttacaacggtttttagcaactaccaaagtttttaaaaaactttacaaggatttttaaaagcatttttttggctgcgaaaaaatttcacgagaaaaaattttggcggaaaaatatttttttggcgggaaaaaaagtttggcggaaatttttttttggcgggaaaaataaattttggctccaaaaattcggcggaaaactttcagtttctaattacatgttcttattagatgagggtaatttggtcattctgttcaaggaaagggataattttaaaaatgaacggtgtaaaagggtattgtttcaaaagggtagtaaaaaaagggtagttttgcaaatctcccttctaagttaggccaaaaattagatcctctaatacaaagaaaacttgtttcttaccaaaacaacttgtatacaaattttacacatttacttaaaactacatatgttgtatttattataaaaataatatttttaaacaaagttaatcctttgactaaaaaaaaaagaaaaaaaaaaaaaccaaagttaatccaatgcagcattatatccaaatagtaaaaacattgaaaaatattatagcatcacttttatactatactatttcttatataattcaaacaaagtatataatttaatttatacaaaatattaatgcccatgctgtatagcacgagttatgatctagtatgacagtatatttgaacctctagtttaatagcaatgtcaatcacttcttgatgtttaattaactgttgattacttgatctattacatcaatcatatgtctcctcttggccttcttgttaattggtcgtttgcgtactgtcacggagttggtgacttgagatcatagtagctcgatttatattaaatgaattatgtttaataatattaaagacataaaaatctaagagcattttcaatggaaggtttttaagtagttcttagaggatcattattggtggtatcttagctaaattcttaagctaagatttgtgaagaaaaatctcttatataagaattttttggcttatatttaagtttttttcttcacaaataatagttaagatttggctaaaatactaccaataatggtgatcttatgcatatgaaagtagaataagaagagagagaataagaaaaactcttatctaaaagacttaggatttatataagagactaatgagacacatgtctcttttatattggttcaattttttttttaaaaaataaaatttaattatctaaataaattatattaaataataatatatagatatttacaagaaaaaattaagagtcctgcattgaggatgatctaatgcattgttttacgagttatgagtttatgaataagaattgttttttggatatcggattttagggtctacaaaaatgtttaatggtttgtcaataatgatcaatacaaagaatatctaaagagtattcgcttaaaaatactcgttcttacttttgttatctttctaagttttatccgaatgactataaaatttattaattacacattgatcttatattctcttagagtttgggttccaatgtggtttataaacataacactacaaataaatctgtattaggacttaaaccgcagcacaactaaaacaatacttttatatgaatggtaacaaaatgcagaacatagaattcatccgcatatatcacacctcacgtgttctgccacactatgcaaaagcctgttagggtaactggtacatcaatactaacgtatgtagcaatgtccaaaaactgatggatatgatgttctgaaatgattgatagatatagatataaccagtttgctaaaatatgaataatacaacgagtgacattgttgaaaatgggagaaaagaaagcacatgtctgcacttttgccttctcatcatacaattaaaaaggaaagtagttttctctgtgaaaagcaaaaaaaatagtcttcaaactttttcacaacttacccgtcagtaaataaaatttacttcatgaattataacacctcaaaacctctttgtgcagaaattatacgttctatttaaaatttttgaatttcattataatacaaatagcatattttttttacaaaaccattttagtaatttttataatatactgtttatattttaccatttagactactaattaacacctttacgttttgaaatatgattatcgtatttacttttcatttatgaaaattcaacacacgcaaacaaacaaaaaatcaacaactaatacaaaactttaagcattgatcaatgtgattatgggtataatttatacattaaattatcaaatatattttttgaacataggactcaagaaaaacaaatcaacaactaatgccaaaattttagcatcggccaatgcgcttatggatatgatttgtacattagattaaaactgcataagcgagaataatatttggatgagtgtaggaatattttagtggtatataaatttgatgaacctcatatcattataattaagcaaaacctttttctttgtttgataattcttatatttctcacacaaaccaaatgaaagtagtttggtggtaacagatttgagggatatgattcccacatgaattttttcatttttatttgattagttgaaatgatatcatgttcataattcatttttaaaatccggtgatcaagttacttgatgactatattcacctggaaaattagtcggaattcggtccagatcatccttgttaccaaaaataatagtattatttcacacgatcaaaattatgccttagttctatgattacaaaatgttcctcatgattctctacactatctattacattaatatatacaaaaaaagcagatacacatactactggaaagtgaaacctaacgcactggaacacttgaggttttgtcagtatgagtagggacattcgagtccttcccaatgctgcttcatgttcaatctattttttcatgttcataattattttaaagttgtaatgataacaacactaacacactaacactttccataaaattcataacttgtattcagctttttctgagtttttaatttacttttggtgtgagatgcttttaggtttatgtgatgttggtaaaaagtatattatccttttcttattgatttttgttcactaagatatgcaatgatgactaattttttctttttttcgttttaatttttagaaattgtgagtcttatttattagcggttggtatcttaaatatttaattccttacatgtatttgtcttgtgatcgcaggtcttgaattctttaagtttttttgtaattaaataaattatgattctattcaaaatatttggagtcttttatatatttgatgtgttgatttggaaaaagaattaggagaagatatggcctttatcttaaacagcaaaaccacatgcaaagcaaataaaggcaaacagatccaacagatagaataagattaaagagcttcacagttggtttctttagattttattcatttcttttcatagaaattattggaactttatggctccacacaccaaataaaagaaaaggaatagtgaaaaagaactaaataattcaaggccccaacaattagaagataaaatagaagaacccatttgttgagtatattaaacattgataatcttatataagttctctagatcatataccaaaatatatacatgtgaacatttcctctagaaattctagattgttaaaattctagaagtaatattcctgcttaaagccttagtaaaaatgtgagatagttgatcatgtgtgaaaacatggctagtggtgaagctgccgttgaggatctcatcttaaagggagtgacaacaatcgattttattgagtttgatacgttcatggaatattcggaaatgaacaacaatcaagttgtcacaaaaaaatatgaatgaacttgtcatggaaaaatcggaggcctttgtaccaaagaccgaagagtcttctagaaaatttgagcgtggccaaatgaatgaagcaaccggtaactaaacaccatgcgcgaggattaccatgcagtccagtcaaaatctcaccaagaaacaagagatagactctacgtagaaccagattactctttacgtatcaaacaacacatatatagaacaacattcctattatatatgtttagaaacctacatatattgtggtatgtaagtagcacaagaacgaaataacatgtcaagacgagtaaccgcaaaaaaataaggaacttgaataccaaaaaattacttaagatctcaaaaaattacttaagatctcaagaacgaaataacatgtcaatgcgaggtagagctcattctcatctcaatttctgcaaaatttcggtttgaagtccactatgaaacacttcagtgcgtttctaccggggttgaccggatcagccgatagagtttataaaaaaaaaaaatccggtctgtgatttaggatattatataagacaattttgctgtttaggctgaatctaattttgatagccggtctaaattgattaagtcgctgtaagaccacataacctgattagaccatgcgagatcaaacccctaaaagaacatgtccgatcaattctagtcatgaaccaaatgttttagggaaattttgatcaaccaaagtattagagtgattttgttttgtttcgaggcataaattaaaaacataacgaaaacatagttcagtcttatgttccaaaacgggcacataagcaaaatgcgaaaaaaataacccttaattaaagaaccttcataaacactccaaaagcttcattatctacacctattcatattatcgttatagtccatagaaatcttccaaattaaagttttaatataaaaaaaattacacaaaccgattttttgtttttaatccatgatcaagcttcaaatcctatgtgtttgaagctgtaacagccttgaataagctccctctggtcggctaacgagctctgaatggctgccttgctccacaatccgcccgtcttgaatcacaccaatgcaatcaacacctcttatggtggacaagcggtgagcaactaccacggtggtccgacctctcatgagcctctctaacgcctcttgcagcacgcattctgattctgcatctagtgcgctagttgcttcgtctagaagcaacactgtagggttcttgagcacagctcttgctatcgcgatcctctgtttctgtccacctgataactgcactcctctttcgcctactggagttttgtaaccttcaggtaaaccactgatgaaaccgtgagcatttgcggctcgagctgcatcaattacctcggattcagttgcaccatctttaccataggcgatgttgtcgaagatcgttgctgcgaagagagctggttcttgttgaacaagaccgattttgagccttagagatttcaggtttagccggcggatgtctttgccatcaatcatgacttttccagcaagagggtcgtaaaaccgctcgatcatcgcaattacagaactcttccctgacccactcgcgcccacaagagcttggctatgtccagctcgaattctgaggttaaagtccctgaaaaccatgacgtcgggtcttgaagggtaagcgaaatcaacatgcctaaactcaatgtctccacggatcgtctccacgggatcagcatcagcatcatccgggtcaatcctggtctgcctgtccaagaccgagaaaaccgaaccaacagcttcacctccccgaataatttcaggagcaagactgacagtttcagcaacagagtttgcagtaatgaccaaaaccacaaacactttgatcactttggaaaaggttgacacgcctttactcacaaggtgggcaccataccagagaattaaagcctcagaaccatagagagcaagctgcgagaggccaaataggaaacccgaggtttgacttcggtataagcttcttttctgaggtacacgaagctcatgacagaacaaagagagaatcttgctctgtgcattgaaagctgctacggttctaatgttactgactccttcaccagcaatcattgaagtctttgcatgagccttagctgtgtctccagcaaaacccttcagagatagttgctgcaatgtagccacatatattaatacttatgatttagaacaacagatggtaataatagttcacttgtaaaaaataagattgacaatcaaaggtctaagtcgccactaaaacatgacgtagaaccatatagttaaatcacatatgcaacactctatcccatcaacatcagtacaagtacaatgcctatctatgttcttctgtgtgaaatctatttgatagatttttcaactaataattagatcacgggtgaaaaaatgttggtgatatatcaaagcagagtcctgaaccttgcagctagttagaaacaaaaaaaaaactcatcacaacctaatctaccaaaacaaagaaacccacaagcaaacattgactagtggatggtgtaaaaacactgacacacacactgtgataagtaaataatgcactgagacaacaactttgaccaatgaagaactctaaataaaatattggttctaagaaggaaaaaaattgcagattttttggatttttgtggtgaggttttatgggcaaaagaattaaataaagagagaagtgggatcacagttcagagttcagagagtgaagtaaatatgaaagcttaaagtaggatagatttagcagaagcaaaagacagaggaatcttagctattttcgtgaacactgttatctatgggtcatagtaccaatagaaactatataataaatattcttcacacatgcccagagagtaaactaaagcctactgttttttaatttttttagcacatttattgatgtgagggctccatgatcttgacccttacactatttccaaaaagtagaaaaaaaaagcttcttaataattcttttatgattattattgtaaacataaatgcaaacttggataaagttagaagatgaagcacgtgtagaggcagtggctgtgttgccatgttctataaagttttgaacttttgaaaagcaaatataaatttataaaaatctggccttttgtcgttttttcttaagatcataatggtgaatgcaagattccaattatattttaatgattgatgaatattgaaagattttgagtaaaaagattagattatttacctgagcaaagttagcgaggactagaagtgggaatgtgcctaagatgagaagtgagactctccattctactatgaaggcgactatgaaggatgtgagaagtgaagtcatgttttgtagaattactgagattctctcggctatagcggatttaacatctgctgcatcagtagctaaacgtgcagcgatcaggcttgagttgtgttcatcctcatcgaaccaaccaacttcgtttctcaagatagctaaataagaacaatcaagaaaccaaaataagaaatgggaaagtgattttaagcaaattcaggagattttgatacatacctgagagcatcattcttcttactcttgttgtgaggttttctcccatgatgctaaagaagtaatgttggatcaaataagcacccacagcatagagaccagcaccaatgtagatgaagacatactcttttgttttcctttccattgaatcatagtctgtgtagtagaagacttcgatcatgttgctcatcacaatagcaaatgtaggaccaatgaaaccagaaagaattgagcctactgctcccatgattgagtaaggccattccggtgaattaagcttgagaagcctgtagaagtaattttcaggggcacgagtctttcggtcagtctctgcatttgaaatcatctctatccgaccatcagctccagtgctgtaagaatagctcagattcctcaaacttcctgatcttaaactgagtgatttcgttgacagtgaatggctcaaacgggttgaacgagtgcgacgagttgacgggtttgagaaatctcgagtaccaaccatttcctgaaacctgatgagggatgcgtaagcaccggatttggcaatgagttcttcatgtgttccggtttcaacaacttggccttgctgtatcacggcaatggaatcaacatttctgatggtgcagagacgatgagcaacaacaacagtggtcctccccaccatgactctgtctaaagcttcctgaacaatgctctcagagctagcatcaagagcgcttgtagcttcatctagtaacagaatctttgggtctttcaacatcgccctagcaattgcaattctctgcttctgtccacctgagagttgaacaccacgttctccaacctaattgtattgacattcaacaaaaaattaagcaaaaggccatgacattaactagacatataatcaaatatttgatttatacctgtgtgtcgtagcctttaggaagtaatgtaatgaaactatgcgcattcgcagcggaagcagcagcttcaacttcaaccattgttgcatcaggctttccatagagtatgttctctagtatagtagtggcaaagagcgcaggttcttgattcacaagcccgatttgttcacgcaaaaacttcaactgaagcgtctttatctcaacaccatccaacagaatttgccctgctcatcaagaaaaaataaacaaagttatgatccagtcactagccaaagactcaaatagcaaaaaacaaattcaatcaaattaccgctgtttggatcatagaatctctcaatgagggaaacaacagtactctttccagagccactcccaccaacaaccgccacagttttcccagaagggaagaaaatattaaagttcctgaagatcataacatcaggccgtgaaggatagctaaaagtcacatctttaaactcaatgttcccatgaacttgatccaaacattttccatccaacgggtcttgaattatcgtcggtctctggttaattatctccatcaacttataaccagccgctttacctttactaaacgccccaagattcgagaaagattgccccaaactcctaaaaacacacacagaaacaaaaagtgacatccaagtaataacaaaacacaaaatacacaaaaccacatcattgttatgttttgaattcttacattccaccaacaatagcagagaatatagcagtaaacgcctttcctccatcggtttgtccattccgaataaaaactccagcataccaaaacaccaaagcccatgacatacaagctattccataagtacatcctaaacccaaccctttagccatccccgctttataaccgagcttaagcgtatactgaatcgcatccgaatacgcattaagtgccttactctctccaacataagaataaacagttcgaacttgagcaattgcctgagaaaccaaaacatcaatcattaaccgaccaaagaaaagcaaagattttgaattagtgaaaacactgtttaagtctttggattgcataagaagcaatgaaaaaaaaaaaaaatcatttgagagatcaagtacaaagaagcaagcctaagaacagttaaaaagcattacgtcgaacagttggtgggcattaaataaaacaaataaaggaacaaactttaatctttatttacctgctcggcgataacaccggcgttagcataagattcacggctctttgaagtaattccggtgagtgtataagcgtataaacctccggcgaaagcgattccgggaatcacagcaacacttaacaaagctaatttccatgctgatacaaatccaactactaatcccgccaaaaatgttgagaggtaatgtataaagtttccaacctgagaaattcaattttttttcaactactctgttattaattcacttcatcaacaataaaaaagagtgatgataataatgaaactaggggacccagtgcatgttagctcgtgcttgctaacgtgcaccacagagacaggaccaaattgcaaaaaaaaaaacagttttagataaaatgtactattaaaatttgaaggtactttacacattttttttaataacaaatatttattttacttgttaaagaaacattattttgcataataaatatttttcacaatggaaaaaaagaagctatttttatattaaaaatgtaagaaaatgagtactatatcatttaagttttagttaaatagtgaaaaaaatcctctatttctatagcaaatttgtaaaaaaaaattacttattttcacaatcttatgaaaaaaatccaacttttattttaacaaaaaaaaaaatcaatctatagtcttttttcttccctaaccacctgaggcgcaagataaacgacggttgctaacataaacggacccaaaactttgataaagattgatcatgaaaaaaatgggacccgccggtaaatactagattttgttggtagtaaaaaaaaaaatggttaccttttcactaatggcatcttgaacaagaagagtatcagtagaaacactaaagacaatgtcaccagttctagcatcagtatcaaagaacccaacgtcttgttttaatactgcttcaagatatttcttccttaatgctgctacttgtctttctccagaatacatccaacatgctatctctgtaaaattatttaacaaaaaattatggttattattacaagaatttttatgaagttgtaataaatgtgagagagatgcccatttttttttttttttcgatatagacaaagtagtagtccatgaatcacgtggacttggcttatccttttaacatattaaaatttttaaaaatttgaagtgttttttttttatatataattttgattctctctagattgtgatttctgtttctaggtttttatttattgaagcaaacataaaaaagttgggtttttgttgtagagtaaaaaaatgtttaccagagtaaatgatcactttgtggaagaatcaaataaaaactcaaaaattacacctttagatttcttgtctataaaagcggttggcacggaaagttcgttccgaaccccattacatcacttatgtaaacaacattctataaaaatggtttttttagttctaatcaaaagcgaatgacaaaaaaaacaagattttaaacaaagtttaagctttctttttttaatataattttgaagcaaacaaaaaaagaagttgggtttttgttgtagagtaaaaaaaaatgttttaccttcagagtaaatggtcactttgaggaagaatcaaataaaactcaaaaaatacacctttagatttcttgcctaataatctgatttaatttatgttaatgggttaattggttgaaccaaaaaaaagaaaataatgcaaatgtttaatctaaactttattaatttcttgatcttgttttcttttttttttgtgcaaaaaatttcttgatcttgtttataatgtgatttaattactgggtttcttgattgaagaataaagaaaaagaagattggatttgtaagaaacaaacctgcgtaagaagagaagcaaacgaccaaacccaagtagacgaaatatagagaatactgcaaaatttcacaaacacaaaaattagatcagatcttggatctaatttgataaaaacaagaaagaaaaaaaagacttactctagagacttcatgaaccatttgatgtaaatccatttggtttttaccaaatccattaaccatttgaccaaagagtaaaaagaagacaggcatggaagagccatgaacaatggcaccaagagaaccaacgaacattaagagataatcaaatttatcagcgaaagaaaagagtttaaagaatggtaaactctgttctttcttcttctctgcttctgctggaacagtcttggcatcggttgtgttagtttccgacatggttttttgtagatccgagttaaagaaagtaagaagaaacgagttggtttagtgagaaaacgagatcattgagcagtgagagagagagagagaaagaatgaaatgttttttgttttataaagtttttcttgaaaatctgacaattgttttgtgaagttcaagaactcttttacgagtgtcttgttttgaagtggtgagaagagagagagaatgagagtgtggttggagaagggtgtgattggtatatataggagggagagagagtgatgaagactagtggtcaaagactcattgagacatgagagattgagagattcgtgttgctagttgatgtaattaatgtttaacattttgtaaaatggaaaaaaaaaacaattaagggtttactttgattttattggattgtttgaattgactaatttgtgttaattaatgtcattttagaaagttttttttttataaagatcttttttgttaaagttatgttgtgttcaattaatatttttaaagtactacaaatcaaaatctggtgtgattcaatggttttgcataagtagagattttaacaaatctgcaagcattttttctggtcaaactatgaaatgggaattttattgaacatgtcattgtataaaaattcatgtttagagttagatataatccaatgaaagtttgattacagttttttttttttttggtctaaataatttttaaacaacattagatattttatatttttatattgttacattaagaaaacttgatttttgtgtaaatacatatatatatatatatatatatatatatatatgtatagacaacttgtctaaaattatatagaagtatttctatggtcaacatataagtatacaaattttagctcaatttttcatttaaataagtaatgtttaaaactttgaaatgtataaatccattaaagtcttcatcacaatgatgatgtactttggtttctgtctaataagttttgaacaacatcatgtattttgtatcgtcacatttagaaaacatcatatattttatttaataatttctattataacttgattaataatttctaaaaatttaggaaattttttgatgtatatccaattaactccttatgacaatgatgaagaactttatatttttactaataagttataaatgacatcatatacattatatcatcacacttagacaattagtataaagttatatgattcaaatcatagggtaagctaatcagtagcgattactttttgtgttataataagcatgtcaaggggatcattacctttcttatgactaccatttcattatctccattttgtgatagatcaaggctgaaaaatcatacaaattagaacgttatcgagtataaataacaaatgatcgattagctcagaccatatcatgaaaaatagatgatctctctgactctctcatacgattatctgcatactaaacaagcatatgctattgcacccaaacccgagatatcgaaactgtgggaagtcgatctttagcagaaagaatatcgagggatcacttgtgcaaaccacacagttttacacaatacctattatcgaaggatatataactaatcatttgtttgaaaaatatgtgtgagtttctctagtaaaaatattaggatacaaattttagttaagttgtcattttaaaatttgatgttaaaatctttaactgtatataaattcattaagtgcgtttaccagaatgacgccaaactttggttgttttataataatttttaaacaacatcatgtatttgtaatgtcacatttagacaacatcatacattttctaataattttaaaaattcatgtttcaatttcgatatataaatttttgcaactaatataaattcaaggatcagctagtccgttactgtttggtgttataacgcatatgtttttttaaaaaaattcaaatttatgttcttctcttgtttatgaagtgtaatttgtagtacgatacctcttattagagtggtagattaatttaatggaacatcaaacatttggtgaaggaactccaataagaattatgaagtggagaagaatatgaaatataatatttacaacagataaccgattataaccaggtccatttgtcttgatttttcttatgttaaattcttgtatatatcgaaaatctgagaaaagttatgcactaaatctatagatacaaaaagatcttcttttttcttcttcttcatacacttttaatcaaatgctaaattctgtcaactttttaagtttttcacatattgtactgactcatattacatttactttcattattaatttaggaattaaaatatttctattataaaacaatctaaaaagtaaaaaaagaggtgttggaataatagttacaaaattacaaccaactaaaagtgacttagattcggttatgaatgtaagagcagaccatgtgaagtggttgtctttttgtgttgctctggtgtagaccaatgccacttcacggcttcaacgatgtttcgtttatcccattataattatctatttttatatacaagaaaatctaaggatatatactccaacaatctcaaaaaatgaaaaaaaaaaatatataaagaatattaatgtagatagaacggtctttgtaataatagtgtacgacgatgcgatttaataatcgtcagaagtgtagtattgatcgtagagttttaattatgtatttattaagatgttggaacattaaagatagggattgtttgaattatgtttcttcttcttttcaaacaaaaataatattaaattaatttcaaaaagaaatagcgtttatacatcaaatacaacgtttttttgaaaaagatcttaaaacactaaaccaaaaattttttgatcaattaatttttcgccgtaaaccaaatttagagaccttagtcataccacctatcaccgcttgctcgaatggatgatagttggttccgtatttgtttgtcgacccatttaagtaagagagctgcatagttcgacttgacgtcatgccttcttccattcttgtctccctagatggtgtgaaccgtagcttgaaatacatatcgagctaagaagctttcagttctgtctttctaactccttgatatagtgtggatcagatcatgtcaattcgtaagatattttgtaccgtagagatgctttgctaaatcatactgaagcgaaatcataagagaaaaaacaagtggtctccgagtttctaacgcattgttgcaaagaacacaaacaatagtaattattttttcttttttgattatatgaacactgttacataggatatattaaaattcgacgtcatgtccatagctatctatctttttttctaaacaaaaatcagtgatgaattttaaatgatatacgaaattttgatataattaattgaagtcatgaaaatattatacaaatttatattctttcaatatatgagtttaatattgatgaaaattatatatatatatatatatatatatatttgtgtgtgttatatagtgaaaaataattgtccacgcatgtgctacaatattgtacaatattaaattcttgcatgatgagggtatatatgtttatggaatcatagcttaccatgtaaggtgataattgtaactaaatccgccatgttagtggttggtgtggatgcacaatcaaattctgatttatcttgttttgtttctctcttgatattatattcgtttgatttgtcatcttttgtttcttttctcttgaaattatagacgtttatatatgaccaagatgttttagaataaattatacatgttatatatatatacactgtttgtgtgttcatatacataaaataaattatatctatacatatatatttatacaccgtttatgggccttaacttagttgggcctaattcaaaacccactatacagataagggcatacaaagttacaaactgactaagttgtatattcataaatatgtcccttacgtgaaaactgaaaggcattagttatataatttcatagtcatggattatgtaatttttcttggatgtctttcaataatttatttgtccaaacattcttgtcttaaagtttttacaccaagattataattcgatttttagatagaatatttttttaccaaatcttttacattgaaaatataaattaaatttcaaaataactcattaaatagaaatatatcaattaaattttatacagaaaatacaaaacatttttctttacaaaactctcggtttgtaatttcgaaatcttttgatttggttttcagctatctcgtctatctcttaacaatttttcttttagttttttttgtaattatgattaactatttagtactcatgactactaaatagtgaatactgataggccaagtggccaagagacaatagataaaatagtagataggtggctttggttgtttgcaccccttttcttgagcaaagcatcataattaagtgtttaaatattcctataattattgtttaacagaagattcaagattgggttgtggccaaaatcggggcatgtgatgtgctgaaaaagatgtggtctactgtttactcctattataatcattctttcttttttctttttttgatctcttgattgaattttttttcaaaatactttgtttaacgtgtgttttttttccaaacataattttgatatcgtggtatatattatacgcaatgctttttattgtttctgaggaagcatcgatgtttggtagggggacagaatatacaataactagttttactaattttagaagttgattgtcattagatatgtacattattaataatctgttttggaaaaaaaaactatttgaagacctaagatttatcaaaacttggcctagaattttaccatagccattactttcgaagaaaaataaactacttttaaatgagtatttattttgtcaaaatgatttatgtttatgaagaattaaaatttgtagagaataagttagaaaatttcatatggtaaaatttgtagagaataagttaggacacatggacccattttttaattacaaatagaagctaaaagatgtaggtcttgcatcaaatctatataactaaacctattttgttacttttcgccgaacctaattgaaattttaataataaaaaacattaaaagggatcgactagtttgatgacctttgtgagatttctctttatcatagactttattagttgttaaaggtacttaaaactcagcaaaagtaccttttgaccatacgtttcttatatatacacctaattagagactgataattatcacatttgacaaaataaactaattgtaataaaacttagtacatgaattatataagtttattcaagcaactcataaaaacatgtttgcaaattatcattgtttgcctttgaatgggggttgtagggtccaatgattaatcacttttgctttgaaacaattatagttaattagtttgtcttggtgccattgtcacttttgaaggacactctttataatatccaaattctttttgataaacaatatccaaattcttaaaaacagtaatctagcatttcttcattatgcagaaaaatatctcttatctcacactctattttattcgacaccttccgtaatattaggaccgatcgacgaccttttttttctttctttctaagaactagaaatatgtgataattaaattcttttttttaatctaatgttaaattatattaaaagaacaaatatcgttgttacaacaagtgcgacggaatttgaatttgttacaacactaagaatatcaaaattaaaagctcctaacttctagaagcaaaccacatttgaagtcccttatcatatctcgtgtcccctaaaattttgatagatgaaagagtgtttcgggtttgcttatcaatccaccggattagtctagctggcgtattaggtgtctccccatgccttcgaccatttttttccctccaaatcttgtaaactgaaacctggaagagataacggactaaaaatgtttcatttctgtttcgccgcatatatcattcagatgtaagctaatacatatatcattgatcatagattcataatagtaatgtcttcagttaaaattatattatttgtcctcgttttaaaacttcatggtgatataaataatcacatatttttagtgatataagtaatcacatgtatatatttttaattgctgccaaaaacaaaagtcacatgcactaccatattttaaaaattaaaattttaacatacttaatgatgtttttattttttcaactttcgctatagaaacacattacatgtaagttgtaaccataatcgtttctgtttttttcttaacatcaaacgtatttttaagttttatttacagtaaaaactaagaagaagtcatctagaataaaaagaagaaaaaaaaaaaaaatcataatatacccaaattaaaggtatataatgatgatacaatacaatgcacaagaaagaaaaaagactttatgacatacatccattctctttaatttgttactagggaaaaaaattcgggctaacttgaatatatatttatcattcaatatatttgtatctctggtttaatgagtttagaaaaaactataaaaaaaataaagttcgtagtttgagcaaaatgacttaaacttgagcagtttcatttattaatataggggagttaaataagtttatttttatagtttttgtaaactcataaaaccagaaatacaaaattaatttagtcaaggattaaagcaaattattttgattgtaaatgactcgcattacaaatactattgttatcttgtcatccatatattgtttagaaacttggaatgctttccacaacccgttaacaaagatgacacactgccaacaacaagcaagtatacagatttctttttttttttttttttttttttttcttttttttttttaaatattgatttatattaagacataagagttacaaagagatataaaatacaaagccagagctgttaaaacggaggagataacagacgtaaagaaaaagatgagaaattaaacatctaattttgctggaaattgccaaaccatagcgaaagatacgtctcatgactagaagcagcgctaagagagggggatgctgcaatatccaagctcgcaagcttacgccggagtagaagatggatttctcttttaacctgggtttctgatttttttgatgtggaatatagtcttgagtttctctctctccaaatattgtaaaccaaagcatgaaataccaacttgcaaattgaattaagttttctatttgtggtaggattcttaatctagattagcaggtgagagaagctagttgaaggaagaggtataaactgtgagtagatgtcaagtaatagagctttggagaagttacagtggaagaagagatgatctctcgattcatctccattgagacaaagtagacaagaagcaggaacaaggatgttccaacttatgagtctatcgcttgttgtcagcctatcttttaccgtgagccaagccatgaaagcaagtttgggaattctttctttaaaccagatttgtgagtaccaaagaacagttggaccagcagggtgaaggtgattccaagtcctagcagatgagaagtttccatgcgattgatgcggtgaagttttccacaagaagatatcatccccaatagcagttgtaggaggatcgtgagaagttagatatgatcggagtagtatgactaagggatgccttccacgaggaagaagccaactcccaacattagcagcatcagcaaccaccgcaagaaccctaataccagtgacacgcggaccagcaacaccaacaacatcaatgagcggtcctaagtctgtccaattatcatgctagaagagagtattatgacctgaaacaacagaacaaaaaatgaaagtcctagcaatagaccgccaatcccatgaatagtttaagtcgcttggcaaggattcgagaaataaccttatatattgtgttgcagcaagagataggacaaaaatctccaagtttgtcagcagatgaggtcttaggaataagggccaaaatagtagcattaacttgtttctgcaatttccccgatttgaagaattctataactgcttctattagacatggaccaacgattgtccaagacgaaatgaagaagtcagcagtaaacccgtcgggtccgggagctttgtttctaggaagagagaatagagtagcagttacctcttcaggagtggggatcgcagagagctgggtagccaaatcagccgagcatctgaaggagttcaactctcgaatttgttcaacggatagaggttggactgttaagttcttggaaccaagtaactgctgataataatccacaaccatctgttttaactgattttgctcagagattctctcatcatcatcattccttagagagaaaattcgattcctagaaatatgcgccttaacggaattgtggaagaactgagtcttagaatcaccttcatcacaccatctaattctagacttttgcctaagaaaggattcatctgcactagcaaggaaagaccacttattcctagcctctttttcttcttcaaaaaggacctgagaaggattggtaagaagagtagactgaactcaaattaggttttcatgcgcttcagcagaacgagcctggatgttgttgaaactacttctattaagcaccttacaagccaatttaactgccctaagcttttggcagagggaaaacatgatcgagccatgtattgacggcaaattccaagcagtctccacaaggcattgatagtctgggtgagtagtaaagaaagagtaaaatttgaattggtctttccttcgctcttcaggctcaccagctgttacctggattggggagtgatcagatcctccaggagcatcaacaagagaacgagattgaggaaacaagaaaaccaagcctcattagctagacatctatcaagcttgcgagtgatgggattggttggttgaccattaaaccaagtatccgctgctccgcgagaaggcaactctaaaagctcacaagtgtcaatacaagactgaaactcagccataccttgaatcggaagagggaaaggatgaagagagtaatgatcttcagccacaagtatttagttaaaatccccaagaagcaaccaaggatgtcttctctgaagactgtgatgatgaagctcaaccagcgaactccataattcccttctcgcaatcatacagtttctggcataaatgaatgtgaccgagaaagaacgtttcgtaaccggatcaaaaactccacaggaaataagttgatctgttttcttgtaaacaaaaacggaaattgcaggaccccaaatgatccaaattctgccattcttggcatgaggagagtagttaaaatcacttctccaacctgggaaattacgtgccaaaattaaagccgcattatcttgttggacatgagtttccaaaaagcctcgaatagaaggtttatttgactgaagccagttcttgagctcatgttgtctactagaatgattcagacctctaatattataacaaattttttttatcatcatcgattgtcaaaaggtgcgaaagcaaagctttcaagcgtgatgatggggacgtccctttccaggcacccgtccactattggagatctttgaagacttaaaattctttggaggatccttttttgggtggtacgaatccacaaccttcccagcaacaatgtctaaagttttctttgttgtaactgctttgttagtaagggaatcatgaatcaatggagaccctgcagtttgtttaacggtttactaaccattctgatttgcttcctcctcttctgcaaattctgagccaattaaagaaatggactttggttcatgttcggaccccgagacatgtgagagtgaaggtcttgagctacccttcacaaccttccattcagacgctgagtcggaagcaggggaatcaatgtatgagtgattagacttcgtaaagtcaaactcaccagccttagtaaccacgacagctgacgaataagtatccacaactgagactgggacgacatgtgaaacttttcggacgacctgtttgggtggtatagctctgtaggtgacattagaaaagtttggtgtagaattatgtggagcggtacgcttaacagacgaagatggaatcctctcgatatctggagctgatgggcatctgtgatagagatgtccaaattctttgcagtagtcacattttggaggaagacgagggtattctaccgaaattctaacttcatttccatcatcatcctccaccaacaccgattgtggaagagttttcttgagaaggatctcgaccttgatccgggtatgaactgctaaaggatgaagctgatgtttttcagtgtgtaaagggtcaccaattcctgaagcaataatacttagaccaggcatagagtataattgaggtggaaagtctttgaggattatccaaatcggtaacgagactaatttaagaggagttaaggttactgttggagagcaagcggtaacagtaaacagacagttacccgcctgccaacacccaacctcaaggacccaattgcgagtggcctcagaagggatataaataagcaccgtcccactcggaagacaacgaatgttaatgcgcccatctttcccccaaattggatttaggtccacaaatattttgcccgcaggtggaggattaccatgaaaatgagcaacgatatgatctttccaagtatcagttgctttaagaataacagatgctggagctctaacctttggagttccatcttcggtgaaggttggttgagaagcttttttcaggtttcgaagattggcactaaatctagcagcccaaataagttgagtatcatcaatcataggagtggtatcttctgcaagcttttcaattgctgggagcggatctatagttacttgagatgactcaattccatccacaacgggtacagaaagagcaatggaggaagataggccatttagttggttctggatagcagaggttgcagaaccagttgtcggaataagaggagttaatacatggtcgtcatcttcactcgcaggaggaatttcgtgagccgaggatggatctagatctagaattggagattggtgagtaacattcacaacaagagcattacgagtcggaatcggatccggtgggtctggagaaggaagaaccgaattagaaatcaaagaagacattacagaaaagaagaggggggagaaagaggatattctcgacggcggcgtgaggccacaccgtcggcagcaaagttaggataataatcgccttattatcgtcttgacttttttgcctcaagtatacagatttagcttagatgagtctacacatgctgatataagaatgggcattgttaagttttcgcttttgactaccttgtagcatcaaccagagccgtcatgatcactttcagagggtcaatttatgattccggctttcatctttgcctttgtcttagaattcgaacctgggatgggatcatcatagaacatgcagtcaattggcttgctaaaaaaacttaatgacttgagttagctacgaaagaaaatgtcagctcttaagctactgaaagggaagtaaaaacctagatgattgggaacgggtcaaacttacaaattgaaggctcttggtagcaagtaagaataatacaaggatatcatcttatcgttcctgattacttatcagtctgataacttaagtacccatatagttttttttctttttccttttttgaataaaatttaaatttattcgaaaaaacgtttttacaacaagtgcaacatttagttaataatatcaatacacaaatttcctatgagctttctattcctcttggcttttattttgtgtcaaaccaaacttccatgcatccatcatagttcatgtctccttgttcccgaatagaagagattcggttccggacttgtttgtcgatgtttcgaagtagttgagatggcggtaatggtgtgtcatcaagaagatttttattcgtcccaatgaggcgtctaagagcgtagcttggatagcgatccatgttgttgtgaacttgtgtctgaggatcttctttacaagtaatacaaatttcaggatacaatatacaaaccagaaagaatcagcaacttgctatatgtatcaatcatttggagaaagtgtattgtaatattattcaagaaaaggaatgggaagcaacaaatagatgaacttatgtagtagattcatggaaaaccataaacaactcggcagtgaaagacggagagtgttcttaccttataattttgttatctctgtaattctatccttaaggtataatagcaatccatggatcaattaagatgtctcattagacagtggtgttcaaaatttgtgctgtccaagcaagccgtctagttttggaatatactatacatttgttctgtagcatcaaacctggaggtagaaaaatatttcaatccactaaaaccaaccacgggaaaaaaatatgtcaaggacattaatctctattatattctacatattatgaattattaacagctaaaatcacatacacagtatgcattaagtaaaatatactaaaatttgatatgaaaatattttctatgaaatgatgacttttgttttaaatagtttgtataaatttatagaaacaactactgatttctcacagcctctcaaaatttaatttgcgtttcattttttttttcagtttgaaagacaaataattttaataaatgaattattacaacattataatttttggttaaaaaacaagtacatctaaccaaccctaaggtcgtttgttatctctcactttttgctttcgaaaacacaaaactctctactttctgatttactaaaggcgaaagctttcgttaaacagaaattttcagaattcaacttttgttaccctcatgctatcgatatggccgacgctgatgagaagatgaagacgatcggtatgaaccagtctccatgggaacagacaaggtttcgatccttaatacaagaatttaacttccgtgtactcggaattcccgaactcactagagatcttatgagacttaaagacaatatccttaatcgaaagattaatgcagataagcaggaagaaaaccctaatctcaatgatccaaagatgagaccccgtatacggattaggtctaaactagttgataaccctaaagaccgtttagaagcgaaacagaagttgacagagttattaaaggctctcgaggagagactaactcggtcggaattgagagtttacactaacttgtgtaaagacttaaagtctcgttgaatcgcttatagccaattcgttaagtctcttcaacgtttgatcgagaaatacaagaatctttttgtacggttggtagaaattgcctacggtgataaagaagatgaggctgtaactagggttaaagtagatgatgataacccgcaagaaacagagacgaattatatcaagttggagggaaagaggaagagaggaatgttgtgttgtgaagagttaagatatcaagggacataagaacctaaccgatatcgaagaagatatgtacaaatgggaagatgagatgttcgaggtagatatgttgatgagagttctaacaagtgcagtggagagtgcaaaggaagttattaagggagagatggagctgaaagatcttggagcaaagttctacagatgtgtagagatgttatatggtgaagatatgtttgaaacagtgacagaagatcatcaaagagctttacctatgatcttgagccggttgaaacagaaactgcgtcatgtcacgactgcaagagaaagattgaaacctctctggaagcaaactattgaaaaactttctacaaatcaaagaggttctacaatctcaagtgaagacaacaacaatctggttttagaatgtaatttcattaggttaattttggtatttgtgttggttctgttttttttggtttagctaactgtatacaattgtcttttagactgtcctaagctttgtagattttcaattgattatatatagtaacagttaaaacactcaaagaacaactttagcttcttccatttaaattgactatatatagtaacagtaagccagatggtgactcagggcatgtgggagcgggcctctatgcttcggcagctccctcacttcacaaaggacttggccaagagctggttgtgggcgacaccaagacaaactagttgctggcaatcaaacgtgtctcattgcaacagaaagctaaggtaaaacttgatttcacagtaccgagtgaaccaggagagaagtcatacacactatactttatgtgtgactcttacttgggctgtgaccaagagtactctttctcggttgatgacaaaggatctggcgttggagatcacatggaagaatgatttgttgttatcagaaacagaaataatcaattctaaaacagaaagaatcggaacttaatcgatatcgaacaaaaatatttaaggtacccaaaaatacctgaaatacaattatatattaaaaatatattaaattttcaaaaaccaaatagtcaaaaatacttgaaaattatattaaaaaaattaaaataaaaatactcaaaataaccaaaaaaatatctaaatatattcaaaaatacccaacaatacccgaaatatctaaaaatatccaaaacaaaatatccgaatgggatactaaattttaaaatcgcaagattcgaaaccaaacaaaaatttcaaaacacacaaatagatactaaactttaaaccgaaaaaaaccaaaaatagattaaccgaaccaatataaccgaacactcaaattcccacaaccagaattttgaggaaccctctagtttaaaacatgttcgttgaatgattttgtttgtgttttttttatctattcttctttaattgggaagttttggaaggtcttctcagatagtaatgaaattttgttctctgtgttgatgtggtagccgatattatcagatagtaaaggatggagaaatttgtattatcatatttaccattggttccttatcggtattatgcaagaaatagagggtaaaatgtcatttcatagactgctcttagtactagcactggtataaatgagaacaacaaatgaagcaattttccctctaaaattcacaagttttctcattagtttctttctactccatttcttgattttgtggtgtttcgtttagaaatagaaagacgaaaacagaaattagggtcaaacaaacttggaccaagagtaactttttttgtggaaatttttgtactcagattatttatcatgccgttatgagatttctctgaaactgagctatttttcaggaatctgagtttcgatttcactgagatgttcgactcctactctctttatcccaccggaaaactatctccggtggttgattcgtacgtcaccgccgagctcgacggcgaagatatgagagacgactacgcgtttttagagtccggtttaaaagacaacaaatctcagtttatctcttacgcaaaacgcatcttagtcggagaagacgctgaatcagagagaatcgaagatttaaagcttcttaccgcttgttgcagttacgattccatcaactgtgcttcgtcaatcatcaacggcgacgttggatcggttccatatatcaacgatatttgttccgatacaggactctcgctgttgcacacagcggctgagtctcacgcgccactgtgtgttgagatgcttctgaaacgacgcgctcgtactgatatgagaagcaaagacgaacgcgctttgattcctctggagctttctctctccaatgtcaggtaatcgtctctttgaatcataagcttgaacctagtgttgactaattttgtttctatgtgtcaattttgcagcgtagatgtgaaatggaaaccaactagtgaatcgattgaagactgatcgttttgcttggtgacaaggttaaacactaattcctttggtttgcttggagcctgattatggaatgtgtggtgagtcatttcttatgtatataggacttgacggttgtgaaactactcgctgagaagacaaaggaagtggacgttgtggcttatgcatatgccaaggctggtgagatagtttcgttgactgcattgttgattgtagcaagtgggaagatcagagaggcaactgtggcattacgggatgatgatgatgatgattctgtggcaaaacgggagagaaagacgatctatgaggcagttattcaagaggcgttgcgtagtaacagcttgacgcaaagtgtatgcagtgagaaaagaatggttctgcttagagagattgagcttcttcagctctttggtgctgcagtttttagtgaatctgtggataagcaaacttcaccacttatctccattgtgcaggtgagacttggttactacattggtgttattgtgtgaactacacatgcggattattgagggatgttatgtgattcttgtaggcaggagatgaagctgttcttgagctgtttataaacaccaacttcgatgtcaacgagaaaaatatagaagggaatactgttcttcaatgtagcctgaaaggatcgtctgtgccacataaccagcaaaccaggtatgatttctctctattaccttaatcatatatataagaaggtcgcatgatgattacttcacaacctgagaatagtacatttgtgtttccagaatcatgaacctacttattgcacacggtgctcgagttaaccaaaagaacaagttgggtttatctgcagttcactttgctgctgcaaatggcaatttatctacacttgaggtatgattcgcttgtttttttgcttctcatcctaagctgaaacaagattatgacatttcagatgaatttgagcctacagattctactagcggccaaccctgacttggttaacatgaagacggtaatcaaagagacgccactattcttcgctgtgaagaataatcatcttgactgcgtggagcttcttcttcgatgtggtgcaattacggagattcataacctacggtgaggcaatactcaaaaccattttttttatcaaactcattgacatgtatccctttgtgacttaatccgatgtttcatacatgtgcagaaagcagagaccaatagagttaacatagtcacaagatatacgtttcctccttaacacaacaaatatcagttgttgtaagtatttgttcttctctatggccaaaagctttcaagaaatatgcttttcttctaacataaacaaccgtgaaatctgcagtcagcaaagaaacagaacttgcacagtcacaaagtgcagcagtttcaccaaatgcaagtgatgaggaaactcttggatttctcggagattctgttccaacatggctcaaaacatttgtaacctggcttcctctgtacctccgagatacatcagcgaactggaaaggggctggatatcccctgtcatccttcaaagccgattttcgtgctgtttttggaatggatctcgatcacacctctcttgatttccctaagcacatcgactttgtcaaatactttccaagactctgtcaaatgaaagtcgtccccataggtaaacttggagctgcaacacactgggtcatgctacccaccaaatctaagtgttctcagctcaaagaaagacctcctgagccactcattatcactaagaatgactctgttgcttctcccagcaaaccaaaagccttatcagttcctccagattttaaattcatacaagaagcacatgactctaaaaccttcaaagcttcaccacaaccaaaagctcaacctcctcctcccttaacagcatcgtacaacaacaaccaacgtcaactaaaacacccggttcttgagacacttacaaagatcagaaacagcacttctgtcttctttctccgtgagtttgacttttatcaagtaagcaatcaaatcccactccttactctttcatggttttcatatatctgtttctcacttggtgagtcatatgcatttggcagagctatgagacatgtttaaaggaaggcatgtgtttctggtgcaacaagaacatgattcgatgggcaaacttcccttgcagacacaaactttggtgcagctcttgtaaacaacagattactcaatctacttcaggagagaagatccttgaggaagaccatcataagtgtgtggtctgtgatgcaaaagtggaacgtttcgtcttgtctccaccgtttgaatccggtcaccataggattttaagtgatcgccctaacaacgccgaattagccacttctttccttcagttcctcagcataaggaagtaatcatgtttcccactttgtcttcttattcactaaccactttcatctgttaataaaaacttcttctaacgttttgttttacgttactgtagctccatgaacaagatgatatatcgcgggatatagagaaaggaacttaccccaacaacttcaacttcgtgtcgtgataagtggattttactaaattcgtaaatacaaaagatgatggagatgaaagctcttctttaacaacatttagagtacatatggtacatttttgagatccaaaccggtcttacaaattatggaatccgagtttgagttttctcacaatctcgtcaagtcaatgcatcaaaaattgtctccttctacaattgttttctgcataatcaaattttaaaaatccccatgttaggctaatcctaaaaagctacaacgattataaaacactattaccagaaaaaggtaagtgtagaagattataggcataacactatcatcatattgtgaatggtgtatatttcttatgttgaatcaatataatacaatgagttatttatacaagatgaacgagggagactctaggtttagctaaatacagaacatgcctaaagcagagtaatcaaatattatgcttttaatgagaatcttgtcatatttcttacacgccccctcaagatggaggagcttgagctaccctcagagcaccaaaggattgtgcctacaagaaagcaacaaattccaaacatgagagttctttacgttttaaaaaatttcagcggtttaattaccgaaacagattttcgattccttgtgggtgcattatgcgaaaacgaaagatcatagagatatttaacaaatttcggtatcaattacagacctatattcaaaagtttgtccaagtactctattctaacgtttgctaacaaattcgtttaaatttagaatattacctctctagtgagttgttgtggtgcttctacgtctacaattgtttcggccaaaagtttttatgaaccactctggtttgtagaaaaccaatatgtatccaattgttaaacccaagacaataccaggtatgaatcctattgcagctgctatccaactaatcacctcttcatcttcttcctctgtttccggcgttttatattgttgatgtgaagctggcgtgtgaatatctctgcaatcttcttcaagagtagagccaaaaagtcccaggttatcttcaaaggaagagcaaggctgcgttagaaactgctggccacctggtactagacctgcaagctggttatgagagaagttcatacacgaaaggaacgagaggttccctatctcttgtgggatttctccataaagcttgttctgggaaacatccaacgactcgagagctgtcagcttccccattgatgaagggatgtggccggtgaaagcattgtttgacaagttgagcacgagaagctctttcaatagaccgatggactttggaatctctccttcaaatttgtttcccgaaaagtcgagtgctgtgtagattgtgaggatacgtatcagctccgactctacacctttattcatcaaaaccattgaatcttggtaataaactgatcccatgtagtttgcattcgaccgatcttcgtctgtcccaagtgatgacatagcactccacttcacaaaataatctgatggcaaagttccattgaaatgattatgcgatatgtcgatgattcgtaacttaaggaacgaggcttcatgtattggtccatggaatgcattggagcgaaggactagaacttgtagctttggtagagaagtcaaccagaacggaaacgtgtcattgattctgttgctttccacgttcaaaacttcaagagtagagaaaaatctcaaagatcttggaagctttcccactagctggttatggccgacatctagagacctcagtatttcaaatatgtgctttggaagacctccgctaagattattttgacgaaggtttagatgtgaaagattactcttgagatttcccatacaacgagggattaaaccactaaagttgttgtctgataaatcgagagtttctagagaacgcaactcacatatgaaagaaggaatcttgccggtgaagttattgttggagccaagcaagtgtcccatagatggttcaggtttatttggtctttggaaaccgatgaaagtgttgtaagagagattcacgtagaacaagtttggtagcgtccataaccagccagggatttcaccaaagaaattgttactagagaggtcgagacgggtaagttgagaaaggtttccaatgaaagatggaatctgacccgaaaaattgttcttacaaaggtagagagaggtgagattagaaagatttccaattgaagatggaatctgacccaaaaaattgttaacgaaaaggttgagagtcgtgagatgagaaagacctccaatagaagacggaaactgaccaaaaaaccgattaaaagaaagttctagagtcgtgagatgagaaagattaccaattgatgatggaacctgacccgaaaattgattacaataaaggtcgaggaaggtgagatgagacaggtttccaattgaagatggaacttgacccgaaaaatgattaaaagaaaggtcgagataggtgagatgagaaaggttttcaattgaagacatgatttgacctttaaaatcattaaatgaaaggtctagagtagttaggaaatgaaggtttcgaatactgctgttggaatgaaaccggccatggaggtagctgcagcttaggtctagctcgatcacttccccggacttggcattgcacgtgactccctcccaattacaacagtcgctgttgttattcccccatgactccgtcttcggatgaggttcaatgcaatacaccgtgcaataacgacaaggcttcccaatctcaaactcggttttgaacttgagaagtgcatccttttgttcgggacgacacaagtgcctcgtaggagccgcaagcacgtccgaaaattgagagatgaataagaaaataaaagaaagagtaatacgaatggtactctttgagttccaaaagcctttcatccttcttaagctaatttaattttcttgaataaaatctggaaattgtgatggtacgtaaaatgttttcatgcccatttctttatatacataataatagactctactccacaaagataattccaacacagcttgaccctacgaggcgttcttcacgttaaacgcaacgacttaaaaagtctttacgttgaataagaccatgtacataggagattttttgtgggtatcataagcctaaaaatattaaattaatagacaaagcaactgatttggacttgagaagtatcactggaatgatatttctgatacctgtctctaatgacgtggcgacttgtaattagtcgaaaaaacgcgtttttgtggaaaatgagagaaaaaaaaattatttgctctcgactatcgctccagtagccgatgctagcatgtaatttcgattttacaaataaattttattttttgatgataccaatactggtcttaccactggaaagagattattatgagtatcataaaaaatctcaaacaataaacaagcattaaaattaataataaaaaattgttgatgatactctatgagtaccaactatgtgcatgctcttactttttagttacgtacagggaacatgaaaaaaacgctgtactttgtccagccaaattaaattgatcgtgggaaatgaattctgcaggaagcaatgacttgttgttagttgttactagtcctagtgaatagtgatgatcgacagcgtcaagagtccatccccatcgatgtatcaattttgcgcaaatagggcccaacaatgaaggcggataaaagaaaacgaaggcccattttaacacatgccagcgaactcggaagagtataacatataaatactctattaaatattatatagtgttataaaagtgaaaatatttagcaaagaaaaagatgaaatgggacacgaggaagagacgagagaaatgaagtgttggagcaaatcttcttattattatgacgttaagctataaatgagaatatgagagatatatatagggaagttaatgaataaactatacaagacttggtgacaaagtcttatactcttatgatagcttggagttcaagttgttaataatggataattatccaatttcaacatactcttgttttgtgttttctctgattttatgttttcagaaggcatatgtgatctgcttcgtatatcctttggcatgaatgatttcagaagaaaactttgtgggtgatgcattgatgtgaacaaaaaatatatatatactactagaaagttgtctacacgatgcgtgagttatattttcaatattaattttgaatgtatagtcaaaatttacatttaaattatatatatatatatatatatatataattgttaatatatttcttaaagaattttatgttttatgtttagaaattatgatgtgttttataaataaattaaaccattagttgataaaaatattgtgatgtacttcaaatttagaaattcttttgtgaaatactaaaaactaaattttattctcttgtagtcttgttcctgaaaattgtatgtttttaaagaaaatactttaaatatatagtactactttttcttaatttgcattaaaaaatttgtgtgaaaatgcatctcttcaattatttcgaaatagtagattaactactacactaacgatgatatttaatagaaagttagaaattccacctacatgactggaggatggagatcctagaatgttggttcaaatggaaaaccaaaatcaagcataatctgatatatacccatcttaaagtgttcttgtagtgatgttgagaatacttcttcttaaattgtttttcaatttagatcagaaacgctttcaaagtataggggaagcatacaaaaataaactttaacacacaaaaataacatctatatatacatttttgcagccattttagcaaataaattatggatttatacttatttacaatctaatgccattagcattaaatcttttttccaaaataattaattttactttaaatttttgatttaaattgtcaatcatattatcaatcaaatttaatcccaccaaacttcaaatgagtcccttaaaattagcataaacatatttgttaacaatattttaaaacaaagttttttgttaaataaatattattcttactaaacgttttttgtttaaataaataaattttgtatttgaacttatttacaatgtcatgtcactgacattaattatttattaatgaaaatatttaattaaagatttaaatcttctaaatccttgcttttagagttattatgtcattaccttataaccaaaaatattaattttttaaatattattatttatatatttaaaatttataaaacattattaatatttaaacttataaaaagtttgatatattacaattttttaacatcattatataatatatagagtttaaaaaatcttaattttttccgtcatattttatgattcaaaattttaaaattgaacatatattaaccaattagcaaaaaatgtgtgggttcaacgtcccgcatcgacaaaaatatttagaaaatgatttataaacatatcataaataagatcaacattaatataaataaatggttttttacgggacgggtttggcgggatgggtttggcaggacgatacttaataacaattgtaaactataaaataaaaatatattatagatagatacaatttgcaaaaaaaaaattatactaactttaaaaagataaattgtcaccgcggtataccgcgggataaaatctagtttatatattatttttgaagaagagcttgtttgccgtttatttctatataaaattagatgttaaaataaaacaaattttatttgttttatttgttttttctataaggaaatagaaaaacatttttcaaatataaatttttatgtggaacatagagcatcctcattagacaatttttggaattgatgggtatctttagcatagattaataataaatttaaagacacaaaagtcactctttttggtgtctcaagagactcaaatctaaaattaaagacactctccatttttaatatttttattagttatatatatatatataaactttttaaaaatcttgttgacaaatatcggcaagaattataccaatagacaaatgaacacaaacttttcggttcgcccttttctctctcttagaattttactctcccttttctctaaaactccagccgccgcctgtatttagggttaccggttccggtggctttctcagcaccggaaccggggtcttttgttttgctcttattctacctttgttttattttctctttagacacatctgagagattttcttccaacggttttgaatctgaattttcagatctagatatataaagtctaaaacttttcctttctaggtttttgctgcttgtcttttgtctttttcaagagcagagtcagatatggccaatctatccaaggcagagacgtttctatccgaattttcgcctcagacttctgaaatttcacctgaagatcccgatctcgttctctcctttataaggctctcactccttcgggtctttgaatgttggttttatctcaccacccatgcgtgtttaggtagagtaaagggatcagatgtggtgtaatttgttggatcgggtttttttcccttgtttcattttaatatgtttttagtccccgggaggttccatgtactctccgacttagcctctggaagagtatttctcttgtcagctcttgtactcagatcttctatcaatgaaatctatatttccagtgaaaaaaaaaaagaccaatgaacacaaacggagacactttgagaaagtaaaatctgaatggagaacaaaacagaactcagaaattatcaaaaaacaaacatttgcctctttttttcgtgaacaaaaactcatgtctatcgatccctacaaaataagtttctccatagatcttataagactccaaaaagttttcttctaactctttggtgcagtcttctctttcgccttctgaagcttcaaaaccttcttcacaatcttctgttcttcaaccaagaaggccctgacgatcctggaacagagaaaagagtaagattagttgcaatactctaaagaaaccaatttttaagaggtctttacaatacacttacctctccctaacagcaactccagatagaacaccaccatatgcacgattcactgtcctctcgttccttgccaaccttgaccttttgtactcagcaggtctcaaatgcggaatctgcagaaaacaaacatagaaagtaaagcttaagaaaccatgctaattcaaaaaaaggaatgtgtttttgaggttctattgagattaagcatatgagtaacccttgattattcgataagaaccaggggctgatccaagtaactaccaactcattatataccaggtactagtcttcgacaaacacaataggaacagagaaagccaaatgatgctcaacttaaattcaggctatcaagttattgttagaattagctgaaaggaatactaagtcgagtaaccatgtaaactttgtttctctatatcaatgggcatgaaagtaagatatttttcaccattttaccaacttaaggaaagccttcaaccaacaaaattcttgaattcaatccctaaagtgtctatgttttaatttaagttccaaatttggtctcaatgccaaaataaccaatgtgtaacccttggtctccaagacacattattcgtaaacagaaacataaacacgaaccagaaagcagctaatagaccacaagggacatgaaccaaacttgcatatctttaagagcaggctatcatcaagtcaaggtaagaactggctgaaatggacatgaagtataaatatattacgacaagtctagatcaattttaacttttatcccttgtggctttagaggcgacaagtttatacaaacattgttgtccactacacataaacacgtacactaacaccaacatttacaaacttttatccaaatatactaaagaaaacagctagcaccacaagagacatgaaccgaatttgaaacagtcagtcaaattaaactcaaacacgaaccctaacaccaaaagacacaaactttcttgaaacagagaatcaaactaaactcaaaacacgaaccctaacagcaaaatgcacaatttcttgatccagagaatctaactaaactcaaaacacgaaccctaacagcaaaattcaccaacttttttgaaattgaatagaaaagattaccccttggattctcttgccagtaacagggcacttaggtccactagctctcttgttcgtcgtctggtaagtcaattttccacctttaagccaaataaccccaaattttcaacaaaaactagatcccaaaatttcaatgatctttcaagagtcactacaaagagacattagagagcttttagtacattaccaggagttttgacgatgcggtgttggttggacttggtggcgtaagagtgacgtgatcggtaaacaagacgttgaaccatttttgctgagctctgaggtcagtaagagtcggccaaaggggataaaatgtattgatacgagtttatatatggaggtgatctcttgagccctagatctaatggatgtagtgagcttacgattcgacggctcagattgattgtagtgttttttatctttttctttttttctttaatttgtgtattaatcaatagtttctatatttgcattttgtgttggtaaagaaacacgtaaaaaaacacttagagcatctccaatgtaaaaatgaagctttcttcataggttctatgtttttaagttggaaaaaatatatcagaatgatttattttttgagagagctgtctctcttgagatagattttgaaaagcaaaagagactattacgtgtcatgttttgcccgattttttgacaaaacaagaagaagaaaaaaacgattctttgacaaaacaagaaagaaaaaaaacagtctttttggcgatagcgattaggtcggagatttctctgattacattgattgggactaaaatccagtgtgattaaattgttgatcgaagactcaatcatagacgatcctttagtgaagaagcaaaatcacggagaacggcgagaagaatgtgaaatcgagagcatcgttagaggagctttatgatttatagaggcagaggatggagaagcgtcggccggaaacaatgtgcataggtacgaccttgaggttagtttattccttttaaacctaatcaaaacaaaatatagtattcatgggattaggtttattgtaatggatttgaggatttggtagataaaagcagtaaattgtggattgaagaattttcttgtaagagatgtttcatgtaagggaaggatcatattctggaacatttgttagctttggttacttctcactatctacatatacatttttgcagtcattttatgaaataaatcctcgagttggaacttatttacacggaatgccattgacattaatattcctaattagtagcattttcttatctaatatatctccattaattataattacttaaaaaatgagaaattttaggacattattaatatatacttgattaaaaaataaaatattgtagttaattaaacatttaaaatatttaacagaataaacgtttagaatatttataatatgtaaaatctataaaatttatataattgtttgaaaaaacttttaaattcatttgaattatattttttttaataaaagtattatttaaacaaaaaacaaaaaaatagtttttaatttcaccgaacgggattagatggtaggacgggtttataatatttataatatatgaacttttatacaatttaataaccatttgaactaaaaacaattaaattgatttaaattatatatttttcaattaaagtattattaaaacaaaaataacaaaataaagtttaatttcattgaacgggttagatggtaagacgagtttggatcgataaaatacgagacgctaaaccacatgtgaaatccattagatatgtttgatttcactgaacgagattagatgatatgacgggtttaggtcgatagtaatacaagacggtgtaccataggtgaaatcttagatataaaaattaaaatacaattatattatcttaaacactaaaaaaataaaaatattaataaaacaaatataatttaaatttgaattatttagttataatctagattttaacttaattaactgtattttatttttcttatacttttaaacagtaaaaattaaacatagtaagatataagagttgtacattttaaaagtacagcaaattaaatcatatatattttaaatctactaaacaagttaaatttttatttttaaaaaagaatatagcctcgtggtgtaccgcgggttaaaatctcgttgtaatgaaattcaatatactcaggggatgattgaagtgagagaaggattcttgggttaattctataaagtatagaaagataaagttttgttgccttcagtctgattctgcattgaatacttcgagtgggctgcatgttagtgcttagtgttcttttgatatccttgcattgtcattctgttgatggctattctattgcctccaatgtatactcatcccacttattggctatggactgcaggttggtgcttagtgttctgttgatatctttagtttgcttttgtacttgaagctttgttacttgtggtttttattctagattcaattggctgaaattgcaggattctatctcttagccaaggtggaagaagctgtggataaacctatatgtagttggattcatcatattatgtctcaacaaagtagccgtagcaaattgcaggactcatcatattaagcctataagccctttcctggagccggagcagatgcaacaaagtaagtaaatgtctctgttttttccattgaatcaaattgtgtttctaaaactgttttgtcgagttcctttatcatttatagttcagaggtatggttattgttagttcaaggatatgggtcattgtataaatggtttttatcagtatcttgtcacatagaaccatatttgagttcactctttgtccttattcagtccatggatatattttctagttattcatttggaaattggaatcatgtatttgtgaaatataataatttttgtaaaaagaaaattttctgagaaccccccattggactatgattttttttttctttttaatcacaagctcttatctaacaaattgacataatttttattaaactattggtgagaactcaccattagagatggtcttatacagttatactagagactttttgacggttacatgactcaagcaaaaggttttagtactaaaagataaaaatagatccaaacaaggagaacatatatattttcgttattataactgtaatacatttgatccgtagttgaatatatcaagtctaagatgggcggcgtacaatgtactggttctgtaaggaagaagggaagaagaacattactaaaaggattattctgccaagaaaagaatatgataattctctgataagaatagtgggtgcttgattctagatgtacatatcacatgcttccaaaatgaaataggttagtttatgtatgaaatggccaaactttgtagtttatttatgaaatgatcaaagtttgtagttcgtgtataaatttacatctaactagctagcatttttcagctggctgttacagtcctcctatctatcaacctcttcaaattacatagttttttctctattataactacatgtcatagtctcggtttgaatttttgcccaaaaaaaatgttcggtttgaattaacatttgttccaaaagaaatctgtatccattaccgatccaataagcgataactagttatgatatcaaaatcgtcatatcatatacaagagttcataattcaaacaaaacagagaaatttacgatgactaactttcgattatgaaacttacgtacacataaaaatgtatctattttaatgcatgaaaatgtacctaacaaaaaaaaaactctttgttctaaaacaatgtactctttttgttaacaaaactaggctttaaccagcggtttaccgcgggcaatcggtttatttagttcttatattaaatatttgattaaatttgatatcctaaacttataaatataaatttctaatgattagtaaagaatcgtaatagataatttggatattattgattattgatttcgtgattgaatatagtatttttagggatggaatgtgatcatattttgatttcaaaaatgacatagattttctatttttgttgagcggtttagattgaagggaattaattttattgaacggtttagattgaaggaaattaattttattgaacggtttagattgaatcagatcaaatgaagtttaggagattgttaagaacaaattacccttaatgattttaaatagcaaagaacaaaatccaaaattaaaatcaaaattgaggctaaattagataaaatttcaatttgtacttcccttttaataataaagggataactgctttctcaattgacatgtaccttgtatactatgaaattttcctgatcatgttatggactcatgacgtaccacttcaactaattaaccgacaagataaaattagatgacaaacaaaaagttagctttctatttatttttgccaacggctaaagtctcaatactaccaaacaatactccatggccaaacaaagcaaatatctgaagacttgtcctcaaaaagttagttaatggggtccagttcatataactactaggcccgttattcaatcatcaggcccaacaattcaatagtcataatagtattttaaccaacctcataaaccaaaccggttatcaattcaagtttggttaagaaacttataccgatcgcatgcactgtcctgataataaatacggactgaaaactctgcatttgttcttatgtatcaactgcatgtgcgcttgcagtgcttttatttctcttcattgacaaaattaaattttcatttttttggaaaattttttagtagtacctaatatttttattttaatgcttaaagttttatttatttcttattttatatacaaattaaaaataggtattttacgctggaaaatgtgtttgtcccgtccctacatcacaagcaccatccatacatcacacatgcattccatgttattaagaagttgtcatttaatataaatcgtaatctcaaatcatttcttatgtatatttttcaagaatattatgcctctttatattccacctccatacttattatgatgattcatatccttacacttgaatgcgttatgtgaaataatatatactagtaaaagaaaataccaaatctattacaatatattataaagtatacatctcccatttttgtggccgtcgaattttcgtattacataattacattcaataaaaattcggatttgcaacttggtactaaaatattatggcaaggagtgataattcaatgtaatgatgaacttgtaaaaaaaaaattaaaaaaatttcaaatccaaaagatacgaatctaacctgtaaacaaaacaaaattacaaaggattacaaacttggttcgactctcgaaattaagtagcaaattcttgtacctcatttcaatttcacggtacaaatgttatttttctttgaatataatttaatatttctttaaaaaatatatctatatttttaatggataaaaattacttcttagtaaataaaaataatacaaatgaaaacagtaagatatctacttaccgttttactaatggttaaacagaaaacgggacattgtacgtggaaaaaaaacatacttaagcagttttgtttatgattaaagaaagaccatgcattttcaaagtggttatgtagacaaaaaccttttcgagtttcattccatatgtttgattaaacagcctgtttaacacaactttattattatatctaacgtaaatcataaactttccacaaagtgaaaatttcacacttgtacaaattgtcattcaaaattcctacctatataaataaattatagcacaacattgacaaaagagaagaaattaaagtagtctcgtgtctcttcttcttccttttcttccggcctcgtgaaaaccaaattgatttcatcctttttacttgttgacatttacatacatacacatgttcacataaatagatatagttgtatatgacttgtgtctatcaatccaaaatcttcattatctactataccaaattctcatacaaatatctcttaatctcttttcaccacctacgatattgacatatataacgtacaattaatttcatcaaaacttaatgtggctgtatgacttgtgtctatcaaatccaaaaatcttcattatcttgtataccaaattctcatacaaatatctctatatttcttttcaccacctacgataacgacatatgtaacgtacaattaattccatctaaaactatgtttactataaactcaaattgtggtccattaacactaatcgcgaaccttacccgaataaaacgttcaacatcatgtattcatatatgtttatgtaacgtaatacatataaacgcatataaatctatatatggagaagtcgctaacatcatgaatgacgtagaccatcatgtagtttgacaatggccaaagacccactggttcaatccaaaacagcaattttttcttttcttctatatcttaaaaaaaaaaactattcgttttgataaaaaaacaaccaaaacagcaaatcatgacgcagagaaaatctcgttcgtcaaaagaccctttcattaatttctattattaacaaagcctatgcaatacacataaatgcaatagccactattcaattcttaaaattatcgtagcaataaatcaaaagtgagagagggagatatcatatcatatatcattatcatgttatcatgcatgtccccattattctttattttttaataataacataaaccaataaattattaaacccaataatattttttttgtttgtgttattagggtttttgaaagaagcaagcccacattgaatgccacgcggttttgtatggagggtagagacttttccttttgccacacagctgactttggaggctttacctccacttttgtagttaatgctttacacattttttatatacttttatttattatctatacaatttgagagacccaagagtccaagaccaagaggggtcagcaaatttctctttctccttttatatatatatatagaagaagaagtggacatagacctttgtcgccaagcttaaccattagatccatttcagagctaagcgtactaattagtgtactaagggtagtgtgactcattaccacctaaagtagtttcaattttcttctatttttcttggcaaagagttatagtgggaaacaaagggagtggttaataaagaattaattagttaattaagggagttcaagatcataatggtgaggcctccttgttgtgacaaaggaggagtgaagaaagggccatggactcctgaagaagatatcattttagtcacttacatccaagaacatggtcctggtaattggagagctgttcctaccaatactggtatgtataatcttcattcatcatctctcctctctacctctctatagatttgtatgtagatattatttggatttaatctatgagagtgagagatagacaaggaatcaaattggtttggattgaaatttgtgttctccaaattggttttgatcttcatttggttcttctttaggtctttaagattgtggaatcagcttaatgaaaacatatgtagaaattagggttttgtttattgaccatgaaattaagatctaatgcatgagatcttgttatttatatattttctcatcggttctcaatatttgttcgttcttataaattttcagggctgcttagatgcagcaagagttgtagacttagatggacaaactatttaaggccaggaatcaaaagaggcaatttcacagaacatgaagaaaagatgattgttcatctccaagccctcttaggaaataggtaaaaaataataatgacttttcaatttctctaattttgtctcttcacacattttctttcgaaaattagaagatttgttttgatttttaatagagagcatttaatatttggtgtagatgggctgcaattgcgtcatatcttccacaaaggacagacaatgacattaagaactattggaacactcatttgaagaagaaactcaacaaagtcaatcaagattctcatcaagaacttgaccgttcctcgctctcatcttcaccatcgtcttcttctgctaattccaactcaaacatctcaagaggccaatgggaaaggcgacttcaaaccgatatccacttggcgaaaaaggctctctctgaggctttatctcctgccgttgcaccaatcattacatctacagtgacaacaacgtcttcctctgctgaatcaagacgctctacttcctcagctagcgggtttcttaggacgcaagaaacatctacaacttatgcctcaagcaccgaaaatatcgcgaaattgctcaaagggtgggtgaaaaactcgccgaagactcaaaactccgcggatcaaatcgcttctacagaggtaaaagaagtgatcaagagtgatgatgggaaggagtgtgcaggggcatttcagtcattttctgagtttgatcactcatatcaacaggctggtgtttcacctgatcatgagaccaaaccagacataactggatgctgcagtaaccaaagtcaatggtctttgtttgagaagtggttgtttgaggattctggtggacagattggtgatattctattggatgaaaacactaatttcttctgaagagtttgctttaatcacatggttctaattttaggatcctcatctctatttttttttttgggttttccaaattaactcgcttagattatcgtgagataaatcagtaataattttatttattttccctctttaatttacaattaatgatggggttgttttatatatggccctgtgaattctgaaggggcctgaaaaatgtccacccaatgattttagtagtattggtgtaaaatcctatatctattttttatttattaaaatgttgttattgcttgatttttcttttgctttgtaacttgtaagtatgatttacttttgagatgttaacctaaaagtaattctgttacaaattaaacatacactgacaaaaaaattacatatatatattggagaatgaccaaaaaatgctcgctcatatccggattaattagtcctaatgtgtagtagcctagtaagtgtgggatatagaattaataatcaaatacttacaacttgcacttaattgtcaatttattttccttaaattaaccgttaactcactaaggaaaacacttaacatttattttagagtgtcaaatggcgccgctcaataaatgaaatcttagatttaaagatagccttactattggtgaatttgaaagacctactaataaagaaaatagtactagtaaagaaaaattaacgaaatatttattgcatgaaataaatagggccgacaaggtttaaagaaactaattataaaaagataaatataaattttaaaaacgggatggattggcactataaatattgaaagtgatgaagaattaaagtttgactttctttcttgtgaccttgtgagttgtgtgacttacatcacatagttactaagtatgaagaagtcaatatcgccattaatttagcttctcctttggtttttaagatattgccacttgttatgccgatggtaagaaacttagaaagaaaagaaaaatgctaaaaccgaaccggagattatagtaaatgtatggcagtggttctactttgtcttcggacttagttgtgggtgttttgcatctacagtaaatttgcttgtattattgttggattttggttcgatcggcctaacctattgaattgggtttgtatgcacttttaataattgaaaacgaaaatacatatattttaactcgaattttatagatttggcaatgaacaatggattaaacgttaaattaacaaaagtttcagtaatattcaaagatagtgttttctgttgcgttttataatggcaccatttgatcactttaaaatcatatttaagaattatttagtgaaaacatactttaaatttttatagtgaatatatatttgtaggaaatatttatttgagttaatcttttaattatatatataaatgaaggaagcacaagtttatcaaaatgaatctcgaaagcaaaaaattttgtcgtagtaatattgcattggcatcacgcataattgtcctaaacaataaacaaacaacaaatcagttaagacatttggatatttccacgagttaataactcgactcttgataagatcaacattggtttaatttctaggaataaaaaaaattgcatgcgtgttggaacaacatatataggctgattttttcagtgttgctggatggttgaaaacaagttagaaccatgttcgttctgatgctaggatccaggactaaacttaatatgtggagctggctcactcctgaaattaattaaataggtcattgttggaacatgttttagtccggcactcataatacggtgcaagttatctaaaattctcattcgtcttgttttacacctaataatgtattaatatttcatatcatgtagtttaatatatatatttatttaacgtggattaattttacttatgataattatcaattttgaacaaaataaatattcctcccaaaaggttttcaaacgaattttaaagatgaaaattacaattaataaaagaaattatcttggatcattataagttggcaaaaaataaagacaacagaaccatatacatatatggtgagcttggttttgggcccatgctatcaagctgactagcaaagaaaagaagctgaagaatcatgtgcgattcatgtctcaaagcccaaccatcttgcttttatttattgaagggtttttctctttagagttttcaatttttttttctggttaagacgttttattgtccattgaggagatacatattttataaatgagttttaagagtatatcacacgattaacctaactgaatatgtaaaaatatttttcacaagttaagagtatagaagttcaaaataccgaacttgtaatgaaaggcatcaaactcaagatagaagccattaaaaaaagtcgtcatgaatgaaattgatagtcactcttaaagtaaatgttagaaactaataagaaaaaaatattaactttgaatatttactttagagtaagaaatagagataaacattggagcaaaccaccactttatttcaaagtaaaagagtttgagactctccaaataatctgctttttgtttatctagacttttcaactcgaatgttaagttatattatacatatcctacgtacggtctaaacttagatagcatattaaattgtacataccaattatctatgcatacaaaaacaaatattttctctgtttcattctgagtgttttgttaaaagaaatcacacattaaaaaatactaaatttgttgattatacttcttgtcaatattaataaactatagtaatagacagtgactttgtttaaattctatattgtttatacaaaatgatgtttttattgaacaattgtcaatcataaacacaatattgttactacatatgaaatagaaatatagaatacactaacgagtattacgtgagttgtgtgaaacctaagattccttatcttaattaaacaatgaagaatgacggttgagtactagccaaagattacacatcactaatggaagctggcgaatgaaagttgggttgttgaggaacacaaagtctctttgctctttttattacatctctatcttatcgtaaatcataaccatcattactccactaaccaatttggtctttgtcattaacaaacttgtattctgttatatctatggatgatccaccgtttatatcttttgtttataaaaattttagtggatatgttcaagttttgtccgaatattaccaccgaatatatgcctaaaattggatataaatattactaaaattagattgtgtccactaattaagtttttatatatatttaataataaagatatttagattcggtgatatgcagctacttattaatcattgtaaactattgaaatataaatattttataaaataataccatttgcaaatttttatatataatacataatcataaaagttttcaaaaatatatgtttgtttttaatcgttcccagtgtactcggattaaaatctagtttataccttaaaacttttaatcatatttttattaagatattttagatttaatatataattcatagatttaattcgcttagtggtattatgcataaatctagtttagtcggatataattcatatatattttttgtagtcaggattattggtccaaaatttaaaactgaaatgtgctttagaaaaaaatttgtttgattttatttgatttggctcactactattaaattactactatctaatacatacatggaaaagtgtcaaatattgtgttggtgtttagatgtttttttttttttttttttattagccaatgtacgtatgtacatattatgattttttttttctaacaattatattttattttttttcatttgtataattcataatgctacaaatgtgatactttggtcatgacaccacgaacaatataaacctagctaactcacatattgctaattaaattaacattatggattacgtacggtatgccagagaattaaatatcataattcatgcaccgtaacaggacatgtagaattgtagaaaaaagtaaaaatttgaatatttcagataagcaacgttacaattgtggaaatgctttattattattggtcattaatttctgatctctatatattatgcgagtgtggtggtccgactataagtatatttgtaaattaattaaaacaccaaaaatggttaaaaaaaaaaaaaggatacatttgccatgactttttaattattgatgtattaataaaactcacaaaaaggttatgtttggcctataatttcatatttttcattactaccttatgagttatggtgcagatatgtgtcgtacgactcctaattattgttagacagaagcaatcttatcaaatcaagagaatacatttatatacacatgcatgcattgcttacgtcttaaaatcttaattaatcttcttctttttttgaatgaatgttaaattttattcaatcaaaaacctgtggtacattatatgtaacctttctgaatgtttttaattataaaaattgaaagaaaacagagcttgggtgagaaatacttcatcgaatgatttttttcttcttcccataatcgtgtttattaagcagaaatacttcatagaatgtttttaacataggaagtaagcattgtacttgtatcgagtgcatctactacatatcaataatctttttttttttttttttgtcaaaaaaccaatttcaattaagattgaaccggtgagaaagttggtatagaggctggtacaataaatgccccaagagtaaattttgcaagcgcatctgcacggcaattaagtgatctagaaacataagagaaagaaatttcttcaaaagccatagaaagtgagaggatatcttgttgaatccagtagagctccttcgaagaggactctgaattgagagctttgatgagcaattgcgaatctgaagcaaagaaaagttttttgaatcccaaatcgagtgcttgttgttgagcaaggaggagcgccattgcctctgctaataaaggagatccgacattttcggctgcagaactaccttgtcgatctagcttttcgagtggattcaggaagatccaaccaaagcccgccttgttggaacttgcttgccatgcagcatccgtgaagcagacgattgtatcaggggaaacattgatcgatggtgcagagatggatcgggttggttgctcaggggtttggagctgcgcttcttttcattcacgggcttgagctaccgcctgagagagggcgtcgggaatggagatctgcttttgttcaaagatccttttgtttcgacaagtccagatggtccacaagatccatggtgaaagaggggtcaaccccaatccagttgggggtaggttaattagcctccttgagctttcaattctcactcttagacttgtgactcttgaggaatccacaggggatttgaagggagcggcttcccagaggttcttagcaaaaggacaatggaaaaataagtgcagagaggtctcaggtacctggcaatgggggcagagagcatcgaaactgattcccggagattgcaagagatctcctacaggtaaagctcctgccaacgatttccataagaagaatttgattttctgtccacattgtaaattccagatttctttgaaccagttgaagttctcaatttccccgagtggactcatagtccccttagacatcatagcggcttgataaccggatttcgcagtaaactctccattcttggtaaggagccaaataaatttatctgctactcttactttgcttggtctaagtgcaaggatgtcttgttcatattctggaagcagaagtctgactctctctttgatccagctttttgtaattggacaaataaggtggtcaacgtgaaggtgctggctttcctctggtgctggtcccatgggagaaatcgattttgacagcgaaatccatggttcgtaccaaagcagagtgtttgagccagagcctaaagcttttccaaggtgctgttttaacagatcacgtccaatacaaatacccttccagccatgggaagcatttcctggtgctttggagtcaagaaagggagtggtcttgcagtatttccctaacaaaatcctggcaagaagacaggtgggtttttgaaggatacgccaacttatcttagcatggaggccatcattaaagcaggttatgtctctgaaacccaaacctcctactccttttggctgagttaatttttgccaagagatccaacacatcttgtgtttttctgcagatgagtcccaccaaaaccgagtcaatgcagactgaatccgtttactcggtgagcctggaattttaaaacatgacatcgtgtatgttggcatcgcagcaagcacggatttcaacatagtcgctttccccgcggtggacaagaacttagaggaccagctcagggatctttgtcttattctgtcaatgattaggttgaacatgtcttttttctttctgccaaacatctcgggaagaccaaggtactttcccagatctcctgtttgttgcatctccagaatttggtgaacttttaattttactgcttcaggggtttttgttgaaaaagttattgcagattttcctttgtttatcatttgccctgatgcactttcatatctctttaggatgtggagtagggtgtagcagcttttctcatctgttctacaaaagaacatggtgtcatcagcaaacaacaaatggtttactctcgggcagcctagagcaactcttatcccagggagagagccgtcagcctgtgctttgctgcataaccctgagagagcttcactacaaagaatgaaaaggtaaggggataaggggtctccctgtctgatccctctctgaggtaagatactttcttgagccgagttgtttaaaagaaaagagtaggagacagaagatatgcattgcattatccaagccacccatttagggtgaaatcccattctttccataaccagcttgataaaattccattcaatgcggtcatatgccttactcatatcagttttgacagccatgtaacatcgatcctttgccttagatgttttaagataatgaagtacctcgtgtgtaatcagtacattatcagtgattgctcttttaggcacaaaagctgactggttttctgagattaggccttgcaggattggttggaggcgctttgaaagaactttggcaatgatcttatagaagacagtgaactttgtccgggtgaatggagaagcaagctctcttgatttcctcgcccaaaggtacagaggtaagtaccgtattcatttcagcagtgatacttggttgaatcgcctcattgaccaggttagctctgtcacattcttgagaagtaaacagcgaagtgaagtagtcagtgataacccgcaaaatatctgcctcctcatattggggaatgccttcattattttttataactgaaaacttgtttacagtagttctgccttttgttatagcatggaaatagcccgagtttttatctcccaatgatagccaaagttgtctacttctttgtttccagaaattttcttcagcttggtaggccaacagaagggttttgtttatggaggttatgaggttttgatcatggttagggcttgacattgcttcctccagctttttcctattttcctcaatgatcaattggctgttaatatgagtctctcttgtccaggccataatgtctctacgacatctaatgatctttgcatccacatcttcctgagcatcagcactccaagcttcttgaatcaggtctcgaacttcctcattcacttttagtctcctgtcataacggaaaatacctttcttctttttctttgttaggtctaaaagggtgatgataggtctatgatctgaaccctcgaatctaaggtattcacagtgactaaacgggtacacttcagcccaagaactgttggccatggctctgtcaaggcggcagtgaacaaggtgatcattcctctttcccctccaggaaaagaagttacctgagtgtcttaaatcatacaggtcacaagctgccatgaatgatctaatgtccacaaaggtaccttcatgtcttaatggacctccttgtttttccgaaacgttaataatatcattgaagtcccctgttaagaaccaaggttcatcacgagagaggcctttttcagtgaattggtcccaaatgattttcctttttgacctctcaggttccccataaacaaaggtggaataaaatgatttcccagcatatttgatctttgtatcaataaaattatggcaagaagagataatattgatttcaacttcatttttccaatacagggctaaccctcctccgccagggctgtgaggagagacgaggaaatgggaaggaaattttaaccagtcaagggctttctctactttttcatccgggtttttagtctccatgaggaataggatgtctggtgagatggtggagtgtatctcacttatccgcctgcctgttgtgggattccccaacccacaacagttccagctcaagatttttaaggaagaggaggtggtggattttgaaaatccacctttttcatcaccatcgcaggtattgggggaggggagcgggtataatcaaaagaagtagaggttctttccaagggaggacgtcttggtctggaagaatctgagcactcccgagggttagactgagatggagttttctctctccattgcagagaataggatggagttagatgtctgggggctcctctgagatgagaagaagttggatgagctttgctatgggatctctcccggtactccactgctctatgaggtctactaggttggaagctttgcctttgggggaaagatttagaggcagacgtgtgtcgggtctcattacgtgatgagttgcttcttctggaaaattctcgggttggcaggtaatttcttgctgagccttgtgaagtagttctaggggcagcaaagttatcttgaggtgtgtagtaattctttgaattcccttttgacagagaactagagacagcttgggagtggggagcaggagttttgtcttcagccacaggaagcagccccgggcaagtcttttggtcatgagtgattctctggcagtgtaagcaatggttcttcaagttcttgtactcaaggctaaccagggcctcttggccatctgagaattctaccaccgtttcctttaagagagggttaagaccattgaggagaattctgagctttacagaagaagaggtgatctccatatccattatttcccctagatcatcaccaatagcttcaagcatcttaggttgccaatagtgtttcgggagtccttgaagttcaatccagaaagggatcatggagggaaaggtatcagatattataggttcccacttttggataataaccatccattgatcaaaatggtagggtctgttctttaggactgattgtagatcctcttcatagttaaacttgaactggaagcatcccttacccagatctgatccagcagctttcccttttaggttccagcgattggataggaaggggaacagagcccagagacgttgagatgcagggttggtaaggcgccctatgagagtcagggaattttcttgaataaggtctgaggtatccaactctggggctcggattcttctacaaggggggggggggagagaaaccacgggcaattcctttccctttcaggtaactgggtattcttttgtccataaagggaggggttaacaaaccagacaagacaaaagggagagttccttacaagtttgggagttcagttgcaaggttaaacagttttcaaaagtttacaaggtttaaggggtttaagaggttcaaagcgggaggggaagaggttaccaagtgcaggagtcagtgaaaccagagccggctgcagcaaagggggagcagggagatggatactccggtgattttgatgaggagacaatgtcacacagttttgagaagtacgccttcatcatcatagataggtgagcaaaaggacggagatgagacgccggaataacgggagatgagggggatgtcggcgagggagaagtgggagtttccaagaatagctaaaaaaagtgggtaagatcccgtttttttgaaaacatttgcttcatttagttacctcgaaactcgtgcctgggagagaaactttttttttttttcagccgatgttaatctcatgaaacaacgtttagtgtggaacaatgaaactacaacagtttttttttttttttaaatatatattataaagtaccaacaacgtttggttatgcaattattgttatataccatctcatgatttatgtttatatctaatttggaaggagaaaatatcaatgtatttcttataaaaatatcaaaggattgacggaacacatgaataagaaaatttgatgtctaaccgaaaaacgaatgaatgtatgcatgtgtaattcaaaaaaatcgatacgtaactgcaaaggagcaagcgatcgtgaaggattgcgttgtcctcatgatgtacaaaataggtttggtagcccaacttatcagtcccacgttgttaggtccaaatgtatatacatttatacacacttctatttttgttcatgactattcatcatacaatcttaaatatattgattggtacttagattacaacgaaaattgattttttttatttaaatccgtacaattcctcgggtatactatagaagtgggtcaagatatcacatagccgacataatcactttttggtctatgcatatatattcgatctcgataccaagttcgattctttatgatacgtataaataattttcgtaaccacctgtctaattatgaaataaaatagaatgaaagaaggaaataaaaagaggattaaagaggatgaatgttaaagggggccaccacagtacatattaggtcttaaaaagacaagcttagctgtttccttccttttaaaaccaatcactttgtttggtcttaaagaaaagctttctcatcattttagggttttctcgcaaaataaatcgaacaaaagttgcatccacaaacttccacacataatttaatttttgtcgtaatatatttactgttgcaggttgtaattcttcatccacttcattttattctatggcttatggttatggttactagttagcgcacaatatatatttgttggaatgtaagagtacgtattctgcgaaagtggaatctagcagaagtttggaagatccaaatacaatgtataagggtgatattatcaactaaagacgggtgcctaactcacaaagtggtggctccatgtctcgtgaatgttttgtttttgtatctctggagttatgacattttggtccgtccattcggatcaaaaatcagaacgatgacaaatataatctctttcttaactggagatcagtagattccaatttcgattcagcataaacttattcaatttcttctaaccggatgagacaagtactagtacgcattattgcaatattaaagtgtcttagtattccaaaaacaaaaattacgatactttaaacataatctgaattttgtataacatgagccaaaaagaaaacatccaccatatttaggttggtaacaagaaaacaaaacttgtaattataattcaatgcatagttgtggtcatttaattacaaaagacagatatacatatatgatatacccatcaaaaacaaaattctggtagattagcttagtaggtctgattggttgtgatgatgcatcaatctataccatgacatgtacatctacacacacacacatatatatatatatatatatatgcagttgcaagaaaaatatctaaggtttggttgtcgattgctatcagaaatgctataaatatcacatctagggttagggttaacaaccgaggtcctcttgtaattgttttgatctttcactccctaactatttcgagccgtagaaattaaagtaaaagaacaaaaactttattatacatttttctcttcctctttaatatatatacattattacaagtttagatttcataaaaaaaagtcaagaagaagaaagagctgagacgagaattgaagtgagaaagcatgaggaagcgtcaggtggtgttgaggagagcctcgccagaggaaccttctagaagctcgtcgacggcttcgtctctgacagtgagaactgtgaggtacggagaatgtcagaagaaccacgctgcggcggtgggaggttacgctgttgacggctgccgtgagttcatggcaagccgaggagaggaaggtaccgtggcagcgctaacgtgcgccgcctgtggctgccatcgcagtttccatcggagagaaatagaaaccgaggttgtttgcgactgtaattcacctccttctactggaaattagataagaaaaatctagagctagctatgagtgtgtttgtgtgttacatatacagatgatgaaactgaaaatattttatttgcttttttttcttctttaatatgaaaggcttgtgtttctttgtgaatttaagaagaaactataagagatttatagattgaaggtggtggaagcattgaaagatttataataattggatgcttttggggtttgagaatgttcagaaaaggttaggcttctgaagtgaaatattaagattattgttgtttttcatgtattatattgtttgatttgtattctggttgggtcatgttattgtattttgatctattttgattattttgtcgaagctgacgaagcatgtgtggtgtactcgtgtttcaattcaatgtcgtccactcaagacaattgttaagtgtattgtgaaaggaatttgttacaaaatcaatatgtgtatttactgataaatgaatgaatgagattgattgttccttaacatatatggaaggttcttcgcttgtgataaggtagctgaatatagtaacccatttattgattatctcaataactaatttaattaattatatatatatatatatgtatatattagtataaataaatcactaatgattgtagtaaatattttttttgggaggcgatgaaaaaaggtttaaattgatccctttgagaccactcctatagctttatttttaaaaaatataaatggtggagttaagtctcacactattttccatgatttatcttaaaatatttagctttatgtgaagtgcataaagctcagatttatgtgaagggcatgttaactcgagaccgattagattatttaagctcagatttcttaattatgctatgatgagaaccaatattttcagggatatatgccttcccagcttttaattaaaaatagtatatattaaaatattctataaccttttagctttaagagagatttttcaaattttatttcagaggataaaagataggcaaataaatttgaatttaattgggaggcggaggcccacaaatctaatccttgttggttgctaacttgctatgatggagaaaaattagatttagaactaatcatacacgataatggcttgtggttttctgatcttttgttttttagaaaattataataagtcgcatttaatctatctaaatcaatactcccaaataaagtacagtaaaccaacgaataaactgaagaaatgccaaataaaattaacgaaaaatttacagtaaaagaaagatcggtattattgtcaaatttagtgtgttaaaaaatttaaaattaacgaaaataaatgaggaaattagatgtcttcatacgaaaaaagttggatatatttggctggttgatagatttgaaatgccatgtgaaatgtatcatcatgaacgtacaatgttaggtatttgagtatggagaaaaacaattccttctgcatatgttagtaatattgtgccgaacttggtcaggccaatgtcgatttttatttccataaattatttcatgtataaataaaactaaataataaataataaaaatatatacacaatatcttttttatatattagagtaacatcttattatataaagttaggtttcaaagttgctaactcataaaatcattacacgtgtaattgattgatcaactttaaagatatatacaaaagtgtttgctcctatgcttttaaaaagagatgcaaacccaaccaaataatgaaaaaaaattgagaagacaaagatcgtataacttaatgagaggcccgtttatctcattcacacccatgaaggtgaagtctcaaaccagatttgtttcagtcttctttggcctttccccttttggatctcaaagcttctccttgattttccgtagtctcattttcatcagttctagagtggtcgggttggttaggttccgtgttctgattttttgcttgctaatttcgtttctactatggaagtggttctgtaagctcattttagttcccatctcgggctatcagtttatttgaaggcagtagtcaaattttgggttatttccgaggctcatgtcagtagcctttcttcatcaccaaactgttcaatggaagtattagttggttgctcgtaaggaagagctttcagtgttgttgctttggagttctttaactattatttctttaccttttcttgcctgggcttttacgatgtgggctggagcaaaatctatttttttctttttatacctctcaaagatcatgatcatatatactaggagaaggtgttagaaggagttagattgtttaggttttgagttatttttctaagctaataagagagttatttttataattaaaaaagaataaaaatttaatgggcttattcaaactcctatttagtatgatattgtcctctttgggcttatatgctcaagcccgtaaggatttgttattgagtttctttccaaaaggcctcatactagttgcagttggacttgacttatatattagaaactctttttctaaacttccgatgtgggacttttggtttgtacccaacaatctccccttcaaaccaaagaccacgaacttgggcctcctggctctgataccatttaatgggctatctaagaacattccaactcccatttatattgtcttctttggacttatatgctcaagcccgcaaagatttgttattgggttccttcccaaaaggcctcatattagttggagttggacttgacttatatattagaaactctttttctaaacttccgatgtgggacttttggtttgtacctaacaaagatgtattgagagaaaaaaaaaatgtattgacagagaaaatttctaatgtttttacaagttcctatggtcaacgaccagttaacgttgtcgtatgtttaatagtgactttccagtcacccaaactctcctcgacgactaattctaatctcataagtcataagcatgaactttaaatcaaaggcttgccaagcttgaggtctgtgtatgtaatgtaactagagacagacacattctcaatagcaaagataaccttttgtcaatgatgacagatcatactttgaaaggcccatgaagcaccagtgaaaaagccttctctctctgttatgtagaaaaggttctcttactatgcattaaaacctgacttttctcatctcttaagacccaagcctagcctggcaaggaattcgttttagatcttgcaatggcaatgtttcactttaacccaactctaaggagggggttccccataaccattactagctagagacatagaagatgaagagaatgctgccctcggaaaattatacacatcaaaattaggagctaattctttagtcacatttgattcatgcatgtgagctaatccactcccccacatcactaaaactcttctccactgactatttggcaagaacttttttctttctaagaaaaataggtttttgttattccaaatctttcaaaagatccatggaaaggttttcctgaactgagtaggccaagttttattatccatgttgatgagaagatgatacaagtttgagaacatcaatcccttctcatacccattctacggtaaaggaaaacaagacaagcctaaagttgtctagctgcatggcactcaaaaagcatatgattgattgtctaaccctcttccccacaaatttggcatatttcatcaatcttcttgcatccatatatacggttggcaacaggaataactacacaaaaaactttgatttttgggtcggtttgaagtttccttacctcagttgaagcttcaaactattaacatccttgttgttttgttaggccaaccaataagccgacttaactaagaaatctccctttttatttttctccacaccatgaaatgatctttaaggccaccttatgtccatatcttttctagctttgattataatgatatcatagagaaataagttatcatagagaacaaataatgcgtgtcaggttttaccttaaacaaacacaattgagtaagctgcaagtgcacaagtatatactcgtatgtaatatttaagaggatcaaaaaaaaaaaagtttaagaggattgatctcaagcagaaagaatgttactttatgaatccggctgagaaaggatcagactagacttaaataaaagaagtttgtattgaggttgtcacgaacaaaaataatgaacggttcaatttaaaacgtagttaagatcaaattttattagctcaattggtaaagaccctaggtgaagcttagaggtcgtcggttctagtgacgtttgggacgaaactaatataacatgctgtgatttcgggcctagggagattacgggtttcggtccaaaacctcctgatattcaaaaaaaaaaacaaaaaaaaaaaaaacgtaattaagagattttaagatagtttttcaattactaaacaagttctagaacttggtctagctcggaagacgaaataacaaccatcctattttgcaagaaaaaattgcatatgtctcaactttcgtaagcaactacggaacaagcacacatttccaatacatgtccgatcatttcactgcgacaccataactcaacttttgcaggttatattgggagtcagcttgtctaagttttgtttcaatatgcatggttataaacaacatatataatttgatatgaattaaagaaatctttttgtctactttttgtttaagattttaataattttattttctgtgtatatatttttaatataatttttatgtataatactagataatatccacggtaccagaaagctgtatcttgaaaaccaataataaatcctttagagagccattctctcttaagttcactgtcgtcttgctcaagctctggccggcgcgtgacggctcccacattgtcggcgtcggtcacgtctttctgcttttcttatcagctttaatttcagtcttgttatagtggttgtggggtgcggagattagttgcggtttctagatctggttgctccttttggtgtaacctcgattaaagcttttatcactggatctggtcgagctatggatctggaagatgagtatggtggtgagctcgctcttgggtggagtccctcctctcgtcactggattcccttttaccagatatttctcggtgatatcactttctcctatctctctctttgtagttttttttttctttttttctctttgtagtcttctagcttcggttgtgtggttttagcttgttatgaggctgttggttagttttaaatgcagattttttctggccttcgtttggggaatttttttggtttaatacgagtgttgatttagtgagtgtattgaggaagcggattttagcggccagtaatgtttgggtttctgtttactgcaaagacgatgatgccagttcttttagttcaacggttggttcgaagaataattccattgtggtttgcttgttactgtctcagttctgattttcggtctagttcttatctgttttcatgccactgctgtggaatggttatgggttcttgttagcaccgtccttgtagtgacccgcgtaaggacatcggccacgggcaagagtccgaatttttgaaagttgcccgaatgcatggccaattgaccttaggtgcctaaaacacaatagactatcaaagggcaagtttgggcaaaaatgggcaaaaatgggcacaaataggcaagtttgggcaagaacgggcgagccgcgggcgaagtttgccccaccgggcgttgaccgaccgttgaccgcgcctaggacacgtggctcggctaacttggggcccaagcaaagttgcttggagccgaattttagttccttggagccgaagtttgggtggccacgtgtcactcatccgctagaacggcgagcgtgtcatcacgggtggatgacatgtggattggtgactcgcccatactcatgacacgtggacatgttgactcgccattcccttgctatataagcccaattcgactccaatttttttgtgaagagaaattgagcggaagtgagaggttgccgagtttaaaccgtctgttcgattcaagttaaggtcccatagccgaaaactttgcccgaatcgttggaagctttctgttggttactgagtgagttctagataatggtttaagtttcataatcatattctcatgtattcttgattgatttcgtgagttatatgaatcgtgtggatggttatattagattgcatatgtgatctttagattcttatgtgatgtcttttggttgaagggttgtgctgagatattgatgattctatgtgtttgagtaaccatgtctcataatatcttgaattgttgggtcttgatgcgtggtgctcatggtaggaggcagagaccataagcgtatcaagatcgtgatatgtctggccttcgtagtgaaccgttctatcgtgggtcttgtaacgttgttacttgatcgccatgggtgcaaagaactcggagagacggggctagctaccctgaccgagtgtctgcacgacggtgtagcgtttggtagtgatgctccggttgcatacctttgtggttgtaacggggagatcacgggagtgtgtgtgtttggtgttgggtttgaatgcaacatatcataccctttaaaacttaatgaaaactggagtcttaatgcattgcatatttatgtagttgcttcggcaagctacctttcgttgccattctcggttgcgtgtttcatgttgggtattcgggttggggtaagctaatgcttgttgcagggaatcccaagctgactgagtaatcttagattattcatgattctacttgttttgcaggaaacccgtagtgggaagtagagggcgtggtggacaataggaaacccggagtagttttgtgccttttgtaaaacaagtatgtttctattatgtaccatgcttttggcactaggccctggccatgaaacttagaaatgtttggtaacatgttgtgtaatatttatacttatgaaataaattgggttttcttgtacaaattgcgaataatgactgataatgacttagtccgagtcggcacaacacttaaatatcgcgagggttggcaagcctaaacgatgtttaagtgggagggaggtcgtcaatacaccggccaagggttgggattggttcccgaacctcggctggatattgatgatcaatctcaatgtggcgttttcggggagcccgtgacttatccggtcatagagcgtttcgggggcgttacagtcctgccattgttttgcctctcgctccttatcgctttgtttcagccagcggttcccttttggttctctccctaattccttagcagaggctctgatttgttgttgaagatgtgctagttctctaagtttttggtctcttctccttggtgttaatgttgttcgcagtggtagatagctgacttgagctattgtctttctcttttctgagagcggtgatattcgagtgcttagggttcgctccttgtactttgctttccagttctgtttgaatggatcgtattttgaagacttctagctagacactactgtcagacgtcgtcgtcgcatccataagcatttcgaggccttttcatggtttgcttgctgggttatgaagttcttggttctaggtttcgagagattggctctcttcttgatgggaggtggtagatgttatctttgggttggcctagggcacctttaataaatctcttctacatgagcttcaagagaagaggtgtttgctttcttaggtctagtgtgtttcttatggttcaagcctttttgtttatgttcttaaggttaagggattgtgctctttcgattcggtttgaagtttcttgctttgtggttctcttatatttagtttcctttctgtagggcttatatttccagggatatcttgttttccgccgactttagtttctggggatatcttgtttttccgccagctttagtttgtaatcttccaagtattttaccaaggttttataaatcaattttcagatgacaaaaaaaaatatccacggtaccctacaagcatatttttattaaatattttttttttataaatatatgcttttgttttgtttgatttaaatgtattgtataccgtgagacgatatttaataactaaaatattgaaattttaagttttatttatttttttaaattattttattttgcttagtatttaagattttataattgcatatagattattagttttaggattttatctgtagtatatcatcctctattattgatccaaactcgtcactatataactccatctcgtaaaaaaacattttttgtcattttcgtataaagttcaagtatttaatatattttaaaacttcataaatattttaatatcgatccaaacttcatatgtgtattttgattattatatctagatatttactcgtagtataccatccaatattaatatcttattaaatattttatagtatttaaacttcttataaattctaataaagttcaaataaatgaacactatgatcaaagaacgatgtatatttggttagtttagattatttctaattgtttagattttctcaaataatatgtaattaatatgtgcaagattaaggcaaataattaattaggaattgttagtggataaagtcgatttgtaattttttaaagacaatattttgtaaggactaagattgaaaatagtaaatatttgagtgatttttcaaccaaaacttctaccaaaaatgtatatatagatcatattcataatatcttatgtaataggagatatgccttttattcaagtggttaagtacatttgattatgcctttcccatcgaagttcgattccagtaaatcatgttatcccgtgtagtataaattgatggatcgagacttgtcgatccaaagatgtaaataataatatatatcttatataataaacgtgtaaccgaataaaatggtgttttaggcgctaaatattgatttaacgcctactaattaggacactttggtttcttgaaatgatataaattcatttatctaacacataaaaaataaatctgcctatggtcagtttcagtttttctatcaatgtgtttaacctctataccaaaaataaaataaaatcattttcagttttttttttcgaattccggtcataattattttcaaaaaactgatgtaaaaaacttgatggtaaattctcactcttccatagatggaaagttatgagtgatggttctcgttggtcgattagtctcaagatgatgcagtgtgaaggaatcgaagtatgaagatttggaattccggtcgagtttgatagttctccgaagaatacttccattttgttgactgagatttatctccggtaaacaaagaaatttcctcaactagttccagtggtacaatagaagggtcgacccggtcgaagctttgcaaaaatgatgatggaacttgctcgcgaagcttagtcggtgaaaaagatgcgttgaattacagatctgctggaatgttgacacgttgcttacacgtattgtttaatttcagtttttatctttagtgttttgcaacttgtaactgggcctgcagttgtacttcaaacttacatgttatgggctttaatatatagatggattgaccacaaaaaaaataaataaatatatatatatattctcataaaaatgttatttggaaggctccacaaccacaaaagaattttgagatcaagctgagcatgcacatgcctcgatataaaccgaatcgattttttcgaaccgaaccgcggttcagaaaaattggttcgagttcggttatagtaggtttacagattagacaacatataaattagctttgatcaaccattcggtttggttcgacagcgggtaaccaaatggttaaccgaaaattgtaaaccccttcaccggtttcatctgccaccatcctcgggctgccgtttcttcactatctcactgtcttcatcttgaaccgccaattgcaaaactctgttcttaagggtttgtattttgtagaagtagaaaaagaaagtgatgaaatgttccatttcattattgtttcataggttttgtgcaaaagaaaccccttaagttatccatttttgtaattttaccctctacattcaaaaatgcaaaataatcctatggaataaaaaatacaagtatgcaatatacctcatttttacaactttacatatattgtaaacgttttcacgatcacgtacatgtgtttttaaaaattctgaagatatcattatatcattgaactccccatctcaaagattccaatttgatatattatttatcaaaaattttaaataataaaaagactatattgcatattatttttgacttcatatgattattctgtatttttagatgtaaagggtaaaattgaatcattgtcattgggcttggctcaatttatcatgttctttttttttttttacagcagccaagaaataaataaaaaaactttgggccaaaaccaatccattggtttgagaaaattgaaccaaagtcaaagtgaattaactgtattttaaccaaaaacaaaaatttcagttaattttggtaacaaaacgaatacctgaaataagacatccgaacaaaaccgaaccaaaacttttttttatagtaatttcgttaggatttttcaaaaacagaaaaactgaataaaccgaacaattttaaccgaataaaccaaatttttagccctttattgtacactacctatcagcaagtatatatgacccaatttttttcttgaaggatc

SEQ ID NO: 480 - DNA, 83544 bp, Arabidopsis thaliana
aagcttcctctgccactaaatcacaaaggctttgacaaaaaatattgaataacattttatttacggtgaattatgttcattaaatacttacgatttaatttatgacaatagataaataaaaaacaaaaccttttttacggttttccatttttaacgtgaaagtaaccgaacatataaactataacgaatacatttaaattttgaatggtaacagttttttttttttaatacgaaatttagattttgagagttttaaatttcaaaaataagaagaatttgagaattttgcaaatttctaaaaaaaaatgagcttttgaaactgttaattaaaatgtttttcatttagtcttttctctttttctatcagtacaatccaaaaaacggaaaaccaaaatgtatagtataatctaaaaacactcaaatattcatggccttactcttaaagccttaatatgtagcattaaaattatgaataaaactcttcgatctgattattttaatatccgtgcttttcatagttctgattacatgcacattctaaaaaataggctattacaggattggacacattttgaatcagaaatttgaaaaaggaacaatccatttgggcttatataattaggtatttataatagtttaactgacagttttacctctctgaaaactcaattcacgatctcaaccagttcatcattaacaagtcccagttgctttgcttcgctgcgatcgcttcgtcaacgccgtctacgtcaactccaaaaccatctccgtcaactccaatttcatcaacattgtttcctttttctacgattcgaaaaatatcttcgtcgccaatatggtaaactcaatgaatccaattaaatttgttttgatgaaaggaatctaaactctaaaattatatatagggaaccaaaagatctaatcatagacacatattgaatcaattgaaaattaatatggaaatctaaattattttaagttttaagctagaaagggtaaagagttaatctgagactttgagcctcactgtgctagcttcagtgagagacaaagtgggtgttcttgggtgtgaggagcaaaagtaattgagaaaaaatgaataatcgtggcttgcttagagtgttgcagcttgtttgcaacaatgcgaagaggaaaatataaaataagaagaaattcagtatgaaaagtgaaaaagaatgaaatcgtaaaaagaaaagagatagaaatatctaattttgtgagacatataaaatatgcttttttcgataaaaggataattgtgatttattcataattgatccgagaggtaattaagtacatatagttaatgaaatggtcattcccgtcttaaaacttttaaccggtcatcaaaattcattgaccaccatacggtaatcttttttttttttttggacaaatcatacggtaatctatataacacttattcataagattctccataaggtactctttttgcaaaacttacatagatatccaaatggacacttaaattcaaacaaatgaaaaaaaatccttacaacatttaaatcagtaacggagtgatcaatactatatattcagatttgagaaattgaatgattgaaatatatgagatatcagtacaacgttgagtggccccttttaaagaacaagtatcaatgaccctagcacccaagaattggtactacaaaatctttagtgggtccaataattgtttataccacaccacaaatttcatatatctactgttactacttatatcatatagcttggaggcataacttacattttctagtcacatccatcacacacaatttcagaatataacacaccaatgtaccgtattatgtaaaactttaattctttcgaattgagctttatgtgaaactgaaaacacgaggtagatttataaatcggtaaaaagaaagaaaagaaacggaatctgtaagagagccagtattcttattatatatttaggggtgcgattaataacttttgagttgaagttgggcaaaactgaaaatatggtaatgttaagggtgggatctgatgagttgctgggaagaacacatgcatgagttgtttgggctttaaaatcacttcaaataattgtctgttttgtagggcacaatgtctcctttgttaggtgtaatcaaacctccttccatagacagcttgtgtaaaaattataatgtcctaatatttagttcccataattcttgattgtaaatattaatacaaatagacgaaatatatatatatatatatatattcatattaatataaacaattttaaattattatatacatattcaccagcctcgctattattctctttcagacacaataatcgaggaatctccatagattctattctccgacgccggcgaagccctcccctgccgacgtcgggacataagtcaccatatcttccctcgttctcgatctcgtgttcatgctatctttttagataaactttttttttaatctctttaaagcttttcgatctttctcgatccacatgtatctcccaagcagatggccagcgatgtccatctatcacgccctactcgaatcttcttccctgacatcataccctttgcccctcttgaccccgatttccctcactggagaatccaaactcccatggtcttctacatgtgccttgaatcccgaatcaacccctcagtcaccgccttttcgttcaccggagatgcttgagccaccgcgaaacccatcagcatctaggccttgtcatttagatttcggatcggattcggtttggattatttcggattcggataattcggatgagagagttattatcagttcggattatatgactattcggttcggttttggtttggattgtgtcggattcagatcggtttcggatcagtttttgagaattttttaataaaaatcgttgggttttattaaaatttgttttttttttgcaaaatattgtataattataacaaatataacaaaaaaattttcagatatcaagattatttcggatattttttgctatttagtatttttgagtataaattataactaaatataactaatatttttatatatataattttattttggattagcggatattctttcggttttcggtttggattggattcggttcggataattcgggtaggagaattcattattcgttcgaattttgtgactattcagttcggtttcgaagtcgaatttttcagatcgatttttggattttgaattttatgcccagccctaagcatctcagtacggccgccgctctcagatccgtaatttgccaacctaagtgaaattaggttctcacttggtgggtttacaaatttcggtccaataagatgtctagagcctaacttcatttgttgtgacccaaagcatattcagcaaatattcaggtctgatctaaactcatcttttcccaatcttagtcaatctttgttttgcttcgtgataccgattgagaaaggatatcaattaagacataagccgccatcgttaatagttaggtataaggattttttgagaaccatgccatcagttacaactaggaatatgattcacgaaatcattgcgtttgaaaccaaaagattgtaggaactcggtattatgataaagtctctactgaagcttccctaaccctttttattcggtgtccttgaaccaacacctacgaatggtggatcttccggaatttattttttaaagtgagctttttcttaagatatttggacaagatcatggatatttggcaaattaaaagtttgaagaagaacaacattatgatcccgtctccaaggagaggtggttaccgaaacttctacaccttttttgtttgctaacctcctccatggagccctttttcaaaggcttttatgcgttattcatgcaagccgtctatgaccactcgttggtcgaggatttcgtaaagttcgtcttcatggtcgaatctccaagagttcaacagattttttaaactttgcaaactttttattggtgaacatattcttgaaaaactcatgaagcttttatctttatttcttttatattattttagcttcaatttgtatgaacttccctcgtttgaggttttatatatatataaaaactacgggattatttttatttaaaactttaccattttaaaataatagcaatgtttttgtgaatagtgcacacgaataattcagtaatgtcattcattttaagtaagagtttatgacacaaatcttaatgggtccgaaatatttcagagagtagttcttccaaatcaataagtcagcttgtccatgatgtgtctacaataattagacatctaagtatgtgaaggctaatcgttagtttactcaaaacattcttccttttcttaaaaagatttcaatttaaaatctaaagtaatctttgaaactagaagcttgcactaaaccaaagtgaatcaaagaaacagaactttgaaaaatagtaaaatgtcaatggctcaactagtaaagtaactcatctacaaagtttagagattgctggttcgactataacatttagaaagaaaccatataagaggttgtagttctcaatctcagaagatgtacaaatctagattcaaaatcccttatttattcaaaaaaagaaaaaaaaaaacttttaaaaataattcaaattattgattaaagaaatattcaaaaaccggctgaaactattttttctaaaacaatttccataacgtagaaagtcaaaaactcaacgatcaacaatgagtgttgttttgatatttactgccgctaagaaccataaataagatgaaaaaggaaaatgcaagaatattttgaagaaaacaagaatcacaatatgttggttaatcacaaatccaattttgtatctaataggaaaaatatataaataaagaaaaaatgaagatggaaaaagtaaacaaaaaattgcataaacatatttttaagaaatggttaggaatgcccttctaaagattatcttctttaatattaccctcccatttttatcgataccttttttaattattaatgatcattttgcccttatttaaaaaatatttaactcaacaaaataagagttaggccgagcacaaggcaagtacttgctattttacaagtacttgtaacccgctttgactcgtacgagtaattaacatttgagcttgatacttgactcgtttgagcaagtatttgctataacaagtactcgtccaaaattttgttacttgcaagtaacttgacccgggtagttggcttgttacttgcaagctacttgttacttgaagtctcatatatattacagaacatgagttctaaacatcacaaaacattaaagttctaaacatcttaaaaccacaacacattaaaagttctaaaagataagcatcttggttcaaattgaaatcgttcttatctaattatctttcttcttgagttcttgaatctcttttttgcctataaataaaaccaacataacaaatgcatgtattagtgttacgctttaaaaccaaacttgaaaatcacgaagtactcccataccttttattcttcctccaaactcaaacccactccttgcaccaaatttctataagaaattgaagttacaaattctgttaaattaacataaaaattgtaagggttgggctgctggattttacttttaggttcaaaactaaagagaagggttgggctgctgggttttatttttgggtttatggttttgtgggctttacaaaattgctatttggctttatggttttatgggttttacaaaattgatacaaaaactataactctaagtataattagcaagtattaagtaacaagtaacagggcaagttttttttttttttatgatacttgatacttgacttgcacttgcaagtaatagaattatcatacttgatatttgacttgcacttgcaagtaatagaattgtcatacttgctattttgacttgtctataacgagtacttgaattttcaaggcaagtacgagtcgagtagcgagtattaggcgagtaacaggtacttgtgctcaatggattttcccgccaaaaacttcccaacaatatttttcgcaccaaaaaaaattcgaaaataattttcccgccaaaactatttccgacaaatatttccgtcaaaacaaattcagtaaaaaaaaatttagtcaatttgttttgtaaaaacaattctctttaaaaatatttttgacgggaaatagatttacaaagaattttaaaaactttttaagagatttacaagaattttaaaaggggtttaaaagaatttacaagagtttaaaaggatttataagggttttaaaatgattttataatggtttaaaaaagtttacaagggttactaaaaaaatttaaaatcctttaaaaactcttataaatctattaaaatccttttataaagctgtagaagagttcttaaagggtatcaaaagatttacaaagggttttaaagagttttaaaaggataatcaaaagtttataaagactttataagggatgaaaactcttgtaaatccttttacaacctttatatggcttttaaacaatttacaagaattttaaaatatttataaaagttttttaagagttttaaaagactttataagagttttaaaaaactttacaaagatttacaagtgttttaatgacttttacaaaggtttaaaaaaaaaatacaatgattttataagagtttttaaaagatttacaaatattttaaaaagattttataaggtttaaaaaaaaattaacaaagattttttaaaattcatattcatgcgaaattgttttggagggaaaatataaattttggcagaaaaatttgaaaacctgaaattatttgccgccaacatagatttgactttctcattatgttcggttgttcactcaacaaaagaagaataatttactcatttaacacatatataaaagaagaattatttagtcatttacctacatgaaaagacattattgcaaagaaacatgaaaaaggtatttgtacaaatccccttattcttatacaaattggcttaaagatgaacaaataaaacaaatgagcctacattaccgaatatgggtcttggacccattaaaatttccccctttgcattcgaattatttaattttccgctaaataagttcaaacgagacatcggaaactaaccgaagagaagaatccaacgccggtagtcattccacaatcggaaactaaagttaacaccgagtggaccggagagtagtaatggaggaagatgatgaaccaatggcaccgaatccgagtctgactagagaaaatctggaatttcgagactttacattaaatttttatgaaatatcaaagaaattatatcccacacatttgtaacaaatattataacacattttctgtatcagagagaaaatagatgagagtaataaggagttaaaggaacttgagtctgtgcatgtaaagcataagaagagacaagaggttagttagaaacccatatgtgttctgctttcatgctcagggctgacgtgcttaatactatttttttttctctccaaagtttctacaaatgttgaatcactagtcttcctttgcgatgattaggttcttgataggacgttaagcacatgaaggacttgaaaaacgtgaagcaaaaaatcaagaaactcgaggataaacttggaaagccttgacagatgctcagaaacagagagctctctgataaaggaagaaaaagctgcagcaaccacctctatgaaagcatgaagcaacgaagctcggaaagtggaaaaggtacttttattaggatatggctgtaatatatgcagcttagatggtgaaactgaaagtatgcatcttaacttgttggaattgagaatcctagattaaatcctgcaagaagtaaagcttggttgtgaagaacagaagaagcatcgtaagaagaagacgatgtcgatgtcggagaagagacatcatgacgagaagggtcaacgaaaagattcattgtagcacaatggttaaaattgaggatcattttttggtaaagaccctaggcgaagcttagaggtcgccggttcgagtgacggttggaacaaaactaatattacatgctgtggtttcgggtctggagtgattacgggattcggcctagaacctcctggtatttcaaaaaaaagaagagaagtgtaaatgggctgcagatggattaagggcccaaatgaagaatgtgtttcttgtggcctgcaagtaaaaaggcctaacaagttaagtgtgttttgttgtaaagtatctaaggaactagtgatgttaaagtgttgttgttagagtcccaatgagtagtgtggctacactcaaagtaggaggcttgtgtaagagttcctagaactaggagtatggactaatgtgtaagaattatgattatctaagtgcaagtgtgtcaagtagaagtagtatatgtatgtgttgtgttgtgtcttgtaaaatatcgaagtttattatcaatgtaaacaataaagtgtttaaacgtgttcatgtactttctgttttaacaagaacaaagaagaggttgtgagaaaaacagagattttgtggcgagaattacaacataacttctgcaggaatcacttaaagaacaagaaacatgtattccacaagagcaggcagccagacaaaaggttgctgagctcaaatcagcttattaggcaacgcgcattgcatatggtgggaacagagaaattcgaagagttagttgtgactctggatggtgctctctttgaaaaatatggtaccatgagtggagacagtatcgagctctccaacattgttgacatgttaagcaatatccgtgaaaagattcccaatgctgtgagacagtatcgagctgcagagaacaaagtctctcacctagagatgggattggcgaaagccaaagagaggtattggttatgatgtggttctacttttgtttttgactaatctcatattgtcaaaatccatgttatacacattttagttaacataaaaaattggtacacctacttttctcgtattttcaaaccaataaaacttcttttggactaaaatcaaacttgttcttaagaagacaaaatgcaccaaacataaaatgcattattctcaaatactcaaaaacaaagcctttcttattttgtctttgaaagtaaagacccttttattagcagcaccttgatatatgaaacaagaagacataaaagatagataaaacgcaaacaacttcttcaagccgaagccggagaagaatcatcttgtacaaacttctcaaactcttccctacttctcccattcggattcttcttccactccatgaatttcgtcgccgcctctataaatttctccatatgaagcctcttccattcctaccaaaatccacacacacatttcaccaaaacaaacctaaaacacacacaaaacttcttcatgaaaatcaagaaagaagattatcaaacctcgaaatcccattctccatacatattaggatcatccttgtttgcccatacaattgtttcaacttgcttcttctccaaagtatcctgatgaatcaaaagcttcattccttaagctaaccatcagatatcataatattgtgattagagaatattgaagtagtaacttacagtcaaaacaacttcaacagtcttcctcacatattcagttccttcaatcatatctaaactctctaactgagaatctgttaatccagttagtatctacaacaacaaaaacatcaaggttatattctaagatccaaaacacaaaatcaaagaagaaaccaataccttgccattgattaatccattgtcggaaggagaaatacatggatgcaaacgacctttaagtctatacaagtgactgcaaaaataaatcgaattgaatcaattcttgacgcttaaggaagataaagatcggagaagtgaagagacagagagacgtactagccgtggagttgagcggaaaccatgaccggagcacattcgagaattaaattaacaacggctggttcttggaaactgccgtagacgaagacgtcgtgcgatggagattgatcggagcttgtcattgtttttattttcactgtgaaattggagtttgtctgaaaaatgtgatgtatttattcttgttgtatagccatcgtttgttgacgattctcttccttcagacttttctcattggctttttgttataaaggccctgaatggatgctgtatttcgattcagtttttggatttagattttagtttatagattttagattttcgttttagatttttgatattatatttttgtttcaaaacccaaaaaaaagttagtttttggtttttgagaaaaataacgttaattaagtaaaaattaaattttctaaattttaggaaaactaaaaaactaaaatcatgaatggcaaactccaacaaaattgtttttctaaattgtagggaaaccaaaattttaaaatcttgaatggtataaaaataagtttttgaaaaacaaaaaccaaaaactcttacaaaatctacaaaacattcaaggccatagtttttcttgagataatttggtcctccctcctttttcttcttctttttttttttttttttttttttcaacttttgtcaaatgtataaagagattttttttatttagttttttcgtcgttaataaagtgttaacagattaattgtggtgtggccgtgtgggggaatgaggactgatttaattgtaaagaataagaaaagtgtatttttagagaccatttgttcttctcatgcccctactcctcaacggtttggaaagattttgcacatcgcctccttccatccaactactcgtcaaactggaccagctggccgcaatacttcataacacaagcattccttggctcaacctctttctgcttcgttatgtcttccaaactactctctaccatatctggtgtgagaggaatgcaagaagacacggtgagttaccctctcaattagctcaataaatcaaactaatcgacaaaaccgtctagaaccgtctcagctcaatccaagcctctaacgactatcattatgatgatggtctacggttttgaatctccacccgcatgacatctttaatccgactactctgtttctttcaaactttgtttctgatttttttctagttttaaacacaccgaagtattgattgtataaatgtttttttgttaaatataatattacaatagattaaattattgattatttaaagtaaatattatttaattaattaattaattgtgtcaaacagatgttattataatctcacagttctattcgaacaataatacataaataatgcaccaatcgcatacccgcccatcgagcggatccttatctagttaatatataatttaaactgatgtataatgtgtcaactactatatctgagaatgaagccacaaaggtccacttatagatagatacgatcttattataccatccgagtgaccttttttttgggatatctctagctaaagtgttattattatacagttaataaaaatttggaaatgttatataaagttttataagtttgcatatacatttttaggcctataagttcaggttagattatggttttagagttttggcttggagggtccatacatgtattttatatatgcgggtcaggtttggttttggttactttggttcgggtacccgaaatatcaaaaaagttggttagatttgaaaaaactttggttaatttttggattttttttggttattttaagtattttagtaattttgatttatatataatatttgatatatttggatttataataataatttttggctacatccagtctatagtaattatatttcgggttcagtttggttattcagacatttattagtgttttgatttttcatattgttgtcaaaattatctgagtaaattttgtataaattcaaaattaatcttttatacacaatgaaagaagtatagatttaaatataagcaaacaaataaataaacaatgatgtgagtaaacaaaaaatgaaagaagcaataaaacaagtagaataagcacagaagtaaagaaacaaagaatcaaagaaggaaacatgtaaaagagctaagccatgaatgaataagcgaatgccaaataatcaaagaaataaagaaactgacaataagtaaacaagtgaattgcatgtatggtcggtctcagcaaacaatgaagggaataagaaggaagcaaacacacaaattaagaaatgaaatgaagcaatatggagttagcaacgatcaaataatcaaagaaacgtacaaacaagaagtaaacaagttaaagatgtaagtaaacagagagaacaaaaaacaagcaagctagttaagaaatcaaataagtaaaagaagcaaagaagaaagcaagtaaacaatgtaagtaaataagcaatcaatgaatcaagaaagcaaatatgcatagattcatgcaggaatgtaagcatgcatgaatgtatgcatgcatgtatttatgaatgtatggatgtatgtatttatgaatgcatggatgtatgaatgtatggatgtatgaatgtatgaatgcatgaatgtatgcacatatgaatgtatgcatggcacacatgactatcacgctatcaaagaggttgatctagattttcaaagttctagaagctgggtgttgaagcttcgaccgttaagaagactttatctcctttatcagcttgttactagctctgcttgatgattggaagagctagtcctcttattgatctcactggctcaaatggctagtgtctcttagattgttcctaatgccagttggacattgcagctagctgtttgctccgagcatgcttatctatgtcagccgcgagacactagtcttcccaatctgataaatttctttggaggaatcatttgatgctccaacaagtttgttctcaacgtctcttacgtgccaatctatataacatgtggcaaaataaattatctgttttaggatagtaaggttctcacaaaaacatctgaaacatgcttatctctgttttaggacaattaccttccaagagaccatcttcgccgatggggtggtttggtggttcttaccgtttttctcctttgtgacattgatttagaatgccgaactcacccagttttaacttttaagctatatgagaaaagtcgaaatactaaatctctacagaagaagatacctatagagattctttgagttaccttttcctgaaatcggtttcttactctggttcttgtcttttttctgtaactacatatgttcaacgaatgaagggattcattgatgtatatatggatatgcaataagctgataacaattatagctcgagcgtaacaatttgattaacctaccttgagctcattgtaggttgtgtgaagagagttgacgagtggattgtcaaacaatgtcaagcagcgatctgcatatttcacatcaacgttttggcatgtatcaaatagagtttatagcattcatttattcaatcacgatgcacatggattttaatttgaagactatcataggtagttaagtaggtttcttctgcttaccaaggttctataattctaatgtatgttgtgaacttggccgggggtgtgagatcttatgtggatttacctctctggagacatctgggtccaagtttcctttatacacttctttccactatctacctactatacacaggtaagcactgtaattaaacaaacatttagtgagattgtagtgagattggtgcacctcactcaccggttccctaatgtgagagagagtaggatatacctgaacgaaaaggcatggagaggactttgagataatgccaccgcatccagttagatcagtcgtattcaagatttttgatcatatcccatctccaaaacatttcaaagaagaacaactaacagaacataataaaagacataattgaatggtccaaaaattagtatagtgatcatgaagtcattgtaagattgatgtattctcacctttccagtagctacgacgaagttaagtcccctcaccatgacttcttttcaacctttgcatttgcatccaaaatttgaccagtgtgcctagtaagcgttcacaccaaagaagaaaacgctgagcaaaaacaacattgctgagtaaaccttaccatccacatcacattatatataggagtactttgttttgtcgaatcttaggccgtcccactttttcctgtctttcatggacattttggagtttgggcatatagatacctaaaattgaaaataacattctataggaaatcattaagaaagcttggataagaaatctcaattgttactaacaaagtattaggttggttatttacgatatagatgcaagattacttactgaatactgattaatagatgtgtatgtggcagaatctttgaagatggcctaaatagcttgtcaaaagtatttgttccttcctttacatatctcccatcctgaaaaagtctgagaaactggttataacaaataccctaagagaaagatgggtatagctatttccaatctgctactagtagttttactctgagcatgtttacctattcagctgccaaacactagctctttccactctgcttagtttctttggaggaattcacttgattctctgccaggtatgttctctatgtctcttacgcgacaaaacttacaacctatggcagaaactctaatttcggacaatttggttctcgcaaagagttctgaaacatattcatgatatgctacctttgagagacgtattcgttcatggggtttgttggttcctaccgcttgtgcgtaccaagaaaaaccgaagataagttaaaatagttataccttatctgattcacacggtatttagccttaaaaccttgtgtcagagaatccaagaagctggttgcaagtaacaccaagctctctaaccctgaacaattaaaactataaaaaaaaagaaaattagatacaaagagagaaagttaaagagaaaagtaccctttgagagtctccatctgtaatatctaaagcaaagtacacattttagtggaaaataaactgagataattagtcaaaaaatggcaagcgataaggtttaaaacaagttcagtagttaatctagtcattcacaaccactaatgaaggattcctcgaaaagttaagaaagacagtaaagaaacatggaaagcaagttaaccaaagaatttaagtatataaaaaaaagacagtatgaaagaaatcaagcatgtaagcaatgaaacaaggaagccaattaaccaaagaaataagggagaaaatacaaaggcaagcaagtaagcaaaagagtcaagcaaacaagctggtaactaagcaaggaagaaaaaataaaagaagaaagtaatcaagtaaggaatgaaagcagaaaataagtaagcgaaaggatcaaaaaatgaaccaagtatgcaagtgagaaaaaattatgaatgtgtacaagcaaatatgatgcatagatgtatgcatgtaacaaatacgtaaagacggaatcaaagaagaatataaggaatcgagttagcacacaagtaaccaaagaagaaagctgattagtaagcaaggaatgaagaagaacaaaaggaagcaaacaagcaagtatttaagtaaataaacagagtatcagacaaagaatcaaagaagcatgtatggatgcatgaatgtaagaatgcaagcatgtatggatgcatgaatgtatggatgcaaacatgtatggatgcatgaagtatgaatgcatgcgtgtatgtatgtatgaatgcatgaatgcaagcatgtatggatgcatgaatgtatgaatgcaggcgtgtatgtatgaatgaatgcatgcatgtgtatacgaataagtgcatgtaagtatacacattcttcaattgattgcgaatgttgaactctctgttttctgagttctaagaaacgccacattataggctctggaatttgcacctgtagaagaaacgtgacttaacatcatattcaaagaacaatatcaaaagatcaagcaggagaaaaagattgaatagatcaaatatctggaaaaaaccaaaggcactttgtgtttgttaacatacctaagattagagccgcttcctatgatgaaccatcatcttcttcttgttctcaggcaaagaagactcaaaacgatctgtaaaaaatagaaaagtaaaccaaaagaatcagaccaagaaccaaaccggatatgcagaacaaaatctataccaaatacagagcatcacaacaccacttgatctttgattcccattcacaaaatctaaacctaatataaatatctcaatctcgcgatcgtttacaaaaccaaatcaaacgaatcacaaaactatcgtagatggtattgaggaggaaataacaaaatcgatggaaacaaatcaaacaccaaaagattaacgcaccgatggaacaaattaagtaacataaagaaagaacgagagacgtagtaacaataatcaaacaagtaacagagaaacacaattcataaacagatcaattgggaattcggaattgcctctgtgaaatcctaaattcgagagtttgataactaacctgagaatcgataatcctagccgaagtgagtgatcgtcctttctggatcatatcgtcggtgaaccaagcaagatcgcctaaaaaaagcctctccagaaattttgcgaaaatgaaaatttagggttttctaaaaaattagagatatcagagagagatttgtaaaggtttttcttcttcttcaaacggtctaactccaatttgtttccgttatatagaaaaaattcaaaatttgaaaaatcaagattccaagactaagacccgtttcgaaaaattgaaattgaaattccagttgtgtacacgtcataattgtcatgtgcaacaagtttgagctaaaccgggattttaacattttggtttagtgtgaaggcctgaatgttttttggttaaagcttaaccactgtgatcccatgaacatatttagattcgttcggttttggttggagagctaatacttataactccatatatacatgagtaccttttgatgaagtaaacatccaaaaatacataaactaataaagatgatgaggcaatacgtagatcaccctgccttgatgaagaaagatgaaattctccaacacaagtctgagacaacactagaagaagaactactagaagttcactatttggagggtcttcagattgggtgtggggaaaacgatattatgatagtccgagaacacatcttaaaagtcctaaattacgctgaggactcaacattcgttatggtagttttggccatttgtttaggtgagcaaggtgtagcaacgtttttcgaactggtttcatgcaagatttagcttagtgatgacgatcctaatcaaacacagaaatgcttttaactcaaatacactaaaaatgatgaaacaacattcacatacaccacaatgctcacaaacaatatagatacaacaacatctttatgttccccaactcacaaagcctcttattgtcttcgaagattaagaccattttattcgcagtaaaagagagtgatcttttacaaatcttgatataaaagaagaagacatatcttgacaacttcttcaagccgcagtgggaggatcatcgaatacaaacttctcaaactcttccctacttctcccatccggattcttcttccactcgatgaatttcgtcgacgcctcgatgaatttatccatgtgaagccgtctccattcctaccaaaatccacacacacatttcactaaaaccccattaaagcaacacaacattcaagaagtaaggtttcaaacctcaaaatcccattctccatacaaattaggatcatccttgtttgcccatacataggtctcaacttgcttcttctccgaagtatcctgattaattaaaaagcttcaatctttaatcaaaccaacaaagatcataataatctgattagagaatgatttaaagaacaaacttacagtcaaaacaacttcaacagtcttcctcacatattcacttccttcaatcatatctaaattctctaactgagaatctgttaacccagttagtatctacaacaacaacaaaaacatcaaacccatttcttcagattctctcagatccaaactcaaaatcaaaacagaaacaaacccaaatatagaaacttttccttcattcaaatcaattaaaaccagaaacaaagtttccagatttggaaaccctaaattcttgattcaaaaccctaaattcccaaatcgaatttcaagagacgaaatcaaaaccttgccgttgattagtccattctcagaaggagagatacatgcatgtaagcgacctttgagtctatatacgtgactgcaaagaaaacacacagaaatcgaattgaatcaattcttgaagcttaagaaagataaagatcggagaagtgaagtgacagagagagacagagaaagagacgtactagccgtggagttgagcgggaaccatgaccggagaacattcgaggatcagattgacgacggatggttcttggaaactgccgtagacgaaaacgtcgtgcgacagagatttatcggagcttgtcattgtttttgagttcactgtgaaattggagttttgtctgaaaaatgtgatgtatttatttcttgttgtatagccaacgtttgttgactgtttcttactttggacttttaagaagaatcattagcttttttatttatttatttaatatgtctttctgtcaacatgcattattgattctttctttttcttcaattaattatcaaatgactcatagtgagaaaaaaacttttgttttgaagggtgaaaagtcaagaatgaagactaatcaactataataattccattcaatgtacatgaagcaattttcaagaaaacgatagtcactaagtatgtgttgatcattattgtctaatgcttaaaatgtttaattggttttaggcattttaagtgtttataaaataaaatgttataaaaaggatattatttaaaaaatatataaaatctcttctaaaatatatattaaatcgaaaataataatttgacaaaatactgtttaatttatgttgacatatatattaaaaattataattatgtatatgaagaaaaacttagttaattatttttttttaaaaacacactaaaataaaatatatgtttatttaggcgatcaagacgattgtttaaacattacctgagtttctaacacctagttgaagtaactaaaatatatttgtaatcataattgatttttgtataatttaaaattttccaaatatcttagtgagttatataagattttttaaaatttggattttcaaactttactatagtaacattgttttatgtttttttattttttttgtcgtctgaataattatattgatggttaaaatgttacacatacatcatacttcaatcttgacaaaaccaagatgagaagattaggaattagaagagaataatcctaatctaccaaaaaatatagccaaagaaagtggacagcggacaaaaggagaatccaggatcaagaggaggatctctcttcaacaaaaaggccattgagccagaatggatgtccagacgcaacataagagttgagtctaaagtctgagacaaccgattgagcaattaacgaggctcctctattggtttccacagtttctaacactaatttccagtccacaatcttctccaaaaaatagttaatttctgttacctgatgagtaaaggaaggccaagccttgggtcttcgaaaagctccaacaatatcctgagcttccaaagcaaaaacaactttacctaaatgaagagagtgcatgctgtcgatagcccaagtaaggcaattaagagttgcttcttttttatccttcacatcaaggaaagctctcctactgtgctgtaaaacgactcccgacgcatttctcacaacccatgaagctccagcgaaaccatgcttattagaccacctaagaccaatgttgcatttgacccaatcagtaggaggaggttcccattctttctttacctctaacctagagatcgattcttccacatcaaccgaagtagggatgagctgagaggtgaaccactcatccatatcttcatctattttaacaacagtctcggctggacagtaacttgccccttcgaaaaagaacttgtttctatttttccagagtctccagagaatccaaggaaaacatcttctgtttcttagcggtatctttccattcttctttatatcaaagagagattgaaaatttctgtaaacagactcctcactaaaaccgccttcagggaaaggaaacagaaagatagcccaaacctgtctcgctacaggacaagtgaacaaaacatgatttatggattcaccttcttgtccacacatttgacacctcgaatcaatcttcatgcctctagttaacagcaagtttgccaccggaagagccgagctgtgagctctccagaggaaaatcttgatttttggagcagattgaaccaaccagacttgctctttcaaggcatttaaagatggctggacaattgcatcaagaaaaacctggttattgggagatctgttagcaaaccaataacccgatttgactgagtaatctccacttttagtatgctcccaacaatggaaatcatcttttgagaccacaggcttctttgagagaataagctgaacatcattgggatagaaaagctcctccaatatgtctctatcccatcctctagcctccacatcgatgagatcctttaccattaaatcaatattaatgatcgggttcttgataagaggagctctcaacccattgtcgtaaatccaagagtcaatccaaacattcagagatttcccatttccaaccattttcctcagccctttgcacaacaactctctaccatgtaaaatgcttctccatgcataagagggtcttgaggtgatgttagcattcaggaagtcatcccactgaaagtatctgctcttcattaagcgagcaaaaaggcaatccggattctgaagaatacgccaggtctgtttagcaagtaaagcttgattgaaaacttcaatgtctctgaaccctaacccaccttcagcctttgataaacacaatctctcccagctcacccaaaccattttccgtttgtgttctaaagcactccaccagaaatcactcattgcgcttgttaagtttgcacaagtcgttttagttaacttaaagcaggacatagcgtaaacaggcatagccaatgccactgctttaagtagaacttctttaccacccatggacaaagaccttgcaaaccaaccagacaatctagccttcaacttgtccttaatatagtcaagaagctggattttcgagccactaaagcattccgggagacctagataggtacctgctccgccttcattcatgattcccatctttgttttgataagaagctgcagaacagaattaactttggagccaaaagataaagaagacttatccaagttgactctctgacccgtagcatccccatactcctttaggatctgttgcagcgtgttaatctgatcctcttatgctttgcaaaggaaaaggctgtcatcagcaaaaagaagatgatgtactgctggaccttcttcagagaattggatcctgtttatcagaccattactttctgctctattcattaggtgagtgagaccttcagaacatagaacaaagagaaaaagtgatagggggtctccttgcctcagacctctacttggtttaatcattccaaaagcttgatcattgatgagaaccgagaaagtaaccgatgtaacacagaacataatccaggatatccattgaggagcaaaacccaaagcagaaagcaacgcttgaaggtaagaccattccaccctgtcaaaagcttttgacatgtctgactttaaggcgagaaactctgaagatattcttgggtgagtgcgcagaccgtgaatcagctcatgagctatcagaatattatctgatattaatctttcttcaacaaaggctgattgattaggtgaaactatctctcccagcaaaggctgcagtcttttgactaagactttggaaatgatcttgtagaggacagaacaaagactgattggtctaagatcagccatcttctcaggattaaccttcttctgaagcagacacaactgagtgtaattccattcaaccggaaaggaaccagagatgaaaaagtctttgacctcctttgtaacctgctcaccaatcagaggccaatatttttggaagaaaagaccagtaaaaccatcagctcctggagcacttgaaggtctaatactgaaaaccgcctcttttatttcctcagaagttacctccttggtaagaatttcattcatcgaagacgagattcttggttggaagtcatggaagatctcctggaaattacccggattagatgaagtaaaaagatctctaaagtaagcttcagccactgctcctttagacgcctctcctttttgtttgtttccattcacatccaaaagataatcaattctctgcttccctcttctagccttaacagaattatggaaaaactgagagtttttatccccttcattcatccattgatctctgcttcttgttctccagtaagtttcttcctctctgtgtgcttcacataactcttctcttatctcagcaagaattgtaaatcttgggaaatctgaagattgttcggcctctaaatccacttgagcctgagtaattcgtgtgagagagttaaggttgttttctcttttccacttactcagactttttctgcaactccttagcttatcagaaacctttgagatccttcttgtagagttagcactccaagcttgctgaatagcttccttaataagaggtttgttcaaaaagcgtctatcaaatctgaaattacccctgtaggcatctttagtagtagaaagcctcaccaaaactggtttatgatccgagcctcttttatcaaggaaacattggttagagatggggaatttaaccagccagttcttgtttccgaaacaacgatccagcttgctttgaatccacatattacttctcttgcctccctaagtgaaggcattgcctgagctaggcaactcttccatatcacagttgctcagcatgtctttgaaaggccgaaaagaagcatctcccctgcgaggaccaccaatcttttccccattgtgaagaatggcattaaagtctcctagcatacaccacgcttcagttctggtcaaaccgatccttgatagtctatcccatagaaggggtcttgaactataagaaggatctccatacacacaagaaacaaaaaaatctacttcaccaaattgtacactaaagtccaaaaggttcttatcatagtacttgaaatcaatatttacacccttcttccaaaagagagccaaaccaccacttaaaccaaccggatttactgtaaacaccctatcatacccaaaccactcttgtaagtacaccaaaacattgctacaattcttcgtctccataagaaataggacctccgggaaatgttctttacgcatttccttgagcctcggaatcgtcaagtcatgtgcacggcccaagccttgacaattccaactcatgatgctcattaacaattggacggtccctcatttaggaccacctcatgtgtgttgcactttgcaactttggatggaacttcagcctcatcagtagcttttcttttgcctcctccatcagccacagtgacagaaggaacttgttgaatggagccagttgctgggaaaccttttgtccttctacttttgtatggacgttttctaatttttccattctttaagagagccccggaagaaggaccaacctcattgacgccagccttaaaagccgttgtgctccctatagagaatgaagaaaccgtacctttatccaaaaaagctcgtaagtccggaagcggaaccatagtcttacacagaggagcagcctgctccaaagatggaaagagagcttccagaagtagaggagactgagtgaccggcgcaagttgtgaagcttgaactggagatccatacccgaaaacaatgcctttccctttgtcaatatcagttgaaaccaaagggtaaggttcaagtctcaacattgttttttgaccaatcaggtcatttgcgagatcacttagagatttcttgattctggattcccgaactaatctctcttctcctgaggcaacgagcaggtattgtctcattccttcaatgacctttttagctattcgttctcttccagttgttggatcaataccaacttgactttcatcaattactccaaaaagaggatctgtctctttgataatcctttctttaggtaaagttgaccttttgcctttctgctttgtagccaatcttttgtcttcgacgtctttagcttttagagggcaggcctcttgctcatgtgtaagccgctgacagaaatagcatctttttttaatcctttcaaagtaataaaggatattcaccataccctccttgaaattaatcttctttgagcgacgaacaggtttggagacatcgaatttgaccttcacacgaacatattccgtaatctgagacttggacggatcgaaagccacttcaacaacttgtccaacgaattctcccaacatagtaatcgttgggatagtgtagtggttaaccggaatattccttatttggacccatacttctatgaattggaggtagtcagccggagggttctcaacccaacgctctatggctaaagtccactcattgaaggtatgaacaccctttgctagaattcccaacagatcttactcgtaagagaaaatgaactgaaacctctcattagaaagcgcaattcctcttaccctctcactgatttgccatttcctgggaagattctggatgagattggacatcttctgactgtttgggttcagaacacgacccaccaaactcaacacattcttctcactagaacagaattcaggtaaatccggcatcgtaaacggctcatcctcctcctctaaggacattgccattaaagcccgatcgatgctagctgacatagtaacggatcttgaaacttcgagaaaaacagcgagaaacagtttaaaacaaaccctagctgatgaagagaaacggcttagcttttgaagattaaactgaaagtaggttaaagatacggctaagaggaaagaaacaccacgactaaagctctattccacttagaagcgaatactctaagagagaaagaaggtcttaagcccaaaagagggaagctgaaaattttcaaaagagggaagctggtcagttttatgttttcttatataaaatctataatattagtaggctttatgataaattgttactacaaccactccgaagcaactattgcccgcaaacgcacctgtttccaactgaaatcagaaaaagtgccaacaagatatccataacaacacaaacaaaatcacatagaagactctgtttcaagttccaacaacacattattcaaaacccactctttacttactcacttactctcttctgctaagattagccaagctcatcaagaattaatcccctgacgataataatgatcctacagcctcctccatgctcttcccatttggattcttgttccattccaacatttttctaaaagtctccacgaatttctccgcgtgaaccactctccattcctacacacacacacacacaaaactgcttaaataccacgacgatatcccgagattagactaggtcccggatccaaacattaactacctacaaacaaattggtaaaaaacgaagtcgatataacaatcattcgaatcctcaaacaacgacttcaatatggttagccactataaaatgctttaaacaacaaaataaactaacattcccagatcatactacaatttcatcatccattaacaaaaagaaccaacctcgaaatcccattctccatacattctaggatcatctttattaacccaaacataagtttcaactttcaccttctcagaattatcctgcgaatatcacaagaatctcaaaattcccaaaataacatcacattgtaattaaataaataaaaacaaagatcttattacaaaacacaaactacttaccattcttacaacttcaacagttactctctcataatcattaccttcaatcacatcgaaattatttaactcagcatcagacactccagttataaccttcaccaaaaacccaattcgatttattcaataaaaaacaaataaaacccaattttcacaaatcaaaacaaatcagaaacaaaaaagtcaaacctttccgttgacttttccagaatcagaagaaacaatacatggatatggaagtcctttgagtttatatctgtgactgttaaaaacccataaatcttttgttaatctccgattgaataaacgatcatcgagagggtgagagagcgtactagccatggagaacggcggggactgtatcggctgtgcgatccaggatcacggcggcgacggcgggttctagaatgctaccgtagacgaagacgttgtgagattgaggatcagagctggtcatctttttcttcttctgattttgatttgttaaattggaaactaatgaaagtgattgagattcctatttctaaactttaatcaatgagtcactcctccactaaccttatcagaaaaataaactttgatatactttttgtatttctaattttatactttagtcataaaattaagtaatatgaacaatgatgatataaggttataaaaataaattaatacgaataattaggtcggtatccgtgctacacacgatatctttggtttaattaatcatcaaatatcagttctgtatattccacaaaaactatactatattttcattatatgtaatatgtagttgtatatcatgtattattggtatcaactaaatatatttagtctcgtcaaaccatattttatttagtatatgtagtttcctcggtttgtagcatggaaaatatatgtgtatagttggtatgtacgtttggaaacgtaattatatattttgtatatgtaggtgtaaacatagtagttttgtacgttttcgtgtatgtcattaagatgtaagttattggaaaatatatttcttcaaacttcaaactcataattaaaaaaaaaacgaaaaaaatatgaataggttggtatgctatatataaagaaaatataatttgctaaattttatctagaagcaaatatatttagtgaaatagaaatataattacttttgcttaaaaagatccaactcagtctatgtgggatcaacgaagacttgtgaaacatcaaaagaattgaaaacactcctactatctgttttataaataaaagaacatattttaaaaaacaatatatatgtagtaacacgtaacaatataattatcgttgtagagattgatcttcgcaaatcggattaagcaaaccacaataccatcggttgactcctggcaagtttggtcaacgatctcagcatacttcccccaaagtgtacatgccaaccgagtgtcacttaaatgaaaataataaatttattagtaaaaaagtaaataaataataaacatctaaataaaaaggaatatgaatatagattctttgtactgctaatctctcaaatggaaatcgatttttttagtggacttgttgttagcgttaagatctttgatttcagaccgatcgacaacctgacccattacatctgtatagacaaagagaataaatatatgaatatattgactatataagagataatgcatgtatgttcaaaagtaaaatgaaaacttgaagctaaccatgcaagatatttgagttagcggatccagagaggatcacgtcaaacttagcaagtgagagaaacaaagcatcgaaaacggtatcacatggagagaccgtggttttgaaaacaaaaccaattttgtatttcaagtcagaaatacgatactggccacttgtatgatttagagtgatggttgtaatgatcttccaaacaccctcggttaagcacctttcaatcttctcgatctgctctcttctcacaggagcatacatcttatcaccctatatgacaaaaataaatgaataataattaatatatgaaaatgatgattgaacacactataaggctggaccaaatatactgtttaaactataaaacgtacaacttcattaactaaaatcatttcgatggattcaccaacctttacagaatattgcctccaaacatgaagcaatttaacctgaatacgccaagcgttcttgtaaggcttgagcgatttcaagggagtaaatggaagaggattggcgagcatcatttaaaaaaaaatcaaaactagatatgaagctgtatgagtctaagatgagtgagtagattgaaatgaggcgtccgatatttataagaataagtggttaggtcaaaaaaatatgcgcaaaagatattattcgtgtggaattcaagtttattccatatcacaaatctcataattatagcaaaatgtttagcattttccgtaaaagtggatgtatatagggaatacttgtggaaaatgtaagataattccaaaagaagatccaaacgaaatattagatgtgctataattatggagaagtgatatatttgaaggcagaaaacgaagatacgcaataaattgaatgaaattaatacgattcgtttcctgaaatatagtcggatgaatttatgcatgaaactacaaaattggacggctggtaataaatctattcaatggccacgattaaacggagaatcccatttttttaaaacaggataaaaagaaccgtgttttcttttgagaaatacgaaattcgaaaggctaaaaacaattcaattcaatggccaggattagaggcgagtacccgattttttaaaaccgggtaaaatgatccgcatgtttttttaagtgaagccgcgaaatcgaacggagaaaaatagtttaattgaatggccaagattataacgtatgatccattatttttaaaaacgggtcaaaaggatccgcgtgtttttaagtgaagccgcgaaatcgaacggatgaaaacaattcaattgaatggccaagattataaagtatgacccagtattttaaaacccgggtcaaaaggatccgcgtattttttaagtgaaaacgcgaaatcgaacggctaaaaacaatttaattgaatggccaagattaaaagttatgacccatttgtttaaaaggcgagttaaaaggatccgcgcgtttctaaacgagttatttttatgatactaaacttttaaacttatggtaaagttgtaattttagcgaaatccatgcccaattcactaaacgtacgtctcaaataatagagtagatgatatgatataataatgttaaataaaattaataatgtttttgattttttatataaaaaattagaatacaactttcatggttctcttgggttcctgttcttcggaaacgtcctttttctttgttaatgaatggacgtaaattgttcgatcgataatcttctttaacttaaaagataacaaactcaatctagttaatacgcgtttaagtggatggttacaaaatcaaaatatgttctttatatctaaaagataacaaactcaaaaacttcattagcaagtctagagctgtcaaatggtccgtccagggaccattgggcgtgtacgtacagacaatttttttttatgggccaagttggacggtccatggacaatggtccaaaaaatgtccatgcccaataaagaccatgtttatatagaaagtctatggtcagcccattttattattgttattattgataaatcataaatcataatttttaagaaaaattgagaaattacatttttctgcaaaaattgtaaaaatcggagacttgcctttttccgccaaaacggtaaaatcgcaccgatacaaaaaataacgatttaaggggaaaattgttgcaagtcacgactgttcaccattctctgtttcttcttcttcatcattatctttaggactttcagctgtaggcagaggaggtagcaaatccttcacaagctctaatatcccatctgtgtcgatttctcgatcatcaaggttctctatgatctacaagagagtcacaatcaacaaatgttataaaccatgaagaagagaagttaaatgcagtgatataaatggtagtgtataagctagaaacaacaaacaaaccggtaacagttcgactatagaagaaggccagagattgatgatattgagaatctcagctttagcgagtttgaaatctttacacttgtctgcggatttgttaacgctctctcgtgtttgagtggaagcagcagtctccaccaaataatcatagacctataaatagatcattccaattagcaaaaaaaactctaagaccaagtcagaagataactattgcaggcaaaagaaccttgtattctgatctagcaattggagcaataactcttgtagtatcttttgaagcacctcttgagtttaagaagtcaagcaactcgaaattggtaagtgctcctgcatttgccttcattctgcaaataaccacaccaaattttgactacaaaaacagagaaggaaatcgaacaaaaacataatgaaagatggattatacattttcatctcttaggttgagcagagagactttaaaccaaaaagaagctttttccttcaattaaacgaagtcgtttttacaatatgggaagagaacaacactaaggatactccaaaatcagagtttttgctcctgaaaaattcaaagggaacatcaacatcaaggaacagatgatttctcgttcccacaaatcatgatgcaatgggaacatcaacatcaataacgtttactaatcaagattatcatgaaataatcatcactttcagtgtcttcatataaaacaattcatccaagtcagacacatatgtagaataatcctaatgctttcagcttaactaaacttaaataagctaatacacatcacaaaactatacaattcagataaaaagcattgtttaatgtacgagcaaaagcatcaacctttcagataaaaagcatcaatccgatgaaacccaaaaaccaaaagttgaaggatcatactcatcgatcaatgatcagtaatgaatggtatcaaaatccaatgatcataaaagaaaatttcaaaagaaaacaaaaaacagaggaatcgatgagcacctttgtgatagagacctgagaaaatccaatacaaaaactgagcctattcatttcagaatctctttggagtccaaaatccatatcaaaagtgatgaatcttagctctatggaatcaaattcagatttcaacacaaagggtctctacatacctgaaagggggaatctttcgaccaagatattgatgtgcttcaattcatgaagaccctaagaacaagcaaagaagatgtgagacctcaatctattagtgtatatagagtctctgttgtaattagagtcttagtgagtcattgtgaactggtattttgtataaaccagtgtagatagtgttggtttagttcggtttaatggctatggtttaggcctcttacaattgtatataaaccctcaattgtatcttttatcaaattaatgagaatgacattaacttggtaatatgatccattaaccgataaagctagcaagctctcctctgatccaaaaagctaagattgtttcagaaacactaagaacactaagattgtttcagaaattcacctcggaccaaaaaggataaacacgcaacacgatgatgatgattgttgctcgtacaactcggaatcggtagcgagttcgaaaactaaacggggctccggttcgtgacccgtctcgatgatgagtccaaccttccgatggcgattctgaagccgcaacagagaggagacaaaaagaggcgatttctgaggaaactaatttttaatgaaactgggccacccaattgtccgtatgggcgcccattatgtctgcggacaaaattggtcaataaactacatgacccgttttatttatgggctgaccacggactgcccataatgttttggattgggcttagcccatagtcggatgaccatttgacagctctaactatatctatttcatcagctcaaaccgtgaacaatgcacatccagacaataacgttcttgtcgaatatgacccgtcacgttccattcctccaccaccaccgagcaagatctacaaagttggtgactccaagggatggagtgtttctcaagagagtgatttttatttcaagtgggcagaggaaagacactttgatattggagataatctttttttttaatgcggcaacgacatcttagagatcagccgagaccttgaattcatatcatgcgacccaacttctcccgtggcgatgcacaagacagggcatgatcttgtgaagctcaccaaaccaggagtccactacttcattacctcaatgacaagtcaatccgaggcacgaacttttttttttttttttgttgttgttgatatactttatcggctgatccggtaagcctcggtaggaacgcaccgaggcgctataaagtggacttctctcgatccagatagaattgagccaccacactgcctggtccgagtttggaatgccttctgtctaatgcgaggccggacttaagctacaagtcgtggtcgggccactcaccaaggctgtaagccgataactgtccccaatgttccaacaacgaagatggaattgtcacttatggaccgcttcaacagatggttacacacctacaggcctcaatctcatcactaagcattcgctttctgtttggcttgagatttagctatttaaagcctctttctcttgttaacgtttttaatacttttgtttcgaatgtatttttttctttccccatagttgtagagttggtttgattcaatcagtattacatctggtttccgattccttaaaacataattgaagcataaacatgtatgaacatcagtaattaatatcccaatgacttaggcactgaatttgttctttttttttccgatatatatagtatctttattgctatatgggaaccaattcatagtgtttaccataataatgtgaaagaatgtcatcttaagattcatgttctaagccttcaacaacattgaaaccaaatttataatgttgcattgagaagctttacaaaagaaaacattaagtaaagtgtaacgcaagactgaaataagaaagattttgatggaaataaaaaaccaaccactcaaatgtttccaacacttcgatagagctagaaattgcaatgtaagtacctaaaaggaagaacttttatgaattgaagttaacactttttggggtattaaaaaaacttcatttaggacaacacaaccctcataattctcaaaacatttatacactaccaattatatctcgaagtgcaatgtaagtacctattaccccaacaaaaacactcatcactaccattccaaacaacattatagtctcacacccaattttcttgtagtttccaaagatcttcaagtaacataaacaaggcagaagtatagaaaccgtaacgctcaataatgctccaaccagcgacatcatataaccaaaaaagggaagtgtctcggcgatcacgacactacttatgatgaaaaatgtgcttatcaagagatgtaagtatgcctttttggagtaccgtgaaggaaaccaatcttttatagtgttcacggttggtgtgatcatcagtgcgtatttggctaccgggtttacgagagttgtgtatattgccaccttcgaactcgtcttatgaattggaagattcagtgttatttgtgataatgtttgtgatccatacattaagtagcccaaaactgccattgatgtgtatcctatggtgcataatataaaacatattagtaggacctgcacaaacaaagagtgaagttaacattattcattttcaataaactagacttggggaaaataaaatcttataagaaaagcgaacaaaacagaaacaaacgagaaaaaaaaaaactctggaatggctcgtttgaaacctaatttattttcggatgacaaaaaaaaagacgaaaaagggtcatggatttgttggttaatggtagtgattggtttagatagaaatgacttacattgttgaactgatgtttgcttttcatagaagaatacaaagtgggcaaaactggatgcgcaccatagcaaaaagcatataagctcaaagcagtagggatcccactccaatttatcaactttcctttttgatgaaacccaatcccatcaaatgcgccaatccaagatattgatccaagcgtcacagtcgtagctaaaacgccactcatagaaacatacgacaagacgctgagattatcccaccatagagttggcataatgacaaaggcgacggtcgccatgaaagcttgtttgccattcaatctcaatccgatcatttcgatggtaaaacccgggaaaagattgtgaagattgtcgccctcgaggatcaagaaacccgtggtgactagatagagctctaggtgcatgaagactgacacaatgattcttcccggtctaccaaatgcgcgttctcctatgtcgggatatgttttgatgttgcggtccgcattcatacattttgtaatgagtaaggatgtgtagaaggcggttacggctaggagtaacaaaagtgaaagactcaaccatcctccacgagcaagtgaatatggtaccgataatattccaattcctaaagcaattcaataccctaattagtgatattcattaataaataagtctatcgaaccaaataagaaatatgaacctgaaagagcattgagtgcgttgaaacatgttttaaagaaagatgaagatccgacattgtcacgttgtatttcttggttatcttcttccatagctaatgacctctaataagaaaaatggagaaactatgatcatcattatgaaaaagtagatttttggggaaagaagagaagaaagaaatcaatacagttgagtaatttaaagcataagcaagagaagcgtggttagtgatatttgattgagactactaatacacaacaataatattttataactttgcttagcttattactacttctcaaaaaaaagaaagcaaactctaaactcgattacctaccctagtcacacaattaacttgataatctcaaaatttccaaggcttgttacacatagaaaaaatacatgggatttttttttatatctctaactaagctctagatatcgggtacagaaatgagagatcacataaacattgaaaaaaaaaacttaaatgtacctggaaattgttagggtaaagaaccaaattcaaaacccaaaatctttatcaagatagtagaaaacaaaacagaacacaagccccaaagtcaaactcttctcttccctaggataaaccgataaacccaaaaaccctccaaattgtaacgcttggatgtagttcacaaacaagcttcaaaccttatttatatataagaaaaaaaaatagtccaaaaccaataaggaaaaaataataataatggaaattctaattggactaggattaagacttctgtaaacaaaatcaacggtgggagtttttctaactctaaagagcttcatatccaaaggaaatcttctaacatgaaaaaaaaataaaaacaaattgagctctctaaaggagttcgtgagaactatatcagcctttaagatcatgaaagaggaatgagtggaaacacacacatttgcaagcaagaggaaacttttcggtgtgtagtttttaaagatgatgaaaaaatgtcctatacgatagagatattcaatgccaactaattagattttagctttttccatcttttgtgaaaataaagatttatgataatactccaaatatgatgtatatcagaatcaggaaaatattataaaatttattacttcattccaaatcaaattctaaatcatacacattaaacctaaatcaaaaactctagcctacccttaaacttaaacccaaaaaggctacaatataaagttaatttgctggatttaaaaagatttagcctatcataggatacctatgtttgtaatttagatatcttctctaaggttttttacctaatcatcccaataaaaatgctaccacaaaaatgtcgacaattagactaaactcacatagatcttggaggagaatgtttgtttagttttcagagaagagaactatgcatataaaatattactcgagaaaatgcatggacaaaaacttcaaaactttttggtttaagaaaaagaaaaagagaatgaacctgaaaaataagaagagacgtacgacgagcttgatgaaccggagaaatcacacgaactcgtagaattggtgactaatgagtgtttttggttttgtgaaagaaaatcaagagccacctagaacatataatatttctttggattgggatttggtagaattggtgactaatgagagaatgaaactgatctaacattaaaatatataatatttacataaaaaaaggaatctttagaagtttgaccaattaaatagaagaatttttagaatatgttaagaaattaaatagaatgaaaaaatatccaaaaaaaaaaaaacgttttatgcaataaataatctaatatagttagcattttaaatcaactaatttgttgtattattatacatacatataaaaactatgacttacaaacaaaacgaaacaaatgctcaaatgtttatggaattttctttttgaaaatgaaacaaatgcttaattaattttgggtttagtgttgtgttaattcttctgtttgttaatgctgcttggtaacttgttctcacaaatagtcaaaaatttctctagaaacttgacgttatttaaaagtagtcaaaatgaccactcaaaaaaaaagagattaaaatggaataagatcaaattatgaatgattgaaggaacaaattattctatagcttacaacaaagaagaactcaactgtcatttaaagaagtgaggtatttaggtaggaaaaaatgagacaacaccttgagaattcttttgctttgtataatctatatatatgtgcgacgatgttccagtgtttcatggtttatctccagtcgataaaagactcgcaaaaccttgtgaaagacttcgctcgattgaacaaggggactttgatgaacaccttggactgttgctggttttgattcgtttgaagtttagcaaagaagaagagttttgggtttctaacacttcttcatcttcatcttcttcttcttcgtcattcttcttcgatgtttttctctttaaacctggaatgtttcttaaacccgtgtgtgggcggcgataatctttgtgatgctcatctaataccaaaagaagaagaagaagatgataagactatgtcacgaaaaattttacgatctaagattataaaaaccacagatatgtaccttcttgatagaggcatgattcagattctgtgtcaccacatttgcagaacaagctagtgtccttattcggtcctaaaatactgcgcatcaacaaaacaagattgagtctcattgtttaatgtgtagagtaaaaggtattcaggacaaaagcttttatcatttcgaacctgtacatatgctcgacaaagtcatctattaggacaggccatgcacctgagtgaaacaaataccataagatgaatcaaaacataaacatatttacacacttctaacaatttgtaccttcagagtcatatccttctagattctcatgtacacaacgactaaacgccaagacttgttgccaagtatcttctgaaatattgtgccgttgatttttctacaagttaacatcatctccttctcattagatatacaaacacaaagagccatttggtacaaaaaacaaccaaaaagtacctcgataaagtcacaccagcggttaagtaacctaaatctcccagccaaaacaagtttccatgcagtaatagctctacttatagctggaacatcattcaaacaagtttaactatcatctcctttggctactgcagccaaagcaatgactacaaaaccacttacttatattcttttgcccattctcgcggcacataaagaaaacaaaatcgtaaaagcaagtaaactccgtaaagtccacctacaaagagtacatatcaaaggtcagatcacaatcaagaacctaattaacccgaaaactaaagaaccgagatacaaaacaacttgccattaagtctagccgtgacatcaacttaaacaattcatcaaaaatcgagttcctgcaacggtaaacaagcaaaagaatcagctcaagagcggttatttttgcttagccatgaagatattgaattgacatcaacttaaacaattcatcaaaaattgagttcctacaaccgtaaacaagaatcagctcaaaagcagtaatctttgcttcaatagagaaccctgaagataatgaattggctactcaagtccatacctagcttgaaacttattctctactagatataagagctgagttattgcttctttagacaagttaaatctttgagattcttcgccatcacagggtttcttattacacaattgttgtcctgatcgaatagctgatcacattccaacaacagaaactcaattagtcctataaacattcctataagcaaaagatcttgataaaaccctagttaagtaacaaaccacagaactcaaaaggattcaactttttttccaaagcaatgtatagataacttaaatcaacactatatgggtaattaaaagattgatcctttatatacaaaaactaatatatgaatcaagaaaagatcaaagtttgagactttaccacagaatctacgataaatctcgaatatatcgaatcgagcagaaactggcgaagaatccatggatttgtctaaaagctcgaagcttttcagatcgaagctcgagcgaaatcgaaggaaacgtataaacaaatcccaaccaaagaaatcgaagttggcaaatcccaaaaacgaaaaaaaaaagagttaaagtttttcacttgcaaaattagaatagaggctctctgagattttgaataaaccctttttgatttaatcgggcctaaggcccattacaaatgaaatccatgaaaatatctattttaatttgacaaatgcaaaattatgattaacatgatcaagataattgtaatcgtaacaagattttttttttttttttgtcggctaacaagaatttaattccaccggaaagagttattagaatttcgttttatttttgtaaaatagtctttgattgatataatagtcggaattttaatgaagaaaaataacttcaagtatcgggcagattcatatgtgcataaaatgtgtattgtttttttgtatgtgtgtaatgatacttagtttatgtgacacaacatgtaatagtatagattgtgataatatttattctaccaaatatttgtggctaagattctcgtttcataaaacaaagaaatttagttaaatcgattgggtaattaattattagtaaaaatattataaaggttaaataagtttatcactatagcttacaataagtggaatatgaaagaaaaaaaaaaaacgatattagttatctttgggtactgcagtatacatgtctacgaagggtttcagcgggatcttcataaacttttcaaagaaaatctgaccgcgacttccgctggtgagagccttagagctcgaaaagagagggaaatgaaagagaatttgaaacgagccgatgaagagaagacgcaaagtgacactctcaaaatggccgagaattggatgaagaacacgggatgctggtctacgttgatgatctagaatcccaagagaactccgatcctaagacatatttacgagttttttccgatgattgttgtttcttattaataaattttactctatttccaattttagacatgattgtttcattttattggttaatcttagtggaataatcttatgctaaaaaaaaaaattacctttgtgttattcttaaaggtttgaaattatagttcatatgggttttcaaaaatcttgaagtttacaacaatcatgatcatcatctagttcttgtaacaatcatgaaaatcattctagttcatttttaagttttaagtaacttattaagggaaaatctatggttgcctgaattttcagctcaatactagttacaatctcagttttccactccaaactttttgtcaattaaaaaaccaccaaaaaaactttaaactcataaaactacacgtatttttggatttgttcttaaaactatacctccaactgaacctatcagttaacaagtagtcaaaggtcatatttatgattaccgaaaaatgtatgttttgtttcaaaagaaacatagctttagatttaaagaaaaaaaaatgattgtcaaaaggaaaatgtatatgttcttatattaccaatagcttaaaacaaaagaaattcgtggtatatttttcatattattttttttggtaaaattaagttataggttcttatctttaattgtttatcaaaactaaaaaaataaataaaaagatatcttattgtagagaagatattcttttaatttttttttgggttaaaatagagtcaaaatcggattaattttggttaaatattgggtaagtcaaatcggatgaattattaccggttaactgatcggttcatttggaagcacagttttaagaataaaaccgaaaacacatgtagttttatcgagattaaaattttgttgggtggtttcttaagtggcaaaaagtttatgataaaaatttgaaattgcaacttgtatagggatgaaaattcaggcaactcaaaaccaattaaaaaactttatgttttggagaaaatctttttgctaattagtggtagctctagatcattcatagcccaagccgaacctttagataaactgttttagctcactcataactgaaatcaaatagacaaaactgaactgttttcacaaacaaccttccatggttgatcaagaaactcaacttaacatcattttatttcataataaaaccagtggaagcaagcaatgttggctcatacatttcaaatgcttctgggcaaatttaaaaaatatcccactaacattaataatttgtcctctttttacatatacaatttttttttgtgctccttttacatatataaattttttttggtactccttttatatatagaaatttttttaatgtgcctttttatagctatatttttttttgtgtctttgtacatatataaattttttttgtgccctttcgtatatacaaaaaaaaaaaaaaattgctctttaaatttgtggatacggggcggtcttactgcccgtccttatacttaagcaggaactggaaggaagaaacgtaacaaaatattaagtgctgaccttgaaaactttattgaacctttaaaggacaattcggagatctcatgcatgggttaaaaggacgacttatggcaacttatatggttgttcacggtgggtatttttttttttttttgctcgaatggaagatgaatcaagaggttacgaaagattcaaactctcatgaaaaatatgtgaacaagaatcaagaggttgtcaaggattctaacagaagaagagggtaaacaggtaagaagcaatcaggtgatcaagagaaggtgttgacggtggtgggaaagaaacattgtggtggtgttgagttggtgagaagtcaaaacaactagaaagagatgaattttcgaaaatgaaaggaaaaagaacgtggagatggttttgttgatggttttgttcttcaacaaaaccttgatatataagaatgtatgtattatacttggtccacaagatacatgtcttattccccaagttgtctctaatagtaagttatcaagaaaactcaatgcttttgtgaaaccttaaacctcagattaatattagttacctctcttgattaatggccatgccaaccacaccgaatcaaacacatgtcaccaatatcttaaccatttgctaatttatgtttttaacaactatttttaatcttgttaatcttggggagttcagtttgtattgaaaatattttgagcgcaaaattaagaaagattcttatagtcgtgtaaatcctacgatgaacaataaccataaaccgtaattgtgtttttaaaaaatattatcaacaaaaagtttgaggatgtatatacgttgtgaaacttcgttaaaagttgttatgtcgtgtgtcttatatgcactaaaaacagatgttaagcaacccaaaaatatcaaaaatattcttttagttatctcattcacttatgaataggaactttcaatctctatttatgtttacaaaattattctttgcataggccggtcgatatatctatgcctagcctatacatatcttggttttatttacaagaagaaaaaaaactttaattattcgctagttgttataatattacggcattttgtgagttattgtctttcaagtttactttgcttgcatcttgccggaagaagaggaagaagaggaagaggaagaagacgaagatgcagacgactcactctgagctgcaacctcaacgaattgggttgtgacttgttcccatttggtgattgtctgcttaatctgtacttgttgtgtgggtgtgcatgtcaaagaagccttgcctttgttctgactcacaatttgagcgtggatggtatctaactcttcgagagtcttcatcacttgttcttggtaagcttccatattcttctttacctatgaatataccacaaacaaacaaacaaagaattatggaaatgaattataatgaagttattgcatcaatttttatagtaaagttgaattattataaagttacctctgctgatttgcttccaattcttgacctcataacttgcatggcaccagatattttcccagcagcagttttaatcctagagaacaaaccttttctttcttttcggggagcaatcatcgtacccttaagttgctcgaagaagaccttgaattcctccttttgtggacacttcttttcgaggttcattatgaatgtcgaaacatcttttgacgtctcttcctccacttgtgtcactgttaaactgctgctctgactagcttcggcagtttttgaagaagaagtctcactttcacctttagcggaagtctcactttcacctttagcggaagtctcactttctcctttagcggaagtcttactctcacctttagcggaagtctcactttcgcctttagcggaagtcttactttcattcttagcggaagtctcactttcacctttagcggaagtctcactttctttcccaacactagactcttcactggaagaagcagaggttgatgtgctcgataccattgtgtttgtgatccgagtaataatggtttcccatttcaagattccttctttgatttccttttgttgttcagctgttagtgtcatggtttcttcattctcctctttcttacgacctcccataattttagccgcgacagatttcatgaacctaaaggtatcaatagcctcctgtttttcctcttgaatttcctccctaatctgttagatatatttgcatgatgtagtaaataaattagtctattaattagccataatttttctaccttgaagaagaagttacctttccaatcgcaaaagaagatatggccttgaagatacccccggctttggccttcatgtcccggtcgtaatctacttggccaatccttcttattgggcaaacatacttggcgaatcctctaagtttctcaaagaaggccttgaacttgtttgtcttgggacattccttctcgaggtcggccacaaagaccattactactttaacggtgtaaggctctacatccttcaccgtctttggatcttcgatttgaggcaaagatggcttaaatttcaggtgtgctgatactaggtcaagaagggtcacagatgcaaatagaatggtgaagcataacaatagttgaactcttgccattattctatttttttagtttttgttttaaacttttttttttttttttttttttgaggaagagagactgaagaatgaatgaataataatggaattctttggctgcttttatagtcatgttaagttttctatgtttagaaatattgaccctttcaccatcgagaatttggtggaatatataaggtcaaaataatagcaaaaagtttcatggttctgaagtgttccaatgaaatctatagttgttgttgcattttaaattattcttatattttcaatatatatatatatatatataagatagtagaaaatgggtttcctatattagcataattggagaatgttttggcgacaattatggaaattttactattcgcaagaatgggtaaaaagttgatctagaaattttcaaactcttgagaccacgggattagtggactttcagatttaatatttttatttatactaagatttatatatttcttaattataatttaatatatctataccaatgaggagatttatattaatataggcagttagatttaaaaattagaccaaggaactaggaagcaaatgcaaggagttatgggttctggtcgaaagacaacatattctctttatgcaatgtgaccaacgtttcaattccttggctgtccttgtctaacgtgagagccacattgccgacaacccaaaccggaggtccccatccaacatggtagtctcatagctcaactacgaatagttagcaagcataaaatttgctagtttagaaccgattaccgaagacaacccacaatagacttggataacaattagtaagtcctatccctttcttggtaagtctctaacagcctcttcaattttaacttctacatctcgaccacataagagaacataacatttccgataaggctttttggcgaagggaaggtctcttggggcttaagttagagcgggtttgatggatatatcatatatgccaacgtctttactagcagatttggttctgagctccaagctctttccacttggatgcatcgaccatgaatctcttatggttttcttattggcatgttcatccattttctggtgggtagaaatttactacggaaaacttggagccgtccactgtgttgcaagcctctcttcgagccatagctacccaaagactgaatgaagtcgagatggtggttgcatccgcaattttgtgagtgatgcagatccccatgaccatgccgcaatttattttaatttatttgatgtatcattatctttaatttagtcaccaagaaatattctacaagtagatagtttacttgtactatgtgcggcgtgatatgatgttaagtatatatgttgtagttttagttacaaattgtattatactagtttataatttgatttgatatgaaacgttccaaaatttggatatctagaaaagctatatccatatagcgaaatattgaaaatgaagaaattggatccgagacaaaatttcctatttttgtcgtttcaaaaatatgttaaatctattagaatcaaattattaaaaacaaacattttcatgtaaaacaatcctcattttgtttcttggtgaaccatgccaaagtgtgctacatggttttggattctaacccaattttccatttttttggttcttgtttttaatttgggtatggcctgttttttaactatgcaaaagatattgttttttgtttttttttttgccaaaaagcaaaagatattgcttaattcactattctcttatatggaaaaaaccttaccatctttctcttttatagagaatgttctaaaatgttcaatccaagttaatagatgtgttcacttgcttttagtggttgaaaaactatcgttatcaattatcatcagatttcataaaaacccaagagtattccataagagcttaggttttaacctttctttctatgtatacaccatgcttggaatttctcttgtgtcacttttcgaactcttaagagtggacagtttggcaaagagataatagattccttgtgttgtaggttcaagtatagaacttttacaaaccatacctttaaatcaaatcaaataattttctcgaataaaatattagaaatcaatttatttatttttttttggagatatgtatcggtgattgattaattatgtgaagctgttatacattaattttatctttgtattcaatatttcttagttaatgttgcttgtttcacacttggaatttcaacttttatttaaactagatgaacacccatgcgtagcatgggtttttgtttttaaaattatcgaaaaatatgattatgattttttgttgattttgatgttcattttgataaattcatctatttaatataattattattttttatgattagattcatctataactcgaaatatcaattctactacaatatgaatatttatatatttattattctaatatttcactatcatgatcacatactacaacaatatatgatatactgatacaatgtatgtagttatattatttatgtgttttgaaacttgtctaaattaattgtaacaaacaattctttattccatatattctctcgtcatctagtacacaatcacatcttgatatgctagtaatttaagtcaacaatgtaattctcatccctaccatatagtcatatagagtctcatgttgttatttttttggtatgtctaatgtcttgtatgactattaattagttttgattattggttttattttatttttttctcaattagttttgctagttttttaatttaattaatgtagaatgacatatgtcattttcttgtgtgatgatatgtcactcatatggagagtgttggccaactttcatatatatgatttataaaacggctgatcaaatacctaattaaagtattcaaaaatgtgaaattaagtaaattagtatcagattttcacatttcattccatataaataagcaaggatatcttcttgttattcaacaattaaaaaaaaaaacaatactcaatttactcaatttcattatgtctatcaaaaatgtgttttcactcctaacggtgttatgcatcaaagtttctataaatgcttagttccccagtttccggctccgtttccttttccatttccgttctaacggattcctggtatgccaagattacttgatataaataaatgttggtcatccgtgatggatattcatgaatacactgcagagatttctcaatccattttcacggaaaaattcggtaatttaggttggacttgttgcaaagaagttttagacgccgaagccaattgcatgccaaaaattcattccatttttctctccgattccaaacgaacaatgttcaagaatagtgtatacaccaaaaatagaattttaatttatttttaaaatagataaaaaaaaattaacttattttaaaacaattcggcttacgctacatattataataaaaaaaacaattgtatagtaataacatttgaaaagtttcatttggattcaatatcatctcattcttcaattagaatgcataacaccttgaaacatcgagccataattgaatttagtcttacattgttacagaacttgggattgttttcataaatcttttaaatatctcataacactaaatctgcagacggttaataattttattagataagaccagtctaagtaggcaggtgtgagaaataaagaattttttttacgatatctaaattctatatagtaatcaatattttttaaaagaaaagtttaatcttacacattctatataacatgcatttactaattatatatatattaagatatcataccatttaagttttaaacatttctaataaatttattgtatttcttaatttatacttaatagtatataagaaatataggtaatatgtttaacattcttgtttgataaggctaaattatctttaattttgtatattccttatatactaattgaaaatatttcttaaaatatctttaagttcatgtgttattaacgagactagggcgaaacccgcgccaagtcgcgggtttttttttaatgtaatttgttaagctttatgtaggtattaaatgtcatttgtcatatatatgtagaataaaaagattcatttgaaagtgattgtaaacacaatgcatttgttaaaattttttttagtaatacatatagcctttataagttttagaagctaattttttgctttacgaacatttatatagaagagtcaataaacaaaagtaaaaagagttaaaaatcactatgtgctaattctaatggggttaaagttattttagattcttaagaatatgttatacggagttatcatctttgattttaatgttttccacatgcatatttgattcatatgttgaagaacaaaaatgacatcttagttgtaacctttttttgcttgtttacatattacatcaacaatgtcatttgtaacatttttcagcgtaaggttcttttccaaaacttccatatatattggtgatttatcttaaacgctagtttttttctccattataatcatagcatcaaaccaaactgaaaaatgataagatactaactaagtattataataatattattaatccggaagatacaaaattgaaaatattttttttagtttgtcatcttcttctttttgtaatttgcatattacttagtgatttgttttatgaatcaaatgcatatttgagtataaaatttaattagtttgaataattaggaagaattttattttattattagttatatttaaatttcacattttatcataataatataatattttggtatttttatactttgtataattatatattattattttttgttatttttcattttaccgtaaaaccacctgctggttaaccagttataaaactctagaaaacgcttcaatttttaaccattaaaccagtggttcaaaatatttcataacgcttgaaaccgcaaccgtctgcttccgcagacacttttattcataaccgcaaacgctatgtttaaatcagcgaggcctttaatcattattaccctctcataatatcatactactatcaccatcatcatcatcatcatataaatatatcatagtcataatagctatcatcatgataataatattatcataaagtcgtaattttcccgccaaaacatacctcttaatttttccccaaaaagtaaacccgtaatttttccgccaaaatagtaaacttgtaattttctcgccaaaatagtaaacccgtaattttcccgccaaaaacgtaaacctgtaattttcccgccaaaaaaatgtaaactcgtaatttttatgcaaaaaacgtaagcccgtaatttttctgcaaaaaacatacacccgtaatttttctaccataaacgtaaatccgttaaccagtcataaagctctcgcaaatgcacaaatttttaaccgctaaaccagtcgtttaaattataacgcttaaaaccgcaaccttctgattccgtaaactctcgcaatcacaactgtaaccactgcgtttcaaccagtcaggcccttagataaattttcttagtcatcggcattcggttatctgttcagtttcggtaggtattcattcggttatttattccttcggttataaagtttagtgtcattcgtatattttgaaatttttgttctgttccggttctttcggttttgaaatttactataaattcagttatttttctttgaatattctcggatattactattatctatatcttttaattatttagtctagaaagaactaatatttttgaaagtataattatatttaggatattttcggttacccaaaatatttcagtttctatccattctgtttcggttctttcggttatagaatttaatatatattcggttattttcaaatttttggttctgtttggtttgagttttttttcattggttttggttcggtatattagattcgttttatttgtctaggcctaagtttttagattaggaagtttaggcccatatttttatatagattttagttttgaaagtaatttagttggggtaagcccatgtctaattttaattttgttaaattgatgagatgatatagaaaaatagtatgtttttattggttgaagtaaatgagctatattaatcgaaatgttttaattgattgttaattttgcagaggtatcaagctgaggttcactgaaaaaactgatgtgtccacacaggaaagacttttaacacttttaaggtgttgattgtcatgttaacgtttcatcttcggagagtcaatcgttattacaatatttaacgattttgtcactagtgttatatatacatatcgcacacaaatgaatttcttttaaaatcctattaaataaaaaaaaattatgaaacaattaatctgtcgaataagaagatgaagatcgacctaacatttattctatattaacataagaagtatctattaacagataaagattgtattataataaaaccaaatttacatcaacaaagcatccaacatttttattagttttatttactgattatgttaaacgcttctatttgtattagtatcaatactatattcttatacatataatatcattcaaatattaattaaatacatgaccaaattattatacgaagcttattgaaatagcccgcagtgactttttctttaatcattttcaataactgttagaaaattagtacaatttgccatcagttctataatcaaattaagaactaacgttaaatgttaaaaacccgtgttggttatatataataaatatattctagtattttgtgtaccgtatttaatcattttacagataaaacgaaataaatacatcactgatttaagtaacataaatatatatatatatatatatatatatatatatatatattacatgtatcgtagtatttcagattttgaacctttggagctagaatagctatgagattttgacacataagatttatagagcaataatactatgagatcgacacatagcttattcattaatatatgagatatgcatcacaagagatgtttaaatatatgtactgtaatctgtttaattttctttcccggataaggttaaattatattctctaattttagatatgaagtgttattgtttttcattttcttagtcaatgccaaagctataattaccttccaaaagataaaatgtttggattaaaattttgagatcaatggatcagtttcggagctagacagctatgagatcgacacataagatttttagagcaataatactacgagatcgacacatagcttattcataacatatggggtatgtatgcatcacaaagagatgttcttaaggaagaatcacatatggatagaatataagacttttaatcatcacaaagagatgatgttctgaattaattggtttgtctcctcctccgacattgattcctttttcataagcttctgctcgtacgtctcaaagaagtccttgttctctttaaccagctccttccaaactagttttaattcattgacagtgacaacataaacaacaaataacactacaattaatctccgaggccgtagaatacttatacgagataatcgagaccattcgtcaacatacataaaataaacataaacaaaaaagctataagattatcgatggttaactctatcatgtagcgtattaaaagactaagagtttatatataacttgtggaaagccgagacatattcaaaaatataacggtgaccagtgccaaaaaacattggaatgatcgagtaaaatgcatcaaatgtatggaaaatatgataagagaggtccaaaccagtggacgtgatgatgggattgatgtttgcattctctgagagagcttccatgcattcctctttgctcatgttaaaggtcaaacatgtctctatcatgtgttgcacctatacataacacatgacacactatcacgtttttatatatatacccttaagaatgtacctaaaagaaactgttccttcatgagaagaaacgcatgcacatgttcgagttattaccagatgaatgtatacagcgggagaagagtgtctcatttctattatatattttgctacaaccacaaataaactcgtatacttagattaaaaggctccactatatatattgacgctcatttatagaagagcttgcaaagaagaacatgaatagtgatgtaaacatgtggcccgaagaccgcacacgtaggagattaattataattggttgagacatgataagaagatattgtaagaaaagtgaaaaaagagagagagaaatttgtaaaaattactcttttatctcctcttctttgtttccatttccaatctatatctcatttttcatccataggtcctatattttttcccaaaataaataaatttattcaatcaattttgctatagccttatctgcggtttattaggtcataaattttaattaatacacaaatctaaataaatatgttatatagatcatagatttaaaaacttttacgggaatttatctatttaataatttacaaatactagttgaaattcaatgttatcttgttaatgatttattactagatttgaaaatccgaaaatacaaagattcaaatccaaagttaaacttttgtatttcaaaatccacatgtctgattttaaaatctatataattttctgggtcccataaagatttatatattcattaacaaataatggtatcatatatagagttacagaataacaacatttgcttcactaaacatgggaaatagatattggattagcaatagactattaaatttttttgagtacataaatgtaatttctaattactgtgtaagcaacattgtttttctgcaaccactacttccgcataccaaaaagcattcaacataaaaggtttccatgaaaactaatataggctgtggtaatgatttaaacatccaaaaggattcagaaaagaaaacaacaataaggatgaaagcttaacgaaatttgcttcaaaatacttaaataaatatctttgggtcgactgtgtaagcagcattaagaatgggtttacccataatttgtccagataaaatcgtcactctaatgtcaaatctctataatagaacccatctaaaactcttctattgagttgtttgatttttcaacccattgtttacaatctcatgtaatttattttaccactttgtgtaggtttgtttaactaagttctttacatgcatctatcatcaaaacgtgctggtacatagctaaccaatccatatatttatgcttaatttctgttagtttttaatagttagttatccggtaatttagtgtgaatgtttttaattgctactataaaatatgttacatcaattattctaaaatatagcttctttttcttttttttttaatataaaacttcattgatcgatccctaactattgatggtactcttcgtctcgttgtcacttttcggatcaatcgatctacgactactggtcaccaacacattttgatctacaaactcctgatcgatcgttttaggccaaacaagtccaataacgcatcaaaacatccaaatctctcacaaacacctagtatatgtaatagactcaaattaaaacaagagaaaaaaaaacgtaaaaaaaactgcaatacgacaaatgattcaaacgaaaactaaacgaaagacttaagacaccaaaaaacaaaacatattagaactattcaaaagaaaatactttaataaatcataaaatttcagaactggaacaaccaaaaccgaaccaaaatttaaaaaaaaatctaatagctggaaccgaatgaaaccgaatcagaaccgatagcaatactcgaacgcccagccatactttttgtataagaactcagataaatgatggatttaaagcattctaagttttaagaaaaaaaatgatggttataacaatattgacatataaaaaaaaaaaaacgccagccgtcaattagagttttgaaatcgcaataataatgttatgcatgaataggaattaggttcacattctttttgtatttgatctgttaatatcatggccgatatagattgaacattttatctaaaatactattatatttgaccatgaaatcatgttgttcattaccactacaacgtttacaaccatattttcactaatcactagttgaattcatatatctaatttgagaaacaaaatatttcaaaaataaaataattttatagatgatccacttatgtattttcaatttgtctatgtattttaactaaactaattaaatcagtataataagcatacatttaatttcatgcaacccgcgatttctaacctagttatcatctaactacgttcataagcccagtcaaattaggattgaaataaatgtacaaaaagtcaaaaagtcttcagtcaattcaaagtcttggtctctcaagttttccatttaataaataagatatttgaattcgaaataacaaaagtctatattatttaacacaataatatatccaaccaatgaagacatacaaaatatcttagttattaataactaaataaataaaaaacacgtcaagccgaccaaactttcctccaaataagaccaaaaaaactcttaacaattccaacaacgttaagaagaaactaaagaaacttcctatttccaatttcttttcaaacaaggactctgtcttttgtctctacttgccctaccactttccttgcaccaacacttgaaaatctcaaatcttgtatatatatcaacaaacaaacacaaattctatatatcattcataacaaaacataaccatggagtcgaaatcttcttcttcttctctacctttgtttgctctgttcaattttttcctcataagtttttgcagatgggtttcttctacacgtatctttttatcaagattcgtccctcttcttcaacatcatcaacgcgttttcgacaaaaagaacaacaaagaccaacaagagactttgaccaaacaagaagatgatgatgatgatgatgatgatgatgatgatgatgatgatgatgatattgatatttctagagaagaggcagagatggttatgagaagcttagggcttttttacaacgatgatcagcttcaagaacaatacagtgcaaaagaagtctcgagtttgttcgaagagaaagaagcgagtttggaagaagtcaaacaagcttttgatgtgtttgacgaaaacaaagatggtttcattgatgctatagagttacagagagttttgacaatcttagggtttaaacaaggatcttacttagacaattgtttggtaatgattaggtcattagatgggaacaaagatggaaaaatcgattttaacgagtttgttaaattcatggagactagcttttattgaaccaaaaagttttgtaatgacattcattctttaatctaatgttaatacttcattaaaccatgtctctttgtggtatttaatcgaacactttccatgcacaaagtgttttcgtgtgtttaagataaaaactaatcagataattaattctctaatcatatatgcttgattcctaaactgggtatcaatctattcataaatctaataactatcgatctttataaaacacattctctttgtggcattacatcgaacaccttgcgcgcataagggttttttcgagaaaccgataaagcttctggtcaagctagaggctttcacagctgtaatacagaattctccagttccattgaagtcggagatcgtaccgtcaccggaatctgatttcaggtaagcttctcttcttattggaatcgagatttgataacacaaatccgaccaaagattcgaaatttcgagatttgtctggttttagtgtccagggtctttgtgggtttttgaagaacgagattaaagtttggttatttgtagaaattgaaaagtctctgttttgatgaagggctcaggttaagatgagtttaagtagagcaaaggatttgagacttccgttgatgaatttggttagacttaaaggtacaccaattttggagcaacttcatttagaagaaaggcttcttagaacatcttctgataattggtgcattgttaatgatggaaccaatgttcctaccattgtgatgggaatgtcagggtaaagaatgaatcatcttttcatcaattctattcgaaatcgtttgcgcaaaatgttaacttttgtgtgttgttgtttataggaagccttctcagcttcttgaggttggaccagttatggaagatcgaataccggtgattaaacgatttacgggaggaggaactgtgattgtggataagagtactttgtttgtgagtttgatttgtaacaaggatgatgtaccaaatgttcagccttatcctcgttctgttatggcttggagtggttcgttgtatgatgaagtgtttaagagtgttaatggtttccaactacgtgagaatggtgtgtgtgtgtgtgtgtgtgtactcaggcttgattcttcttctttgtccacaatgaaaatgttttaatgtcatttggatttgcagattatgtgtttggtgatcgtaagttcggtgggaatgctcaatcgataattaagaatagatggattcaccatacttcatttctatgggactatgatgtgagaaacatggcttaccttaagctgccttcgagagtgccacagtaccggttggtatgttccttgtttcatcttgatctaaacgtcttctaattgattacttgatccaaaactctttggtacattgcaggaaagagatcacacagatttcgtgtgtagaatgaaggattacattgaaagatcagattttgttgagaagacagtaaaagctgtaaggaaccaattcacattgaagcaagtgaaccttgaagatattgattcctatgcgaaaggaggatatttgaagactacgaggcttcttacgatggaagaactcgaagaagcaatggctgataccattcaaaacacatgagagtattgctatagtttatttggttctcgattctttacctcgggttagaccgttagagccaccactacttgagataattttgtgctggttattgattttgtaatactgatttaaaactttgaatcagaaaagaaaagatacttgatgtctttagcttgtcatgttaatggctaacaaaagaaaagtcagagactttgataataatgacaggagtaagcaacttcttgattagttcccactctaaatgttagagctttagtgaccaactcctagaaaatctataaatgctggaggtttaatggtctcaaaatatctggtcaccattgtatgttctccagttgttgatgatgatggcagtgataatgacgatgatgatgatggttcctggatggagacatgcagtgtcagtgccaaggaatctgcagggaaggttgagtagtgatgatgtggaccctgcatcggcatgcgtgaagaactatattcttcttggagatactgagctttcaggttagtagttccctcttttagcatttcccagctgcactttttcagattcacatcttcatcatcatctacattacctgcaagaacacacagaaccatgaaacttaaagactcaccaaacttgcaatctgactacttttgagaccaaaccataagttcattgttcctgagtgataaatatcgaaagtatctcattacaataacagagttaaactcaatgcatatgtgtaaggtaagaagagacaaaccaggagaaagattgaagattttgtgatctgtgttagattcatgagcagaaccattgaatctttggacgtaagaacttgattgctgtctcatcttccttgccatgagaacatgccaatgattcttcaaggcattatctgttcttccattgaaaagcttagcaatcatagcccatttgttaccaaaagctctatgagcagcaagtagtctctcttcttcttcatcactgaaagctctcttgttaatcctcggatctaactggttaaaccacctcaatctgcagctctttcctttaagacaaaacacaaagaagcaagaaaaaacattgtaagtttcatgttccggaattagctaagggaagattaaagatttcaatttttgtcgttacctgttcttccttgcatactctctgcaatgtggttccagttttgaggaccgtaaaccgaaacaagctccataagctgagtatcttcagagatcctccaatgtcctctactacaaaccctagaaacactctgtttcttcttcttcttagtcttcaaatcatcactcttcttctgcatccttcttttattacagaactcttctactgtttcagacactgcattgttttctctaaacccattaaatgttgttcctctgcaatgaaactcaaaagggtattcttggaaacatgaaaaatccatcttcatgttagtctctcttctataactaatgtctcatatatacacacacacaagacaagagagacacatacatatagggaggcatgtgatgtttggattctctgatggctatgttatcgtaagtaatctttttcattaccaaaaatggaaacctgaagagagagaagaacaggtttgagatgaaagagaataactcgaaatagaaagaaaccccacgcatacatctttcatggttgctctgttaagaaacagtttcagttctctgacatcattttttttttctttaacaaagtttgaattttttgtcacaccttatattcttctccccacgctttaccattttctaaattatactatttccttgtatatgtaaaaatgtaggtatataagaacaaaaatatgtatacctattattggatgaaatttcttatagaagatagatatatattcctatgtacaactaagttctatgtattatttaagaaaaaaaaacacaagattaagacttaagtttcatagtggcataaccaacatattcaacatgaagaaagcataatgttgtttaaagttttttggcccagttgttttagataggcagggccggttgatggcacggtctggagccccaacccaataattaaagggccagattttaaaaaagtgattgcatatgaaaaaaaaccaaaattaatctagaggccaaaaatgaattctcaaacacaagaaagattaatttagacaaaaaaactagacataggcattcggttttggttcgtatccattcagttatcggttttttggtttctaaattttagtatttattcggttattttaaaattttggttcggtttcggtttgggttccagttttttcagttttgtaatttagtatccattcggttattttgctttgaatattttcggatatttcggttattttggatattatcatatattttttggttattttcgagtattttactatttatatataattccaagtatttttagttatttagtttaacaataactaatattttttaaaaagataattatattttggatatttttggttacccaaaatattttggtttggtatcaagtcaattttggttctttctgttatagaatttagtatccatttggttattttcaaatttccggttcggtttgattcgttttttcttcagtttcagtttagtatattcggttcggtttatttgtcttaattaaaagggcctaataatattgagccgatgggacatatttttggggagcaaacttgatccagtccaatcctctaagattcagagagatctgacccattttgttaggtctttaaaaatatatgctattaaagtaaaaaatggcttataagactaattaatttggatccatcaaacataccaattaactttttttagtttgcgatttattgtagactggttcgctggaccgcaaggacaagtcacaaaacgtgcatacccctattatgatttaacatttagagatcttgctaaggtcaagccaagctggctctgccaaacatatcattttcttaatgttctagcatcccatatttgagtccaaatttcgttatagtactatccaagaaaatttacttaacaaattttcaaggtcattttacaacattttaaagagataataggtctagtctaactggtgatgatatatttaacaaaattttaggtggatcatttgacatttaaatggaggattaattgatttaaactagtgtttatctttgcttcttccgaaaatatcttccaattttttcatttaaaccaatgaattgttggtatttttttcttaataataagaagaattatttggcagaaaaaacaaatttcatgcttccataacatgagaattttcaccacttagtactcaaattaattaaaaagcaaaatacataacatcactttcattttcttatattataaaacgagaattaataaaacttctctttttctcgttcccacacatatattcgctacatatcactatcagtcccaatctcaattggttaccaaaaaagagtccccaacttggaaccgaaaaaaaaaaaaaaagcacaataacaaaccgaaccgattatatataattaataccgaaactgccctccggtgtaggtctggccaaaggaccaagtgggtggtgcaacattaaaagagacgacacttcgacgatcacttgtggtaacaacaaacgacagactttgaccattgagataagagttgctttgccaattttgcccccaatttctcgacattaattgccattttgtcctcgaccctttcattgagaccgagtgtacgtccccggctccacccacgtttgtgaccaacaccaagttaaagtatgagtggccgttgatcgtgaaccttatcccaccacttctcttgcaccgaaccctatataacacaaaattatttaaataaaaactatatgttatgaaagttttcaatatttatgaaataggggtaatgagaaagcaccactagcaagtttggtatgtcactattattcagttttgggcctattaaataatttaataccttatttctaccacatgtatcaactggtccaaaagtattaaatgcgtatttataggaccaaaagctgattataaatgtttcactatacgcggcttttgtgtgttttcgacacatatgttctatggaaaagtcagaaacaataactaaggaaggtaagaagaaatcttactttgccttcgtatagattatacactatagttcagttctgtgcataccattaaataacaccattgtgaaggttctaaacagggttagtaaattttgtaccttctatacataacgggaatgataccggatttgtagagagcaattttctcgtagatcggctgagaaagatcgaaatggtggttgggagggtcgcatgcaccaccaggaggacaaaagttagtggcagtgaccacaatggatcggccttttatgcaccattgaggatcgttgacacacatcagctcaaaacatgcgccacaactaagtccttggtcgaataacgctgtgctcagcgctgccgtctccagtccataaccttggctatacagattgccgtacccgcatgctccacctaatttagttcattaggcagatcaatgttcaaaatcattaacaaaaaattaggtcctagattatatgtttgcgtttgtatttatttttattgttttaaacagtagaatttgtatgaaattaaataaaaaatgcatgtttatatcacaaaagtctgtaatttttaatcatatataacaattaacattcggaacaattgagacattaataaatatatttctcattggccgttgacaatgttgcatgttaatagaaagctagctctgaaaaactgaaatgactaaactaccctttgttagttaaattaaggtgatgcaagtgaaaatgattattgaagttatcgctaagcgtacccatagtgccggaagcatcaccgccgccgtaaaaagtggcatgagcgttgatccaaggtcccatgtgaccgccgggatggtgtccgccacgacggtagccgccctgaacgcagacggaaaaagctaggagatgaaccacgagaagcgagattactaaaactcccatgttgtgaagcaaaaacaatcacaacatgcaaaggagagaaaaaacaaagggtgttttttttttgtcaaaatacagaatgaggagatgtgagaagtttggtgtgatgaaactggagaagaagaagagagtggtataaataggaagaaggattcagacaaagttttagcggtaatgaatcaatcagggtccatgcaactgcttattggtcttcactatacttattataatttaatttttgaagggtttaacatgtagaaccgacgaaaatcaaaaaggaaggtgaatgttaatatgtaagagttggaccaaagaaaaattgtcaaaatgagttggaatctatcgtaaaggtcactcaagaaattgaaataaatgcgtatcagatattagtggatgtgatagtgatactgtaacattatagatttttttccccctttctttttatatagaaagtatttatcatatactcctatggagacatgatttgcaatagcatttacattcataaattatgagggtttgagtgtttgagacagacaatatagagcttaataaataatattatccggataataaagttagaatctaaatgcaatattttttggtccaagttttactgcacacaatttatttaagaagacatatttattgtatgtctggttacttttacttttgttttcttaatttgttagaaattggagcaacattgtattcggagcagaagaagtggtgaagaacggttgggacttttcataaaactgtagatgtgtcattggacaaaaatgggtacagctgtttagagagaaaaccaatatatatatataaccagacatacatttaaaaagtatactccatccatttttaatacatgatgttgaaggtttttgaacacaaatttttattattattattattattatactaaaactttatttattatctatttaaatacgatccaaccagtaataaaataatatgtaaaatataaatcttcaaaaccaataaaaattaattaattttgtattgaaagttgaaaacatcatataatttagaacataatttttcacttaaaacatcaagtataaaaaagtgtctatataaaaacatagaaacccaaaaaagaaagcacacaaaaacttcatctgctaaaaaatataatataattgcatttcattccataagaggattttaattacaatttttatgtaataaatctacattagaaaaaatttcatacacaattcttatgatatatattattttacatcgtagctagagaatatctatcttatccaaaatcaaaattaataaaagtatgagatagaattatgcttaagatttgatacatatagctgaaagaataaacttatgtttaagatttctatttaggtgtgcaacaatttaaatatatatatatatatatatatatatttaatatattgtttattcagttgaaaaatgtaaaaagcattatataacacaatgagtaatagtcacaacttgcacaatatgtatatagtttgctgatgcttttgttggatatatattaattctgaaagtttgtaaaatgattgaattacgtctgcgttatataatcaattctaagtcataaaattaagctgtagcgttatgtattaatttgagattgaaaatacaaatacataaataatacatccatccgtctttgaaataaaaaatttaggtttcttataattgtttccataaaaattgattccttagattttctatataatttaaatgaatttatgttaatattttgtagactttaaaaaatataatgaattactattggttcgtaaaaatggaaaaatgttttagtgtaggaaatgaggcatgttttaagagttacatgcatgtttcttaattgtgtgataactttatacgtaatttataatttaaatttaaattttgtgaaaattataaaaaatacacttatattaaacaaaggaagtatcagtaaaattatttcttcctatcgacgagtgtgtttacaagagtgttttactatccaatttcaattgttcttttttttttttttttgaaaaagggttcctctaatttccattgttgcacttcaattattttctctctttgttttttttgagcaaaagttttgcatgtatattgaaaattttattgttttctaaaataatattaaatattttcaatattttcaaatcttgcaaagaaagtacacttgtactataacatcgttacttagtgatctgtcatgtgtgacatcagtctttcgatctcgaacgcgagagatatgtccatgcatgcatgcatgtgatcagtggatctgtactctttaaaaacataaccagtttcgtaacgacaaattattacagaaacaaaacaaaattgtaataaatactgatttcaaacaaccaaatgacacatgtgcaaatactctcttggaatgatagatgtatatatatatatatattataatatacaaatggtagaagatataattgccaggttttgaaactggcttctaaaatggttacaattaacatgagtacttgttacttgtatacatatcattgtttagaagaacaaaaagttgcttaaagatatctctagaaggggatgtaacaaaaattgttttgtatttggaataaacttctaataaacttttctaattgttgttcgaattgtcatgttattttgttattcgacttcttgagtacttggacccaacattgaataaattgtaatcaaattatgttaagccaactttaatatctacattttatcgcaatatgtaaggacaaaactcttcttactacataaattaaaattagagaatttcaaatgacaaaatctaatggaagttgaattaggttcatgaagatttatgccgctatatcatattagggcttaagaactctttttgtcaaattgctttcattaatttaaaggtttagaatacaaagatggagatggttttctcatgactccaaatttcatataaacgaacttgacaacactaaaggttacaacataatagggcataactatagaggttatgtataaatagggtataattgtaattagtattaccctagtctctcttgtaactagcctatatatattgtaattacaatctctaataatattaaggcattacactatatggtatcagagcctctcgactcttaagacctaaatttctcgtgctttacgcagccttctctttcatctcttctcatctttcacgatgacatccacaccatcttccacagagacaattgctttctctgaaacaccaaccctccttaatgtcaatatggcaaacatcacaaaactcacttccacaaattacctcatgtggagccgccaggttcacgctttgcttgatggatacgaccttgctggttacatcgacggatttgtcacagcaccctctgaaacaatcaccactaccggtgttctcactgccaattccgcttacaagttttggaagcgccaagacaagctgatttacagtgccattcttggcacaatcacgatcaccattcaacctcttctgtcacgatccaacactgccgctgagatctgggagaaactcaaggccacttatgctacaccaagctggggtcacatccagcaagtgcgccaacacatcaaacaatggagcaagggcaccaaaaccatcaccgagtacttccaaggccacaccactcgttttgatgaactcgctcttctcggaaagcctcttgaacatgaagagcaaatcgagttcctccttggtggtctcacggaagactacaaatctgtggtcgatcaaacagagaatcgtgacaagcctccaaccctcaccgaacttcttgagaagcttctcaaccgtgaagccaagttgatgtgtgctgctgccacaacgtcttcacttccggtcactgctaatgctgcaaactacaaagggaacaacaacaacaacaaccaatacaacaacaacaacaacaatcgcaacaacaaaactcaaggccgtaacaacaacaactggcaacaaaaccaatctcaacagaggcagaaccaatacacacagaagccgtatcaaggacgttgccaaatctgtagcatccacggccacagtgcacgtcgttgccctcagcttcaaggcggctcctacaactcgcagcaatcaacaccagtctcaccatttacgccgtggcagccacgagcaaacgctgttatggcgtcgccatacaatgctaacaattggttactcgatagtggtgcgactcatcacatcacttctgatttaaccaatctatctctccatcaaccttacacgggaggtgaagatgtcactattgctgacggttcgggtttgtcaatttctcatactggttcagctttactttcaacaccattacgctctcttgccttgactgatgttttatatgtgcctaatatccacaaaaaccttatctcggtttaccgcatgtgtaacgctaacaaggtgtccgtggaattctttcctgcacattttcaggtgaaggatctcaaaacaggggtccaattgctccaaggcaggactaaagacgagctgtatgagtggccggtgaatccccctaaaccgtcatccttcctcactaccattacaccaaaaacagacctcacttcatggcattcacgtcttggccacccatctttatctactttaaaagctgttgttgctcaattttcccttcctgtttctcattctttaccaaaacaattcaattgttctgattgccttttgaataagacacacaaacttcctttccatacaaattccattctctctactcaaccacttgaatacctatacactgatctttggacatcaccaatagtgtccattgacaactttaaatattatctcgttattgtcgatcactatacgagatactcatggttctatccactcaagcagaagtctgatgttaaaaacgttttcatggccttcaaagcgttggttgaaaataaatttcaacgcaaaatcattcatctctactcggacaacggtggcgagttcattgccctacgctcttttctctccaccaatggcatcactcatttaacaacaccaccacacacgcccgagcacaacggtatatccgaacgaaagcatcgtcacatagttgagactggcctcaccctccttggccaagcctctatgccaaagtcgtattggagctatgcattcaccactgccatatacctcatcaatagaatgccaagcgaagtcattggtggcacatctccatataagcggctctttgaaaaactccgaattatctgaaactccgtgtgtttggttgtctctgcttcccgtggctccgaccgtataccacacacaagctggatgatcgttctgctccatgtgtgttcctcggctattcgctaacacagagtgcgtatctctgcttgaatagaaccactggccgtgtctacacatcccgacacgtccagtttgtcgagaatgcctatccgtttgccaatcccaaactagatcaaatcacaatctttgaagaaacagtcccacaaatcaccaataatcaacctgcagccattccactcccgtcgccaccgctcatacagcttccgtcgtcatcaaccccgaccggagatcctcacccaccgtcgttgccctcaacgccattgaatccgacatcaccaatcacgacatcgtcgaccaatcgtgaatcttgcacaacgtcacatgaagcaaattcacctacaagtccaacaagcctaaattcacctacaattccaacaggcccaaattcacctacaattccaacatgcccaaattcacctactaccacctccaaaagcccacctacgtccaccactagcccatctcactcaagtcagcccaacaacactccaccaacctcaccatcgtcttcttcctctgttccgaatccaactccctctccctcgccatcaccacccccaccactccaaaatcaacactccatgcgaacccgagccaaaaataacataaccaaacctatcaaaaagctaaccctagccgcctctctcaaagccaaatcaaaaatcccatccactgtggctaaagctcttcgtgatccaaactggagaaatgctatgtccgaagaatttaatgctgttcttcgtaatggcacatatgagctagtcccgtcagaaccacaccaaaatattgttggtagtcgctggatttttacaattaaatataatcctgatggctctattgataggtacaaagcacgtttcgttgcaaagggcttcaatcaacaacaaggcgttgattacacagagacattcagtcccgttgtcaaatccacgacggttcggacggtccttgacattgcggttaaccgttcatgggatataagacaacttgatatcaacaacgctttcttgcaaggtcgcctcacggacgatgtttacgttgcacaaccaccaggattcatagatccagacagacccaaccatgtgtgtcacctcaaaaaggcgctctatggtctcaaacaggctccgcgcgcctggtatcaagaattgcgtgggtttctcctcacatgtggcttcaagaactccgttgctgacacgtctctatttgttcgtcaacacaacaaagactacatctacatactagtgtatgttgatgattttctcatcacaggaagtaattccaaccttatcaatcaatttattaaatgcctggctgatcgcttctctttgaaagatttgggtcagctgagttattttcttggaatagaggccacaagaacaaaagtaggcctacacctgatgcaacgaagatatgttctcgacctactcaccaaaaccaacatgctggacgccaaaccggtgtctactccgatgtccacaactcccaagctgactctaacatctggcactcccattgacaacccgggcgaatatcgacaaatacttggcagcctacagtatctcggattcacacgaccagacattgcctttgcggtcaaccgtctctcacaattcatgcacaaaccaacagatcttcattggcaggctatgaaacgcgttcttcgttatctagctgggacaccatccgctggtatttttcttcgtgccaaaacccctttaacacttcatggttactccgatgcagactgggccggtgacaatgaggattatgtttccacaaatgcatacatcatataccttggcggcaatcccatttcatggacatccaagaaacaacgtggtgttgcgcgatcctccacagaagctgaataccgcgccgtcgccaatgcaggttcagaactccgatggctcatctcacttctcactgaacttggagtaccgctgctcattacgccggtcatctactgtgacaatgtcggtgccacatatctctcggccaatcctgtttttcattcacgtatgaaacatatcgccttggactaccatttcatacgtgacaatgttcaagctggaatactccgcgttgcgcacgtctccaccaaagaccaactcgcttactctctcaccaagactctctcacgtcaacgattcactgagctcaatagcaagattggagtcattcccctgcctccatcttgagggggtgtatagaggttatgtataaatagggtataattgtaattagtattaccctagtctctcttgtaactagcctatatatattgtaattacaatctctaataatattaaggcattacactataataacaactcaagaacatgaaataaagaaaaaaaattaactacctagtctgaaattggttataatcaagtaaaatatgatacatataatggatatataattaaccctgatatccctttgataaaaaaaaaacttaaccatgatatcctataggagcataccatataacgaacttaatggtaacacaagttttttgaaaaaatgaattgtaattgataattttatatcttaagttttcaaaaagaaaaagatataagagtataaacaacccatccaacttaaattaggttttctttaagacaatgctttttgttcttttttggtataacccacattaaaattccactaatgacaaatttaaattcgaaatgacataaatcatgaaacttttatatactaatattaagtggaaatgaaatatgattcgtatatactcatatacatttcattataaaaacaaaaactaattatatacatttgatgcgcaatatttttttggttagctttgatgcgcaaaatcactactatagtaggccacatcaaataaaatcacaataaattgaaaaaaaaaaaatggagacagacgcttaaaattgtaataaattggtgataacattttgtctagacaagtttaagcccacgtattgaagtcatcaacatggcacgccaattttgtttttctaaaattgtcccaaaacccaacatttttgaattatatatctctcagaaaacttgcgtggtcatagaactttatgtgcacatgcagatataaattgtagaaaaaatgttaaatgacatggattgattcatcatttttcatcttgatcgggtattatgcggatttcacatttatttgtatattcaaatcaaaataattattttccataaattaagttagtatgttttatttggggaaaaatgttatttaatcccccaactttaaaagaatggccattttatacatcaacttcgtatgtgaccgtttaaaacatgaactaaacgttgactaatttttaaaacatgatctttcgttgaccaggccaaaataaacatgccgttatcagtcattaacggaatttctaacgtccgttatcatccgttaactttataatcaagtttcaaattgtgcccattttaaacatcaacttcttatgtggccatttaaaacatgaactaaatgttgactatcatttaagacatgaaaaaatcgttgaccaggccaaaatagacatgtctttatcagtagaacctagaaacccgttaatgactgttaatctgtccaaaacaacgtcgtttgagaataatcgaaagaacgtcgttttaaaaggaatcatgtaagcaaattgaagactcattataagattgttcgtcttgtttgagagttgtagaaatagatttggggaactgggatttcatttagaaaataatcctgattttcttttgattattcttaaaacaaagtcgttttagggatactaatagagtcgttaacaagtgataatgaatgttataagttcttttaatgaataatgacaacatgtttattttggcttggtcaacgaatttctcatgttttaaatggtagtcaatgcttagttcatgtttaaaatggtcacatataaagtcgatgtttaaaatggccacaatttaaaacttgactaataaagtcgttaacggatgataacggacgttagaagttccgttaatgactgataatggcatgtctatttttgtctggtcaacgaataatcatgttttaaaagttagtcaacgtttagttcatgttttaaacggtcgcatacaaagttgatgtataaaatagctattttttgaaagttaggatattaattgacatttttcccgttttatttgaagtctttctttcttagttagtctatcatatggtgtacataatttagttcgaattttcaacctagtggttaaaatatactaataagttggctaatattaaatggcactgacttcttttacagaaagaatattaaataacgttaccgtactttggtaacgtaaatagaaataacaagtgaatattagtgatttttcatcttataccaaagattcaccttgggaaaatacgtattatgagggtaaagggtgtattttaacttcaactattttaacggtgctttttcctacttataccataagagaatgtttatttcaaccttaactattaacaaaatttaaattaattatctcaactcataataaagtgctaaaatctatattgactaactttgacgttagttaaccgttaaaaaatgctgacgtgacatgatagatctgatttggcatgacacatcgtcagctatttaaacgttggcgttttgatttgttaagaattaagaaaaaagcaaaaaattcgatttaacggggattcgaacccaggacgattggatgcataaacaatgatttaaccagttggactgcgagatatattcaatacaccttcccaactcatttatttattacaatgtttccgtttttatcattgttttctaaaaatgcttttaccaaaaaaaaactctagaattttgctgaaattttataaaaaaatataattatttcctttaataatgtttgtaagtaataaattaatataaactgtttcaaaaaaactaattccgtattaatttagatatatccttaactaatatatatataatattatttggtaatatatataatattattttgtaacattctctttatattaatatatatataatattattttgtaatattatttctctttatattagttagggatatatcttagttaatatgaattatttttttaacatttttattaatttattatttataaaatttattaaaggaaataatcaaatttctttttataaattttcagcaaaaatcaggaggttttttgtcaaagtgtttttggataacaataataaaaacgaaagcattgtaataagtagatgtgttcgaaggttagccgaatatatctcgcagttcaatcgtcccggttcgaatccctttagaagcaaatttttttgcttttttttaacaaatcaaaacgacgtcattttaaatagcagatgatgtgtcatgccaaatcagaccccatcatgcattgtcagcactttttaacggttgactaacgtcaaggttaatcaatgtatgagttaaggtagtcaatttgaattttgttaatggttaaggttgaaataagcattctctcattgtatgggtaggaaaaaacaccgttgaaatagttggatttgaaatatgccttttgccccctaaacttaccggttaatccacaatccaaactttttttggtttgggtttagtactaaaaaccggtaatttcaaactgggaaaatccgtcattgatctgcttaccggttcaactggtcaaatatatatcgtaaaaaaaatcgttgagcagcttcattgccggagatgacgatagtcaaagcagctccccaagtcctggacatggtcaaaactctccaagccctaggcgttacggccaagtcaccccaaatcctcgattccatggttatcaagctggtggaagctccggccgtaattatgatagccccaatcatggacgtggtacaggtcaaaactccccaaaccctgggtgttacgaccaagtcaccccctatcaaggaagtgctcaattttatggttatcaagcggattacgccgacggatatcaaggaaatctagccggttatgatagccccaatcatgaaaacatcgacggctatcaataaatcttgccagtccagcggttatcaaggaaattttgccggctccggcaataaggaaatcctcctggttctggcggttatcaaggaattggtaatgtaaactccggtggttatcaagtgaaccaaaacagttatgaaaactcttgtggttactatcaaggagatcaagtgattaatggaatccagatggttacagtccttatcaaggaactcaaggtggttatagtaaccctaaccatggggttatggagtaaacgccaatcaaagcggtgcctacaatgaatgtctccaaatcaaggatgaagaggactaggtgttggtggcggtggacggcggtactcggagatcccctctaataatggttttgtgttttaagaatattatgagaggcagttgagtctttatttaaagatttgatatatatacatataaaattatgtattctaagtcaaaactaatatgcatcggtaagaacaattgtacaatccttgcacaactattgatcacatcattcataaactgttttacatatgcatattataacgatcatattagtcttggtagcggccataaaaactatgatgacaaaactagagttataaacagtttttcttagttttttttttttttttataattccaaaacatgctccaaattaatgtgaatgaaaaataaactaaaataaccaaaaaaatattaatacaagaattttattacttcaatgaaaatatattgaaaatagtggatgatggtatatagtttatacatcggaaaacaaaaaggagatgtgaatattttgaagcaagtttcgggaatagtaaacaaaagactagttaactacgaaaaaactgtattttgttactctttttatttctagctcaaaatatgtcaaatattttagttttcaagaattgtgtaattgtactagtagtagtcatacgtgatctatttgaggatttggactaggctaatcggcttttgtccattgatcgtaaacatttatcagttgccaatttaacattttgttatgtatatttcaactctgactatttgcacggtacttctttctacctatacaataaaacggtgcctatttcaattataactcttaacaaaattcaaattaagaacttaaactcttattataagtgtcaaaacctgcattgactaactttgacgttagtcaattgttaaaatccgctgacaaggcatgacgaatgctgatttggcatgacacgttgtcttttattaaaacgacgtcgtttaattgatttaaaaacattcaaaaaatttccaacaagactcgaacatgtgacatcgacgaagaaaagaaaccgctgtaaccaatacaaagagatctttttgattattcgtaccaacatatgtatatattcgtattattccgttatattattattggaaattatgtgatttaggcaaaacaattattagggttactaataaacaaatcatattgttagattcgttgaaaaattattgaatttcgagcataattttttttatataataataaattaattgaattgtatatttatttcttgtttatatttgtttttgatatagataaacaacttcaacttgtataacttatatatacaaacgtattaatacatgtatatattaatatatagagaaactattacgaaatatattaatcaggaatatatcttaattaatacagatcagtttttgtaatagtttgtactaatttattaattacgaaaggtaataaacaaatttctcttttaatcaggaatatatcataattaatacagatcagtttttataatagtttgtaccaatttattaattacaaaatttattaaaggtaataaacaaatttctctttgtaaattttcagcataatttcggaagttttttttgtcaaacatttttggaaggtaaccaaaaaaatggaaaatgataataaattgatttgttggtgtgaataattgaaaagttctcgaagctcaactggtcacagagcttgtactggtgtgaataataaattttgtgatttttcaactaataaaaacgacgtcgttttagtaaaagatagcgtgtcatgccaagtcggcctccgtcatacctcgtcagcgggttttaacagttgattaacgtcaaagttagtcaatgcatattttgacacttataataagagtttaggttggtaatttgaatttgttaaaggttaaagttgaaataaacaccatctaattgtataggtaggaagaagtaccgtacaaatagtcagagttgaaataggccatttacccttattatcaaacatgtgtatattgagaaagtaataaatataaattgtttttgaattattttgcgtttgaaccgtccttcgacgaaatttatctttctctaatatagttaggccatatcatagacaatataaacatttttagtatataacatatcttaaagatatcaaatggtcaattaatggacccatttatctaagaacatgtgatttcaacatctcgtttctttgcgtaaattacttgtttggaaagagttgaatcagtgttatgggtttaagaattatttagttaccaaatctgtacctctttcgattggaaaagtgtgatatagtctatgaagtatagttgacaaaacaaattcatgaaaatatattggcgcttgcattaggaactttgtaagatagttaataaacggaaaattttattaaagttataaatctgttactaattagttacaaaatatatatggatacacacatatattattttttataaattgattaactattagcatgtacgttttgtcaaatgtttttgcacgttttatcatatttccgaatgaagtcttaatccatactcaaatttggtagaacactagtacccattctcacatgcatgaagtatggtggttggaaaatattgactttgacatgacgctatttcagctaattgtgtcggtgattaaaaaaaatgttccatatcactataacttatttagatttaccttctaattaaactaatgtatataatatatcgtacaccaacacctaaaaccaatcttcaagtcataaaagaaaacttgtgcgtttttttgctatttatggtgtttatatttttttgtcaaacagaattttattatttaaactttaaatgaggaaaactatacaaactgaaactaaaatgatataaaagaaataaaaatgtgatttttctaaagacatgttcactttcaattttttttacaaagtctgaaaaatctgttagaggtctttgcggattcaaccataaaaacgagcttcacaaaatccttgacaaacgtgtggtcattgacggctagcgcggataacgcatacgaatttttagaaagatgttccacatgaaagactgtcggatatagaaggttggagaagacgcggtaatgacctcctaaggacagtgtcataatgtcgctcgtttccaagctttcacaagtttgcaaattattcaaatatttgatgattacttgaatgagctcgataattaccggataagaagatagagagttgaagaatctatggtaaccaccgctccattgagacggggtcataatgccattcttctccactcttgggcaattggtactgacttggaatagaaggctcagttagggtttgtaataaactttccatctgacttcagccatgatagctatcaaaccattctattgtcaccctacaatctggtcgcaatattcatctctggctatgctttgtgaatgcctaaacttgctggctcttgatcgacggtgtgactatggttatatatcgtatttgcccatatccggttacgagataattctgtcaattttaatctatgttgtagcttttgaccctgttttggctggtctaggactccacgctaccaccaatggtgatgatgcggcggttacgctgagatgaccataggattggagtagagacacttgtcgtcgagattgaaagaggcggagtagacatgttacacgaagttgttatggcggaaatggattgatggtagacaaattcagccttcgaattaattcggatctcaagctttgaggtggatctgggagttaaggcttcgccacaggaatgggtagagcctgaatctggaagaggctcaccacaaaactcctatgttttctgccactatcaattgagcactcgttgaaacttgtggattgaaaagaggttcgagaaaattgatgaaagttttgaaaagattgagaaaagagcagaagcaaggttaaagcggaatagataatgcgaaaaaaggcaaaagaagagacaagttccgacgccggtgagctgaggctttaccaatgccagaaaacatgattaacgagtgtttctcgatattcgggcttgggagagtttgtaaaaataagacactcttggtaagatgataagtatacaaaaaaattatacttaatttttatgcggtttatactaaccaagagaaaactagagtgatagtcctctatcaatcaaacaacaccacttctgttttctgaatttcaaacaaacaacacacacacaaacaaacaagtgaacgtaccattttatgaagctaaaggtaaactacgttagttaataattgtatacggttgattaagctaaactaattcatatatatacacacaagtacaatgtacacgaaacaaaccaatacacacaaattatacgtaatttctctttttctatgatcaccatcttgatctttaagctccgctttagctttgttacgttcttcatccaataaatgtataatgcttttcttaatttgatagaatgatagtcaatcatgtttttaagttcaaacacagcatatgaaaatgatgtttcctaagtccttatgttatgagactgatggcattagcatatatattgtatacataaagaaattgtgtatatttacaaagtcaagtgtctgatggaaattttaaaaaaatatttatcataaaataaaaaacacataagaagtcaaattaaagcgacccaataacgaatctaacgcaaaattatatacggcccggacatttcctcacgatcgtcgttgtgtaatggtgtttcattttgataatgtagtcgaaggtggtaatgatttattaaatactatacacgtaacgttgctaagtatctaattatattatataaaaataaatagaaagataggtgatgatcgtttttatttagttaagttactgcagaaataatatttgtaattatatatattctttgtggtaatatgtgaaatattttaagtatacattttagatagcgttgatttgttcaatatgtatatgactatcatgatttattttattacatgttttacatcaaatttagtttcttttccttaatttacagctaagacatgtaccaagtcaaagtcaactttttgtaccccaaagaaagtcaactttagcccaatatgttgaagagtatcattccgttcatattacttgcgtgacatacatattatcaaggatcaaaattacattgttgcatccttttctttcaaatttgtatcaaagatcaaaacatattcttacaagccaaaaataaacaataatccgtaaaaacaatatagtgttcgtcactttaatcaaaagtccaagatccaacaagtgaaataaaatataaatgaaacaagatgctcatagatatgtatatttgtcatatacataaacaaaagaagaaggtttgatttgcttatacagaaatattgttatttaaagagagatgaaaccttcactgacaagcaagccaaagaagaggacaaagaggccagcgccaatagacttgcccggatcaacatatgtctgagaataagcaccgagggttaacgcacctccaacgagtccgatgaccagagattgcatgtttcttctgctcacgcttctttgcctcggcttcaccttctcttcttgatctacaacttcttgttctcgtttctcttctactttctccgtctttcttctttctctcaccatttttaagattctttgatgaatgaagagattctgattatgattttatgatgttggtttggttgtgattttgtaattataagttaatgatggagacaaaaatgtggtcttttggggattgctttgaggccttttgatagacagaaaagtcaactccttatagaagagtaagtggtcggtatagatccaagattattaatttaattactattttgttataaaaaagcaaatggtgagagttgaagtttagatatgatgtatcatgtttacacttatataatgttagtctaaaaaataaaataaaaaaataataattatcactatataagttattgccattctgtctaaattttaacaggtcagtgaattaaattaatattattaacaataagatatgttatcatgtattatcaataagaaatctactaagacatgttatcatgtgcgtaggagttttggcccaataaatgcttgtgcactccaagaacatcacaaaggatgagaatgagatgcattcttgctcttcgatttcttaataaatgtataatattgacttttcttggttcaaaagtttgtttttatctgttgcatcttgagtaggaagagatatttttgctatcttggatccacctaccaatcttgtttctgaccattctttctattcgtttgcaatttggttgctgctaagttggatcaaaacggctttattccatagtttcaaatgcctagtgctactggcaagataaagcgaaggaaagtacgcagagcttagagcttagatcttttcttagttttgtttacttacctatgatggagttttataggagtacgaataacgcatgcaagaaaactgaaccccttatagatataaagatgtacctttaaaaaataaaaataaaagatgtaccttgacacatagactaattggaaaacttacaaaaggcgtttttttctgtgtttttttgattaaaaccacaataccgtaccaatcacaatacttttaactgatttgtgtttttcgaaaaaaaaaaagtttgcgatttaatttgtcaaatgaacaatacattggaacgctttccaaaagaagaaaaactctttacctagcggttttaagtaaaagtgcattccaacaaagagatcaattaattttttaacagctgtttatattattatttttgtgccaatgttgatttcaataatagaggaaactaaaccggataaaccgggtacaaagaaagagataaagaccagtcttagctagtttgttttatttaattaaaaactatgaaaatgcaattacaggaaatagaaacataacaatgcttttagaaattttgacaattattatctactataagcttatatacgttctataatcaatttacttgtaaaaaaattacttgtaaaaatgattttttttttaattttccataatgaaactattcaacggatttaataatatgtatgttaaactttaaaatgtatattttgatttatttgtgtatatggtttataaatatatgttattgtttatttattaacacaaaaaataaataatgattaatatatatatttatatatatataatctataatccgcaccacaaatagatttttcaccaatcaaacattattccgtactgcttattttgtacaaaccacaattgtcccacaaatatatttttcacgcacttaccgcagttaattcgtactgcacggtcataatactttctccgtacactaaaaaccgcggtgaccattcagatccatagaaatcatccatcgtaactgtaacgagacgacgaccaccacttttcatggaccaaacgttttttctcggtatatgggccaatctcgtctgacagttcatttttctggaagcttaaatatttgtttactgattctataattcaccatataatctttttcttgtgtttgttttcactcatacgaactaacaatcgattcacggttaatcacccatcataagtttgctttactttaaatgcgcttaactttagagttttctttagatttttaatcaaaaaaaaaaaatagtgcattttaataacatatatgaccaaatcaatttatttaaattttccttatacaccactatatttcaatataagtagtaatatagaagagagaacaattaatttatgcatgtaaatccacacaatttttactaaaataaatagattagatgagattcttgtaattataaaaatcgtgtttactactacgttacaacaatctagacgtaaaattctactctttcttctatcgatgtgttatagattgatcgacaattataacaatcttgaacatacatgatatagagtttaaactctagacgtagaattatatctggacaagtcaggagctaagccacaatgtgttgctctagttatagttatagtacttttcttaagttagaaacctcaattgcttgaaagctcaagctcttgcccattgcccaatatagaactaaaaatggtttcaatggataaagtcatataaaaagctttatattttcttcttatgaaattctaaataattagtttaaggaatggacaaaagcgtcatcagtgatgtgataagatcgtcttatcgcatcaacagaatggatgggaaaccacaagtgaaatgtttctggtcaaattgaaacttggagaatattaaagtttttgaaacagaaagatttaataattatatcaaatctttttaaataaaaataaaaaataattatatcataagaaaatatcttcataataacatcttaataagtatcctattgagttacgcatctttgtaatagaaaccaaatacaaaataaaccaaatcaaaatttataatatttttttggaaccttgatacattatggttggttcaggtctacatcagattgtatatatatacttaattataaaactgacatattattatattttccttcggataatctaattaaaatacattttagaaaataatattttgataccaaacagtgaccaattattggtgaataaaaactataataatatttgttcttcatcttatacaaactagtataagagcttggttgctcaaaccattttctcttctctctgaaaagaaactcaactttttttctttatctttaacatcaaaaaactttttcgatatctttacaaccattaaacaaaaaatttggccactacaagttgaaaaagttttgattatatctaatcgctgaaatggattacaaggtatcaagaagtggggagatagtagaaggagaagtagaagattcagaaaagattgatttaccacctggtttcagatttcacccaactgatgaagaacttataacacactatctaagaccaaaggttgtaaactcttttttctctgctatagctattggtgaagttgatctcaacaaagtcgagccttgggacttgccttgtaagttataggtcatttattttctaggtttttaaaaaccttctatgttttgttacttctaaacactgtttttttttagggaaggctaagctt

SEQ ID NO: 481 - DNA, 18212 bp, Arabidopsis thaliana
ggggaaaaagagtggtacttcttttgcgtaagagaccgaaaatacccgactggtttaagaacgaatcgtgctactaaagccggttattggaaagctacagggaaagataaagagatcttcaaagggaaatctcttgttggtatgaagaaaacattggttttctacaaaggaagagctcctaaaggagtaaaaacaaattgggtcatgcatgagtatcgattagaaggcaaattcgctatcgataatctctctaaaaccgctaaggtaacattaatatattaatatatatcatagttcttctctgtttttgttgtgacatgatgttttttttatgcaaagccaaaggtaatatgtatattgatttataatgttttcttgtgttgtttgtggatgcagaacgaatgtgttattagtcgtgtttttcatacacggactgatggtacgaaggagcatatgtccgttggtttacctccgctgatggattcttctccatatctaaagagtagaggacaagactctttagccgggaccacccttggtgggttgttgtctcacgttacctacttctccgaccaaacaaccgatgacaagagtcttgtggccgattttaaaactaccatgtttggttccggatcgactaactttttaccaaacataggttctctactagacttcgatcctctgtttctacaaaacaattcttcagtactgaagatgttgcttgacaatgaagaaacccaatttaagaagaatcttcacaattcaggttcatcagagagtgaactaacagcgagttcttggcaaggtcacaattcttatggttccactggtccagtgaatcttgattgcgtttggaaattctgaatttggaaaatcgaaaatttggatgttaactagggggtatatagggtttttaaaaacagtgtatatatgcgttatgtgttagctttagattctaggatatacaaagatgacactaatagattcttataacattttgtaaaaaaaaatcattgtagtgaatactctcttgccatttgaaatccattgtgtttgcatatttaaggtgttcataaattgtcatgctgaattgtgtttgcatattctcattatttccctgtttgtaattaatgattgtaacatacctaagtagataatattagattaaaaatatgactagtttaccaaattttacttgttacattttgggttcttaatcaaaatcaaaaggctgcaaatggttgtctcaagtagaaaatattaagttgaaaaaaactgagatcttaataaaacttctgataaacagaataaaaactaaacaagtgaaacaataaggcttcatgatgaaaagtgaatttcaggagattactggcagcagagacacgaaaaaaaaaccgaaactgattcgggtcgggtcataagctgcaaagcggatccctaattttgatatatgcacataaaattattagacagattccccaattgtttttacagggatgtcccagtacttgtgcaatcataaacagcctttgatactcacaaaaaaaaaaaacgaaaataacgaagaagatagaaacggcggaagaacataagtgtgtattgtcttttagaaactatcggtgtgataaacaagcttatatataaactagtaaaaccctaatcatgtgtttgttgatattttgggcttttttgacctaaatattaatgggcttttattatatgtcaaaatgggctttgttttttcattcacaatcccgagaagaacttactcatttcataagcaaatcaatcattcacattttcgaatatataatttagtcatctttgtatatcctagtcatttttgatttgctatacaattataattccaagtctatctctttatgataattgccaaaagacatttctaagggaagacacggataaataccatttctcgaattgtaatctcaataactctcaataatagagggtcaaaacctctttttcttatgccaattgccttcaagctttcaatataaaaaattgtattcatatatatatatatatatatatatatatatatatatatatatatatatatatatttaataggagcaattaatctcaactccaaagtctcctactctacagaaattattactagtttgagtagtttatatgtaatggtatcaacccactcttatcaacaaagcatatttcccaagtcaattttgagatttaaataagtttttatttccggtgaaaattattattaatctgtggatttccaacttgaaatcaaattgagtggagagactcatatcttatatatactatttaagattctactcaattttcaatgtgggacaatatctctaatacgtctcttcgagataatggttcttctggccattcatctcgatatgttcagacattgatcagcgggtcaactactgattgagctgatgtggattgggttgagcatgtgcagatcgtggtatgatattttattagattgtaggcttccaactcaaaactaattggcaataaatagagaaatccatctcttatatatactttttaaaattgtactcaacttccagtgcaaatcgtactcaacttccatgcaaagccgtgccggccactaaccataaaccatttttttaggccacaattccaagaaaattgtgttactttggttggtttgagctgactcaaatattctttatgcttcaaattcaatctattttagtgacatttattccaatatataatttgaacatttggttttgtattgtttttgttatgctttatttttatattttaaaatttcttcttatatatgtatatataatttagttttctttaatttattatttaattatttaactagacaaattggaacatatttttttttgcccgaaatctcagcagggcactgttccaatgtgagacaatatcttcaatctacctattttgaggaaaaaagaattcttgttattacataatatactaagactaccttcatttcaggttgacaccgttcgtgtcgtgtgaccattttatcggccctctcttctcggcgcaaataccaagtctcaacgtccaacttctctcttctctctcacagacagactaatatagaatatgtgttatatatagtaatgaaatgatcaatcgaatttgtatactaatagttatcaaattattaaaaaagtatcagctccacttaagatccaaatccctcatcatcaactctcctatataaacattcgaactcctgacaattcatctcataaaaaggttataaaaaaaaaaggaaagaaaacccaaacaatgtcttcaaatatattggccatggtggccatgcaactcctccttatacgcatagtttcttcccaaaacgttacgaatgagtatttgaaccaccaatgcaacaacacacaagggacatacacgcggggtagtacgtttgagaagaatctcaaccaagtcatccgtaacatctctcacctccatcttcgctacggttacacctacaactccaatgttgaggcttacgaagttagtaaagatcccaacattgtcttcgttttgctccagtgtcgtggtgactcttacgggtccaagtgccactcctgcctccacacagccttctctggggtaacttcacttcaatataagtcacatatttccatatatgaacatatacacacgtctaatcatagttaagtttgagagataactatattaatttgatttcattgatacaactgatatacatcttaacgcaagtagaaaagaaagctatatgttatatgtagattattccatgcatgatcggtgtgtatataattgtatatatatatgactagcttcgtgagagatgtcggggaaacaaaggagcaataatatggtacgaccaatgtgttttggagatttcttccgtgaataccaaggggaggattcgttacgatagttttttcaatatgaccaacgtgaagaatgtgagcagcaatgcggagcagtttaaaaataaaaggaaggatctcttccacaagctattgttgggagccaccaaggatgtaagcgacagcaatgatgcgtacgcagtgggggagacgaggataggaagaaataagatgtatgcaatgatgcagtgtgcactagacttaacgacgaatggatgctatgtgtgtctagaatggattataggcaggtatgatagcttctactttgaccgtagacaaggaacgagagttttgagtaggagttgtagcttaagatatgagctttacccttttcttaggaggtaaaagacttttagatgcatgagagctccatttctctctaccggacctctcaagtttacttgtttgattttctcttttcttaaagagatagaaaacactcagcaaaaatagtatggtatggagacttcttcaaacaattatttacgtcgtatatgttttatgttgttttatatatatatatatatatatatagcttttatgtaattgtcaatttcatcatgatcctgttcaatgatcaattatagatgatagtggatagaaaaataacattgttgaaatgaggctgagttgttaattttttttttttttggatgatgtaattttgtgggaggatcagaagaatagccataatattgttgagctgttaattctaagtgaaataaccatttatgaatatcttacgcatgcaaaaacgtaatcagcccacaacattgatacacttcactatataacgtcttacatttatcatcctcaagttttgataactaaattaaaaggtcatcttaatcatcatatattccttatacctgtcgagtaacctctctatccatttagatcaacgtactattcataatttcatatcttcactgtgccatcttaatccaaacttgttagaagtaatgtcctaaggaactataaaatcataaatcttatgcttaagtcatatataaatatgtttaacacattattatataacaaaaagatagttttttttttttttgttttcttaattcaaaaacagatgaaatttttatgtatagactagcattacttgcagactacggtttcagctgcaactgccctaaatgagctttcataagaacatatcattcaatcttttctattgaaacatgactattgaatactcttctacaatgattctctaattgatttaaaaaaaaaaaattcccaacaaaaaatactttaaaaaaacttacattttataatctcctttaaatatttaaaataaaatttgattaaaactacatcgttggatttttctaaataatacaataattcatgtaaaataaaagttagagattacacaaaaaagtctgaagcaagcttgctttagaacttcaaatagttaggactggtcttggcgttaacaaaagggtaacgctcaaacctaaagttacagctcctacccaaaactctagcaccttttttcaaacctactggtttatcttcatagcaatcttgaaattgccggacattatgattcacacactccacacaagccctaggagttaagtcatgcgtacactgaaccattacatagatcttcttatttccgaaccttttctctcctgccgcatatagtgccggtttctccacatcttttacgaagttatttcttttagtgacggctatatttgtcagattttcgaagagtctcaaaaactccaaaactgaatcatcaccggtatgagttttcgcattcggccttgcccttgcggtatcaatacagatattgtcatcgtaattgatcttccctccagtactgatcgaagaaaactcgagaaaacattgatcgtaccatattattgccgccttatctctcggacatctcttaaaaagctgtcatatacattttgcatttcaatgtcacaatcaatatcaacattgtatagactaatttgcatataattaagataatttttcttgtctattatacgttcatcttgaagatgatacaaaaaaaatgacgtgcgtgtgtgtgcgctggtagttacctcagcccgggcagtggcaaagcaagagcgacagtgggacccgtaaatgtctccacggcattgaaaggtgatgtagacccttacttcaggctcaaaacgtattgggatattattcaccttcgaatcatatcccgtgagtttagcaaattggagtatttagttaccttaatcttcactgtatattctctccgaatctgttgtaattatgttcgtgtcttggtcattacgcctttgagaggtatatatgtttgtaatcgattctcaatgaaatacacagaaatctctttcatcttctctcttctctgattctttaaaacgagttccattaggatcggtgtggtccatatagacgaaaccgccacgaaaaacttcattatctttcgacaattgttggatgccagaatcgagggattttttgtagaggcttcctagcttgtactccccttgattggctgagcatttatggtacaagtacggattgttcatgttcaaggacaaaacgtttcggataaggagcagttgtgccatcatgaccaagataggaactaaaatgaggtgttttgataaacagaatgaagacattgttttggaattttttgtactaagtgtttatgtaggatattcaaagggattttttaaaaagttatatatatttagtttacaatttttggtcatacgaaattcgattagtttttaatagaaatgtgtatatatagagagtttgtaatgaaaaagagagagaagttggtatttgcggcgacaaaagagggcgaaagaaaaagtaaaagttcaaaggtatgactgagttcaaactctttcaatcgcacgattgtaaggtgatgaccatattggttaaatatagttgcatatggaaaaacccacctagaaaagaactattgtaagaatttcaaaagaactctttttgtgtaatagatgtggacattttgtttactaggtcgtcaagataattataagaaattatacctatatttccataagagatcttgccttttggcaaacaaactttgtgtttttaacaacttaaaatttgtgaaaagatcctcctaattgggctaccattaatcaaggagtgagtttttaattaatgtatggatgaaaaataaaaattagtgaaaagatacttataacaaaattataaacataattttaaaaatataaaaagattattataaagaaactatacatatataaggaaattatatgtaaccacaaaaatcaaaattataaaataattctgaatttataagttactaaatttacaataaaaaggactaatgacattatacaatcacttattaatcgtataagaaaaaggattgtaaatagtcacctctatataaacaaatggattgtctcatatgttgtcaccaagcaaactaactttttcataaacaccaccattgttttaacttcattctagtggtaaagcttttttttggtcatctatatatataggttaatttagtaactaacatttggctcaaaaataattaagaatatagccatgagtcaaaattattttggaatctaacacttttcagagatgtaataattttaaatggccctcaaacaatagaaaaacatacaatatcatattataatttggtgaaaaacatgaactaaacactaataatactatagggggtgttattcgtttatgatttcaaaagagttttaatgacttaaagtgtcatgtagaatctgttgttattcaatcaagattttgttaaaagaatgttaatgttttgtgttattcatttaagatttgtaaaaagtaatctaaaatcttcataaatttggggttattggattgatactcttataaagttagtaaaagttttgtgttattcaattaaaacaaaacaaactttgattgttaatgatttaaattattgggtgcaaatgattgtattaaaatgagaagtttaaaatgttgaatgactattcatctcatttttttccatttgaaatgattaggttggaaaattgattcaacccattcgagtaaaaaaaattgaaaaaataaacaaattttaaaggaaaattgttcaaccctttcgtctactattttgcagaggaatgagttaaataatgttcaactttgttttgttcaactcaaaattttccaatcattcaactatatgtcatccatttggagccattatgttattggttcatgactttttacatttttcttcataaaataaagacatagaaaatcatgaaaagtattatcgaaataaagagattatttgaaaaactttacaagattatgaaaaactaatcaacaagattataaaaaactctctaataatactttagaatctttcatttatttactttttaggatttgattgagggtatcaaaattccttgtaaactaggaactgataacacctccttaatcataagtttagataacaaataaaaaatatgaaatataattatgttttattttaattaattttaggagatatatgatggatcataggctcttacattgaaatatattctcaatgtggctacaaaattactatgaacaaggctactgtggtgacgactataatttgagaggagaaataatctttggggatgttgatcagaatcactttgtcgatgagcatatatacttcaacctcattgaaggtaatagatggatcaaatggatgccttccagccaagtcgacggatatcatggtaataattaattacaagaatgagtgtatctatatatgtgtgtttttagtacatgagatttacttcttttttactcttttttttctaggatcactcacccataaagctttaatctatacataatgtctgcatatatacggtcctccggttagtaaaggatttaattttgttttatttttattatgtatcaaatactctttactaatgcaatttatcatttctatttatatatgtagctcattatccgagaaattaattctcaaatttgtgacatgtaagttttatttacaacattttattgttatttgttgttttatgttaacgtaacactttatctttttttttttttctcttttctaatcataggcaccccttatgcaaaggatgatatttacaaataacgaagtggcagcggcggtagcaaattatttgcccgatgtacatttttatttcactgcggaggattatctcttcatctcgtcatgtcaagtacgttttgtttcgtaaattacttatcaattaaatgtatatatcaattttctattctaatgcacatttaaatatataaaaatatagtatatcatccaagttggatacgtttacggatcctcgagtatttttggacctgtgtattttccacatgaaattcccggatatttatatgtttagttgtatatttttttatatattatataaataaactattagtaacattatttgctttttatttatttatctacagtatttttggaatgccttttcttagaaaatatcatatgatctttgtttatgacaccaccaacgaagacgacgtgaatgaccaagatggtgtggacgatgtgaacgatgaggaagacatggaaagactcgttcactcatggacattatgatgcagcgtatcacaattatatcttttactttaagctttgttttatttttgtaagaactaactaagcttttatttttttctttggtaatgggaactaattaagcttttaagacctttcatgagtgtgtaatatttaaccgctagtttttgcgtttgcaattttatgcatttgacgctaatcacataaattgtttgtacggtttcgtaacattttgaaatgcttaacattagaatctcatttcatcgatcctttattatagtaacaagcgattgttcttttttttaaaacacatttggaaggaacggaaatttgggggtgttattggtttatgattttaaaagagtttagtgacttaaagtgtcatgtacaatccattgttattcaatcaaaaaattttaaaagtatgttaaatttttatgttattcatttaagatttgtaaaaagtaatctaaaatcttcataaatctagagttattggattcatatttttataaagtcagtaaaagttttgtgttatgtaattaaaacaaaagaatctctgattgtaatgaattaaattattatgttattggttcatgactttctacacttttcttcacaaaataaagtcatcgaaagtcacgaaaaatattatcaaaatagagagattgtttgagaaactttacaagattatgaaaaactaatcaacaaaattataaaaaaactctctagcaaaagtttggaatttttcatttatttacttttaatgatttgattaaagtcatcaaaattccttataagttaggatccaataagtttagtttggagcaacactatttatttctttaaataatatcattagagatgattttacaccaaaataaagtttggaacaaaatttgaagcaccattagagatgctctagttttggttcatctttgccatacaccattccttggttattgcgatgtaactattatcatttctatagttttgaaattatatgtgaataagataagtattgaataaactgttcaaagtatgaaacccaatatacatttggtgtattcatcattaatttgctacattcacaaagattaaacaccaagagattaatttaatttgttgaaaaaattgaaaatagtcaattttcatatgatgtagttatgaaattaatccaaatttagctgttttttttgtatttgtttttggagatgttaaaattttatttacacgctcttacttcctccaagttcttgaaaaggcaaaggtacagacttgaaggctctgtatttccccacgttgttcaaatgctcattctccaacctgattacaaaaaaacaaagatcattaaaattcatcatccgatctttattttcgataataataacctgaaatcgagttttaagttagactcgaacctgaaaaagttccaaatgccacgacgaacaatctctaaacttgcaacaacagcaaccaaagctcttttgtgtaaaaatggagcttctttaatcccaagaacagtctgcatccatgccagcctcagcaccacattcgccacctttatttcaaatcaccactctagttattaaaaaacccgcgaaaacgcaacaattcaaacccgaaaaagtgtctttaatttctttatttttttggtttaccatgacaatgaagtagatgcttttgtaaggtactaagagtttgtcacgaagccacgggttcttggagttgcggttcatcagaccccagtccctgaaaatgtcccaataagtattgaacaacgtggcaatgctcgaagtggttactgccaccgtgagccagtacgtccctctcttcatctcaaaaattgtcctagccgcaaccgccaatatagtcgatagatactttagtgcgttaaggccatgcattttgtctttctcctcgaccaacctcctaatagactgaaagaaagaaaaaaaaacaaacaaagttttgaacattttgaaaatgttatgaaacagtaaatgatacggtttacgacgtaaactaggataattttttctaagtacctgagcgaagcggaaccagtaaggaatgatggcaacaacaaggtagagttctttgtaaatctcactatcataacatgtgtgtgttcgtctcttaaaatctcctccccaaccatagtagcaaacataaaacaataagcttctgaatgtttggacctgtggaaccaaaacctaattaatgatttgtcaagaagaaaaccgatagattaacgagatgctaaaccaagcagcttgttgtacctgacttgtcaattgatctgcgaggaagaagtccgggagaataacctgggaaagaaaaacatactcatgaactatatgtaacatcgttttcaggttttattacttggtttgaacgttaccttgtagagaggacttaaaagacagcgaaagacgcttccaacgaagaaatatcggctcgagcgatatattatattgaatggacagaacagtaccatcatcaagcactgcaatcataagtaaaagatgtctcaaaaaactaacaatgttgatgtattgttaaagattaatatcaatgtctaatttcaagaacgtacgactagaagagctaaaggaacgagctcggtgatgacactgaaacttttggttcttggatccatttccatgtcgagatttgagatgactcctccaaatgttaaaactgctagaccagagcctaccagaagaacttctctataaccaagatcatttccttgctcaaacccgaagataaacgggtaatttactcggtatcgactccaaaaatatatgtctgccgcatacataaacaaatgaaccgcaacaaacccgaacaagctgcagaaaaaagtgttagaaaatcgtaggattcagtaagtttcttgtggttccatctcaaaactaagtgtcaatgagtgatttaaccgatgtaggattttttttatcctcggttcagcggggatgaatgtaactttacaacggacctgtaaagaggaaaaatgttctccatgtactgatgcctgccctcactttttgttaagcctctaatatgtacaagaaccgttatcgcaatggcgagagcgacagcgcaaccggaaaagaagcctatatatatatgaagatgaagttttagtctatgagaaagagtactcataacagagcttaaatagattaattgggtaccaagaaagtaagtgattctgtgtttctccctcttagttttaggccttaaacatttcattccttctcggtgatttccattagcgaaatgcttaataaacgtcgcttccactctcgacatgagccttgagacctgaaaatgtaaatgataagtttagcttgtaacatcaaagaaaagatgatgtgaaaatagatggtactattaacctcatcacagctacccaaatacgagtgatctactgtatttagataaggctttgatgcattcctcgaagtagtctgcgcaagcaatacatagatatatatcatcgcaagaacatatacataaaccttgtacttaattagttaagagattacaaaccttgtcatacttctttagtatctttgcaaacgccaattgattcaagaagctgcaaagagagatgatgagaaacagagttttcgagaaaccagaggatctttataaaaacattcttaccaataactctttaagaacctaagtttttgataaaactcaacaaaagcgcggttcataagctcttcggctctcctaagctcgggtttgctgaaggtttgctcacttgggagaccaagaatcatcattttgagagttaacaacggagtttcgggatcgattttgagctttacatgatccaacatttctactggagcaggtttaaatactttcttatcttcggtcttttccatttctctaatcacatccattggtgaaggggctacattataaaaacattcacatcaacctttgtaagaagcttaacgtttaggattaagtaaaatggagctaaacctggagtcctcattgttgaatgaggagaagaaggagcactcgcgacgctattaaggtcaggaggaagatgaacgtgaggattctcaactttaactctaagagcaatcaaaacatttaattgtctactaagctcatcagcttcctccataacattttcaactttttgcttataaaatctcaaaaccttgttgaattcaccgtcgagtcgcctgaaaaactgaacctccatctcccctccttcctcagctgagttaagaaacgtcgtcgtataactcgctgtctcgtcttcattaatcaaaatgatttgttcctcgtcgtcgtcaaagagatgataatgatgatgattatgatgatgatgatggcgtttgctgcttaaaggattatgatgtttatgtgatttcttaggagaacgagaagctcggtttgttaaaccgctaaatgcgcggtaaagagagattcttctcgataatcctggtccgcctccgcctccgcctcctccgccttctccaccgtctgttttaagaggtacggtgtctccggttgaaggaggaggaggaggaggaggaggacgttgttgtttttgtaggcgataacgaaggatctgtttgactattgatttaagagaacgataatccatgtaggcttctttccattcttggatcatctgcgtttcaaattctcttccaaacttcatattttctctacggatctgaattctttttttccccggaaagattggagtttcccgggaaaatctagcaagaacacaagaacaaagaaaatcctatgtttctcctttgtaatctctagtcttttgaattttggttttggattattgttttttattttggttcgtaagagctggatcaagtttctttttctggtaatcaaagactatatatgtatgtgtgtgtatcaagatttatttatttggtagaaagaaaattataacgagaaataaaagaaaaatagagctattttgtgcattttcattttttatttttgtcgacatctttattagattaactcaaatgatccagcacagaaatattgtttatatatgtaataaaatgcggttgaatacgaatgcattttcctttcatataaaaaatctcatgcaaataataggaaaaacaaaacaaaacaaatcttgtaacatatatataaacggaaaaaaatactaaattcggatctttgtctttttgtatccatctacattaagtggatttagggaaatacgaatcataatggattgcaatataaacttgtaaatccatatatccataagtctagtgttaaaaaattcatgatctggtgccataaacgtatgcaactatacattttcaaaattcatactattaaaagaatatgggaactactttattttcatgtctttcataatatagttatgaaatttaaattgacatgaacaacacattaaagtcccgataacgcgttatatattaaagcgttgatgaaaatagctgtgcacgcatgctaaggacaaatatgaaaatagtatttatatgcatttccaaacgccaaatatttctatatctgctttaaaaaacaaaacaaaactatggcggtctaattcttttgaaaaacatatattatgtgtgtttgaattcgaatagttatacaattgttacagactatagatgatacatgtgttcgtcatttaatagattgttattcaattattgaatcgttcattattttcattttaggatacggatggatggttggacctaaaatagtcataaatttaaatggattttgtgcaaaaaaactcaaactcatccatttttgtaattttatcatttacctccaaaaaatgttacataatcatatgaagtcgaaaataatactcaatatagccttttttttgttattgtcaaattttaaaattttgataaatcaaatcgaagccctcgagatgaggagttcaaaaatatctttaaaattttcaaaaacaaatatatgtgatcgtgaaaatatttataatatatataaaattgtaaaaatggattatattgcatattattttggaattcgtataataattttgcatttttttgacggataaaattataaaaatagtctactttcaaagttttttttggcacaaaacctaatttaaatcgttgcattacttgtctcaaatatactcaaaatccgtggacgaggattttcttctctcctttttagggcatcaagtctttttttagattttataaccacaagtgtaagtggtaatctctttgacctttttagcaaactaaacttaaactcatcagttccttcttacacggaagcatgtaaaacaaaaccaaaaacaagacttaatattattttgtcttttttcttttaacaaatcccaactttttccttgttgtttgttgttgctgaaactagaagatggatttgctaccatcaagatataagattcacaagacaaagttaagatggatcttaacaatgatgacgatgatgatgatgatggtgatgagaagaggagaatcaatgagattagatatggaatcaggtaacacaaaatgtatctccgatgacatcaaaacaaattacatgaccgttgggacttattccatcgtcaatcccaacgaaggccaccatcttcctccttctcacaaactcttcgtcactgtaagcattaactatgaatctatgacaaataatctatgaatcgtttggttgagtatcacattttatgtacttctctttataggtgtcatctcctaaagggaaaagccatcatcatgcagagaatgtagagtccgggaaattcgtgttcacggcagaagaaaccggcgattacatgacgtgttttgtggctccaggttatagacctaccgcaaaattcgcggttgatttcgagtggaaaagcggtgtagaggctaaagattggaccactatagccaagagaggccaaataaccgtaaaaattatatgttacctaactatagttatttttttgcatatcataaaacacatactatatctctaaaccgtattatctatatgtataacttagttctagtctataatgtggtatgtttattctcagatgctagaggtggaggtgaggaaactactcgacgtgacagaaactatacatgaagaaatgtttcagctcatagagaggtacaatttaatcaaacttagtaatagaaaagcaattcgatgtttaaaacgggtaatttgaaattgtaacagggaaagggaaatgcaagagttaaaccgatcaacgaattcaagaatggcagctctcagtttactgtcgttcgtggtaacaatgtcggtcgcgggtttacaactacggcacctcaagtcattcttggagaggaagaagctcctctgatcaagcttgttgctgcggttacatttaacagattttgatgttttctgtttagcttcttatacttacttaaccaatcaatagtcttcatcttgaattttgagaaacttaaatagcaaattttgctttagaccaaactcaagatcatatataaaatagcaagttttgttctctgtattttggaccgtttatgagctgttcccgtagaaaacttaacccgtgaattcaaacggctgagtaaaccccgccaaacccgtaggtcatttacgggtcataaagtagtaggcggattcgttaaaccaaaggacatcactagaagacacacttaacatatatgacttatgaagatctcactaaagttagcaaaaacacgaagcaaaaacacaaagcaaaaacaaaacaacaattgacataaacgtagagagcagtgtgcttaggttgttattgttacttatttagtcataagaatgcaaatcccaaatcataaagcttttttagtcatgtcccttgtggtgcttatccttcttcttcttcttctcatcatcatcatcacgatgatccttcttcttcttcttctcatcatcatcattatcatagtgcttcttcttcttcttatcctcatcatcatgatactccttcttcttcttcttctcatcatcatcatcattgtaattatgcttcttcttcttctcatcatcatcatcattataatgcttcttcttcttcttctcatcatcatcattatagtctttcttcttcttcttcttctcatcataatcatcatcatcatgatgctccttgtactgctctttcttcttcttcttcttaaactcatcatcttcagagttattaccatctttcttcttatccttcttcttctccttctccttcttcttactcttctcatctccatcatcataatccttaccactctacaacatttaaaccaccatttcttcaaaactcatccaaaaccatttcaattcaacaaaacctaagtttcagtttcaatttaaaatttctcaaacttacatgttttttgtgaccatcgtcaccatcatcctcgtgaccgccatagctaggcttcacgtaatcgctctcaattcttccaccatagccagatccatgctccgattcagttttccggccatactcaacctccgttctccctccatatccagaattaggtttccggccaaaatca

SEQ ID NO: 482 - DNA, 86854 bp, Arabidopsis thaliana
gatccagatccaacgggtccgggtcgtgcatagctactgtactcggttttaagagcttggtcgtcataagcagaagaatcgtggttagaagagaaattaggtcgctgatactcaaaggcgtcgccggagagagaggagagagggtaacaagtctcgtcggacggtggaattgaacggccgtatgtcacggtgatgtcgtagcctccactataaggcatcggatcgtattcggtgaaatcgtcgacgtcattgtcgtcgttggtgtaatacggcatcgtttttggagtcttcttcttcttctttctgattctttttttggatctctcaagaaatgaagattgtgagcttcctctgtttacatggcgactactacgtacgaaaagtcaaggggtgacacgtggcttttatctttattgtctaagtcaaaagtaatgtttattgaatccaaacttaaaaagagtatattggctgggagatagaattaaaagaaaacaaggtaatagcacagattaaatgatgctatttgatttgattattaataaaatatctactatttgattactttattaagaatttcactatatttgaaagttacatagttatcgtggttggttcatgatatatcttaaatagttaaatacaatatcaaactcatcaatactattatttgagaagtacgtttaatgaggtgtgcatgaaattagatgaaataacaactttgttatttggttaaaaaaattatttcatgaaaaaatctgtttagaagcacgcggatcctttttatccgatttttaaaagtcggatactcgcgtctaatcctggccattaaattgaattgttattagccgttagattttgtagttttattttgaattatcatacattttaaatacgatcctcatttttaaataactacttttacggtaaaagctaaacattctcctataattatgagattcatcttattcactaaacttgaattccacgaaaaaatattttgcgcatattttttgacataagaaaatattcttataaatacaggatacaagtttatgtttagactaaagctacccatgccaagttcatgaaatacaatctactataacattgtcaaatatgtcgatagcatagatgtttcaagctataagtcctgaaagctataagtctgtaggtaaaccactgcatcgttagtcatcgataagataagttagtttacattttatcatgagattacatatacttgcattggacatgttgaaaacaaatttcaattgtttacggttgcactatatggcactttaaacaaaaatttattcaattgaggcactttccaagcagtatgcattttaccattttttgaaggaaaattagacctttataccccttaccagagaaacattaactaaccggatggatgtcatcaacttttttctaccaaacaatagaaaaacaaactagtttagttatgtagtttttaatataaaccattggatggaaaaaataaatattaaaatctatcgttaagaataaataaataaatggaattattatttttatgttatcatatctgatgagaaaaaagtggatctcttgatcaattagaacgacattcgacgatctgttcctcctatcctctctgatttaccttgatcattgtctttctttccatgaaaatcgtacctcctgaaatccatcgttgcttaaaaaagaagcagacagatgttagagaaagagattcatgcattatgttcatctatcaagcttatccggttatcgttaaaatatttacaagagattttaaagggttttaaaagatttacaatggttttttaaagatttttaaagggtttattaaagtgttttaaaagatttacaagggattttaaaagggttttaaaatacttgcaagggattttaaagggttttaaaagatttataaacgtttttttaaatattttttaaggattttaaaggcgattaacttgaagacccctctagtggaaatccatggtcctcttctagatatttttgaggcgactaagcgttgtatttcctttaagtgtatccatatcccgagatcagcaaatgttctagctgattctttagctaaggaagctttagctttgtattcccataacttttaatctaatgaaagtttgtttgacaaaaaaaaaaggtttaaaagtattttaaaagacgtacaagggtttttaaaagatttttaaagagtttacaagaagaccctttaaaaactcttgtaaatctttttaaacccttttaaaatcccttgtaaatattttaaaatccttttaaaatcccttgtaaatctatttcccaccaaaaagaatttacaaggatttttaaaaggtttttttttgttgagaaaaaatttgttacgaaaaaaaatttggttgggaatttttttttttggcggaattttttttttggcgggaaaaataaatttcggcgccaaaaaatgggcgggaatatttcagtttccaattacatgttcctattagatgagggtaatttggtcattctgttcaagagaatgggtatttttaaaaatggacaacataaaagagtgtaacgcccgtgaaccggaaaatcggttagggtttgttttttaaatcatccggtttaattggttgggttaattggaaaccctaaagtgtgcctataaaagaaggaaactcgaaattagggctttggttagccacttttcgttttataaaggagaaaaagagagaaaaggagaaggagcagaatcgttagggtttgggagaaatcagtttcgtcatatcaaatcgtggtaaaaggtaacgaaatttggtagagttattcccaagtcctttatcgttattctccagtttacagaattggatttggattaaaattggttgagttattcgcagtttcgtgagacacgttttctcatacgcgaattaggaccagcggagattgaaactgagatcgtggtctcgtctgttttccgatcggcacgagattttgtgggcagctttgtgatgtctgcagctaggatttcaccagagcgattgaatagttaacggacgtttctggactgtttcagacgtaaggagagtctctcctgggtttaattgctattagaatcaatttgttaaggtgagtgcgtgaccatgagcttatctgagcgattgggttgtgtgatttgttttgtgtgatgatatgtaggtgtggtgaatgtgttttgggtgaattgttcaatgactggtttgtttgtattgtattcgtgattatacctttttatttgcttgtgtgtatagctcgtagatgggaggatcgcctcactaagtatttatgataatacttacgcatctcattgtgttgttgatgcaggtaaagataaagtgtgattgtggaatcatggcaaggaagagaggatgatctaggaactcgtttgttttatgtttggtgtttttggttattggaacccggttaggattgtcagttattcttggttttgttgatcgaattatttatttattcataaaatagtatttccgcactccttccaaccagaccccctctaggtctctctatccagtcgatatactcacgatttactagtcattgttgctcacaactcactctccactctcagactgcaatctttgagcataaaccgtcactctcaggcctcggcctacggtatctcgggtatcacacatattatcttccccactcaaagtcaaaccctgagttgtgtcggctcactctcagccacaaagtcatcgagttacgacacttggagaaaataataccacaaaactcgctctcgggtcgtcaccctaaagcgtgctctcggatcgtcacccgaagccacggtacccctcgtactctaaagacaccatgtccctcgagttaccggtacctcaggagcataccccgctcctcacgagtcgttgggaccctcatgtccctcgagcaacaatactaaacgcttccgagcatatctctagacgcttccgagcaacaatatcgcgtaagacacctctatgcctcaccatccatcatatcccctcgagaacatccttatgaccaactcccagccatctcgtaaacacacctttctcttaggttgtttactcaaactttccaaaaatagacaagtcctttctaggaaactttccatttttggaaaccgcacaacacattcttaaataagacaactcaagtcaaatccaagaaaaaaaatactcatcttattaatcatcaactgtcatgatcgttacaactccaaacgaatatacaaatgaaagagaaataacaacaacaactcaaaagctcaaaaactcaacaacactgaaactggaaaccaaggaaaggcaaactcatgcagcaacctgcttctcgaaccacttcttgaaccttgccttcatcctcgcctctggctcccaagtctcctctgtcacactatcgcagtaccacaggactttgatcaaaggaatcttcttccgccgaagttccttgatcctcctctcgagaaccctcactggtctcgcctccaaagtcatgttgggctgaagatcctctggaatcttagccaacacctcatcatccttgtgaagacacttcctcagcatcgacacatgaaacaccttgtgaaacgcacgcataacatcaggcaactctaacatgtatgccactggtcccaccctctcaacaatcctgaacggacccatgtacctcagactcaatttagtctctgagatagacttgttcggacctcgcaacatggccatcttaagatacactttgtccccaacctcaaattcaagctctctcctcctcttgtcagcataactccgctgtcgatcctgagcttccttcatgttcagcttaagaacccggatcctctccgtggtctcctgaacataatctgcaccatatatgctcctctcccccacttgggtccagcataacggtgtcctgcatggcctcccgtacaacgcttcaaaaggagccatcccaatactcgcctgatagctattgttataagcaaactctaccagactcaagtgatccgcccaatgacctccccaatccaagacacacatccgcaacatatcctcaagcgtctgaatagtcctctcagattgcccatctgtctgtggatgataagccgtgctcatctgcaccttagtacccatctctgcctgaaaggctctccaaaatgcagaagtaaacttggaatccctgtctgacacaatactcacaggtactccatgcaacttcacgatctcgctcacatatttcttagccaacaccgccgctccatcggtttttctgatggccagaaaatgtgctgacttagtcagacggtccacgatcacccaaatagcatctttggttcgcgacacaggcaacccaaccacaaaatccatcgtgataaaatcccacttccactcaggaatgggtaaactctgcaacatgccacctggcacctgatgctcagccttaactaactggcaaacatcgcactcttcaacccaattagctacatccctcttcatcccgacccactgatagtaccgcttgaggtctcggtacatcttagtcgcttctggatgaatggaaaacatgctcgcatgagcctcactcaagatctcccgtcgcaactcctcatccttaggcacacaaactcgcccatgcacaaggatagtcccattagctgcaaactgatactcagagccctctaccttagaagccgcaattaacccctcatccttctcctgagccaaccgaactctagtcagaagatctgctcgatccacaacttccaatcccaatggctctcgtgccacagcacacaaccgcaaagcaccaatctcactcaccaaggcctcaacactctgccctggagccgcgcccacgcgcttacggctcaacgcgtctgcaacctaattagccttaccaggatggtaagctatctccagatcataatcagtcatcaactccatccatcgcctctgcctcaggttcagctctggctgagtgaagatatactttaaactcttatgatccgtgaacacctgcactttcccgccataaagataagacctccaaattttcaaggcaaagattactgcagccatctccaaatcgtgagtaggatagttgcccacatgcttcctcaactgtcgtgatgcataggcaataaccttcccacgctgcattagaacacaacccaaaccaactcccgaggcatcagtatacaccatgtaaggctctccatgctctggcaatgctaacactggtgtactcgtcaacatctccttcaggctcacgaaaccctcctcgcactccggtgaccacacaaaaggaacatccttccctgtcagcttagtcatcggctgtgccatactcgcaaaccctttgacgaacctcctgtaataccctgccaacccaagaatactcctgatctcagtggcattcgtcggtctaggccaatctctgatagcctcaatcttctctagatccactgaaactccctctgcagaaacaatgtgacccagaaaacccatctctctctgccagaaactgcacttactcaacttagcgaacaacttctgctcccgtagcttctccatcactctcctcagatgtacctcatgctcctcaggactcttagaatacaccagaatgtcatcaataaagatgatcacaaactcatccaaaaactcctggaacacgctgttcatcaaccttatgaacgctgcaggtgtattagtcaacccgaaaggcatcaccacgaactcaaaatgtcaatatctcgtcctgaaagcagtcttgcgaacatctgcctccgctatcgggatctggtgataacccgacgtcaaatcaattttggagaaacaagtagcacccctcaactagtccaacaactcatcgatccttggcaaagggtacttgttcttcatagtgacccggtttaacccccggtagtcaatacataagaggaaactcccgtcattcttcttcacaaataacaccggcgctccccaaggtgaagtactaggacgaatgaatcccttacccaacaaatcctctacctgcttctttagctctgccatctctgctggagccatcctgtagggtgccttagacaacggcgctgtccctggttccaactcaatcgtgaaaggatcagaccgtgatggtggtaatccctgcaacgattgaaacacatcctcgaactcctgaataacccgaatgtcgctcactgctacctgccccacagactccggcatagatatcgtcaccaggtaagcctcgcatcccttctcgatcattttctctgtctgcactgctgagatgacgagactccttgaggtaggtctcactccctgataaaccaaccttccctctggccgctcaaaagaaactctcccacggtggcagtcaaaatgtactctataatgatccaaccaatccattcccagaataacatcatacaactctaaagggctgataatcaaatctgttggcattgactctcctgcaatctgaatatccacacccttcgcgttccccagaaccgctagaaactgccctccagcaaccttgacggctccaaactgctcaccaggatccccacggatgttgccgcgcgaggcactctccggggtaatgaagcaatgcgatgctccagagtcaaacaacacatgggcttctacaccgcccactaataaggtccctacacaaacctcatatgctaagaaccctaacattcatcacaaaacaatgatatccaaaacaacagaaataattcacaaagtctgagtctcagaaatcataccagtaatcgctctgttgctggtatcgcctatctcacgcgtagtgtaactctgcggtgccgctgcaatatgtgccaactgctgcactccctgctgcacctgcactccgtgctgcaccgccggctgtaccactgtcactgctatccgctgcagcttaggacaattcggtctgagatgtcgcctctccctgcagtggtagcactcactcgtctcagctcgctgcgtgcaatccgccaccttgtggtcaaggctcccacaagaaaaacatcctgcacgaccaccctgtccagctctggaaggatgatcccacttcctcttctgcccctgcgcaggcttgctgcccttgctaggtgccacctgctgttgagtcttcttcggttgtaccgctgggctcactcccacctcttgcctctgaagatcctcctctacctcagcagccgtctccacaagtgccgccttcgtggcgtactgcgatactctacaccgcaccctcaaatccggtcgaagtcccctcaagaacctcctcatctgggcctgatcatcctccatgctccgacccgcatacaccaagagtcggttaaactcccggtcatactcccgaaccgaccgctcaccctgtgtcagctcaagaaaacgcgtctccatacggtcgagcgcctcctgcggaaagtactttgcattaaactcagccacgaaatctgcccaagacatatccgcctgcctcctcctggcagtcacactccgccaccacaaatgtgcatccccctctagaaaatgcactgctagatctacccgatactccgcccggcatctgctcgaaccgaagttccgctcaacccgcgacctccaactgtcggcctcctcaggactagtaccaccagaaaaataaccggtgccaatcctctgcaactgctccatcatcctcaaataagatggaacctcctcaacaaccgcagcccgctgctgtacctccgccactcgtggcgcaactggagcctccactggtaccacacctggtaaccgctccaacaactgcctcaacaggcccgcaaaaccaacttctggaacctgggctcctccggctgcggcacccatcactcctgggccctcagcaccaacggcatgcacaccggtaccgacaccagctccaccagcccccattccggctgcaccagctatatcggcaccaagaccgttcctaaccccgagctccacaaactcaggctgcgaacccacactctgctcaactgtggcactgtggccatcactctcgccggtactctcgaggactcgtcccctaccgcgaccacgaccacgaactccagctcctctaaccatctgtgctactcaagaacaaatggctaagaatataaaacaaacgaatatatcacaaacaacttaccgtggaatctcatttaaggctcggagaagatgatggtaggactccaacaacacacaattgactaaacactccataatcattcctcaatatgctaacaccctagctcatcccacatcaatcaacaggaaaataattcatcaattatttttttttacacatcctagaaccgtaattgctctgataccaaattgaaacaacccgacccatttttttgtaaaaaaatataattaaatatttccataaatatctaattaaaccaaccaataacataataattaaaccgtaagtcagaaatactattttatgaataaataaataattcgatcaacaaaaccaagaataactgacaatcctaaccgggttccaataaccaaaaacaccaaacataaaacaaacgagttcctagatcatcctctcttccttgccatgattccacaatcacactttatctttacctgcatcaacaacacaatgagatgcgtaagtattatcataaatacttagtgaggcgatcctctcatctacgagctatacacacaagcaaataaaaaggtataatcacgaatacaatacaaacaaaccagtcattgaacaattcacccaaaacacattcaccacacctacatatcatcacacaaaacaaatcacacaacccaatcgttcagataagctcatggtcacgcactcaccttaacaaattgattctaatagcaattaaacccaggagagactttccttgcgtctgaaacagtccagaaacgtccgttaactattcaatcgctccggtgaaatcctagctgcagacgtcacaaagctgcccacaaaatctcgtgccgatcggaaaacagacgagaccacgatctcagtttcaatctccgctggtcctaattcgcgtatgagaaaacgtgtctcacgaaactgcgaataactcaaccaattttaatccaaatccaattctgtaaactggagaataacgataaaggacttgggaataactctaccaaatttcgttaccttttaccacgatttgatatgacgaaactgatttctcccaaaccctaacgattctgctccttctccttttctctctttttctcctttataaaacgaaaagtggctaaccaaagccctaatctcgagtttccttcttttataggcacactctagggtttccaattaacccaaccaattaaaccggatgatttaaaaaacaaatcctaaccgattttccggttcacgggcgttacaaagagtattgttgcaaaagggtagtaaaaaaaggttaattttgcaaatctaccaacgtactttaagaaagtactttaacaaaccaagcttacagggtcgcgtcaagatggcctggaagataaatttacctggcctccatgtctacagcatgcattaattgaatctaaaaatattagattccaaaattaaactattattaccttgactggcaaatatatgaaggtgtttgtgaaatatttatgaatttaattaattcaggctgtataatgaaaatggaaggggtaaaattaaaaaggagtagccttggaagtgcattcttaacaataattttattttacaaaaacatattactcaaaatacataaaacgataagaaagtaagtacaaacaataacatttttattttaagcgaaaatgacttatatctattattaattacaaaaaaaatccaatacatagatcctttgtcaactatcaatcattagttttgtattgagttgctacctcaattattaataaaaaatttacaagaaaagagagaaatgtaaatgctaaaatactagcatgtgtgtataaataacacttcaatgagaagactctctaagttacctataaataaatttaccaaaagaattttataacaataattgagacctctcaatctttctatttctaattggtctttgcatattggtgatgtatacggaaaaaatctatgtttacggtcaagaacgaatttagtcgcaaaagcaagaaaatcatcaattgcattgtaaataaaaaacaataatattggtataaaatatatcaaaattggagaagttatgtcattaagcttcaagacaaatgtttgtagaaccacatgattttggagcgatatatataaaagatctagtgataagcattttataggttttactgcatatcaagcgcaagctttgttcgttaaagatagatcatcgtataattggttatttagggatgatggaatctattttcataacgctttgttgcctagttactataagttttattggaaataataaaagacaaaaaaaactactactttatttcataatttgtagtagatgtcacaataagtagatagatgttgtatacaaattttgaccaaaaaaagatctagtatacaaaaagtggactctaaaatctataggattgttttgaagtacttgtaaaagaaatagtttattaagatatagttgatcgattaattccgacatttgcattttttgtttatactaatataatgtacattataagtaatagataatgaaggttaatattagcaacttatctgagattttattttggtgaacatattgttcgccacaaaagatataatgcaaatggatgagataacctatgctaggctggtacttagaagttcatacacttatttctgtccaacatatattgaaagtctccaatgatttgttttaacaactattaatagaaaacttttttttggacaaaatttaatagaaaatttatgttaacagagaaacaagaaactgtaaattcaaaaatagcaacatagatgttgttataaatacacacacacaaaaaacaagtcaacacgacaaaagaagatcaaaatatctctacaaaaaatgaaatatttcacaatttttctatttgtttttagtctttgcatgcttggtcatgtatccggcgccggaatcagaatcgtgaacgaactcaaaaataagaaaaccctttggatgaggtgttattccaaaaatgacgtacttggtccaacaataataccaaatggaggacaatttacagattatttctttcataatttatttggtacgacgcgttttatgtgtaccttaaaacaaggacctggatttagtcacagtcagagctttagagcatttaaaaattctggcttatgggattggagagctagagaagatgggatatatttaagaagaatctataaggccaaatttgacgacgctgcagacaatctgcataaagagcaaagttggatatagtaaatagttacaagctacctcatttatatagaagattcaatactcttcataaaaccaattatatataaaaaatattttattggtctacttggcaattcatttttaaaaataaacagaaaattattaacatttaatttatgtgtatttttttccaatacatttcctttaaattatgtgtgatgtgtcgccagaaaaatatagtaatggttaataaaataatataacttcattcatgtgtatcataatttatctataattaaattgtctttaaactcatatgtaacaaccaccaaattcgtgtgtaactactaatgtaaaattaaaactagtaccttaagctaaagaatatatctactgactactgtaacccgcaatcaataatcaggcatgcataaacccttcttcgaatttgcggctcggattggttttctactcccagttattatatatacagcatgcattaattgaatccataaatattagatcccaaaataaacttccattaccttaacaagcaaatatataaacgtatagttgtgttttaatcatagcaagttatatattttttttttgaaaaaggctttctattgaaatgcataaggaaataaaaattacaaaagcccagcccgactttagtgtttgtttggtcgaaaccaatagagaaagagcataccccaataacaattagaaacacacattgaaacatagatcttagggttgaacctagactgtaggtgaaggtagccgatggaatagtgagagttcacctggagaagatcaagaggaagagaaccatagctgtagcatcgacgatgataaacgcggattctggtctctgaaggtcgagattctgtttcggacggtagaatcaattaggcgaagcagagagtcagcagatctgaaggtgttgcgatgaagccgattgttcctttctccccagaggaagtacatcgagcattgccaagctagaagagagagtcttctcttatctttcggaccttgaatggcttgcatctgagtgacagttgcagaccaagaacgcaaaggttgaagttgacatctcagagcaattgaagaccaaactgtccaagacaaattgcaattgaagaagaggtgatcacgactttcctgagagaagttgcagagtaagcaagctggatccgtttgaagaccccatccaagtatccgatctcgtgttggacaccggttcagaactagtagccaagtgaagaagctatgtttagggatgcctccataggtccacaccgcagtacgccaagggactagtggagagtcctcatggagaagatgatacacaagcccagttgagtagcgttgataaatcttcccattcacttctcattcataataatcagcatgatccgagagagtcaaattagtgagaaatatgtgtaaagagacctgctgatctgatctaggattagggagagcccaacgtccatgctcatgtagctgaagaagagtggcgtcttgtctaactcccaatctctggtccttgagaaaacaagagatcctgccaaaaggagaccaattatctgaccaaaatctacaagtaaggccatttcccactctcaatttaacccacttaaacgcatcccctctaattttcagcaacttgtttgccagccaagagtaagcaggtctcggtttcatgatccagaattgttgagagatccacgcaggaagtgcactttgaaccaagccacccacaccgaacgggattggaaaaacagcagccaaatcagcttgatagtacaagctctattccagtaagaaagatctcttattcccagcccaccttgatcttttggttttgttaccaattcccaggaaactctagcactatgatgaccttccagttttcctttccacagaaaagcactacagatggagtggattttacgaatgcacaactttggaaggacgaaagtggagcaccagaagtttgagattccagcaatgacagtgttgatgagcaccagcctaccagcaaaagataaggatttcgcacaccagttatttattttccctttaacctgcatcagtaatggctcacaatcctgaaaggttagctttttcgtacacaggggaacgccaagataacgaacagggagaaggccaagagttaaaccagtagtggatcggatagtttcagtctcaccctcagagagccctccagcaaagaacgaagatttttataggcttatagcaagaccagaacgctcctcaaactccttcagcacctggagaacgttttggacttaagagagagagccatccatgaaaataagcaggtcatcagcgaaacacaagtgagtaagctttgcaacgtcacagtgatgatggtaattgaactttccttcttcagtcgctttattcaacattagagagagattgttcattggaatgataaaaaggtaaggagaaagagggttgccctgtctcagacctcttttacctttaaaatagccatgaaccataccattatacccaattgtgaaattagtagtgcagatacaagcttggagccaccgcaaatattgatcagggagatcaagacttttcaaacaattgaacaggaagtcccaggagagagtatcaaaagccttagcaatgtccaccttgatgacaatacgcttaggaccctgagctttatggtagccattgacaatttcccaagcaagaatagtgttttctagtaaaagcctatccttaacaaaaacagtttgatttggcaggataagcgtaggaaggagaggcttgagctttgagacaaggagctttgagatcactttgtagagagtgttgaggcaggagattggcggtagtcaacaatttgagatgctccaggatgctttggcacaagagtgagaatggtggcatttgttgaggagggcagaaaggaatcacggaaaaaactggcttatggaagtagtaacctcaggaccaagagagctccatgctgtttgtagaacccggaagttagcccatccggaccaggcgccttgctagggtttagtttgagcagaactgcagtaatatctgaagcacttggaggagctatcatagcttgagactgagatagagagcatctaaatgaattcagggagccgaaccaatcacttgaagaccaaacagtaggcgaagctgaataatcaggggccaagatagacataaaatgggaaattgcgtgatggctcatagcgaaatggtcaacaatgagagctccagaagggagaaggaaggacctgatagtgttgaaatttgctctagaccggcagattttctgaaagtaagaagtattaaggtcaccctccttcagccagttgatccttgatttttgcttaaaataactctcctctatctccctaaggaaattccatttatgatgaaggtctctctcaagctggaacgttatagtagaaggattctgcaaagcttgtacctgcacatccattaacaaactgttagtctctctcactctctcttgtatttgtgaaaaattctctctgttcagttttttgaggtctcgcttaatggtcttttgcttccaacagagatcagtgagattgaaagcaaagcttccggcctgaatccaaacttcattcaccagctgaaggaaggtagggtgtttggttaggtagttgaagaacttaaaaggttttgttccagagctagggagtgggaaatcaaggtcaactaagcttggcgagtgatcaggaggcaaaggggggaggaacgtggtgaagctgcttgggaaaagagagagccagtagctgttaacaagaacccggtccagtttctttgctaggggggaagctggctgattattactccatgtgaagaggggaccttggaacttcaaatcgaacatttccaattgatccagtgtatctttgaaatcagtcattggaggagttagcgagttcacagtaggagaatagtgctcttcatagtggataatctgattgaaatcacctccaatgagccaaggggaggaatccagagcaagagtctgttgaagctgcaataactccacccacatgtcagttttttcttctctaacattagatgcatacacagcagtgaacacaaactgagccttgtttgcaatgttgacctcacaggtgatagtttgcctagactgattcaaaactctaacagaagtaggatccttccaaataatgacaatgcgtccatcatcatccgacaggtgattagaagtaaatttccatccagggcagactttagccattatctggttaaagttaagatctttaatgtgtgtttccaaaattgctccaaaaagaggttgatgtcttctaagccaattacaaaagggctgatgcttacccgagtcatttaaacctcagatattccaaaagaagtggtttgtacacattaatgaagaacaggggactcttccatactaggaagaggacaaaccacttgatgatcactatctatgacagatggtgacaaaaaactcgagcctgcaacaaaaggaaggacaggtgggagaggcaaaaaggctccaaagggatttggtgaaaagctagaggttattaaagaaggatgggaacgagatctttttagggattggggaggggtataaggatacggcaggccagcgggggtaatagacgcaggaaagccaactatcataggcaaatcaacagtattttttagcacagggttagggagggttctttgtggtttagtagataggggggggaggggaggcagaggtggtagaaacagggatgaggggaatgatgggggttaaagctggggtaacagagggatgggaggataaacaagcgaaggtgttagaggtaggggttaatgctgaggtagcaggtgacagaataggggttttcaaggaaggagggggatgggctaccaaggcagtatcattaccaagagggtctttagcagtcgagacagcagaagaagttgggatctcagaattatctttgcctttgttagtagtagctgctgagcctttacttttcttagttttaggaactgaagacttcggtggaggaccaacagggggtggaagctgcaagcaattcttgacaatatggccaagctccttacagtgagagcaagtagggggcaaccaaggataatacactttcacttcaacaacttgtccattatctcttgtaaaatccacaacatcaggtaagggtttggttaaatccagcaggactttagcatgtgacacttttaggctcacaaggtttacggtgaaatcatcagtttcctttggctcaccaactagtccagagactaaactgataccttctttggttcgcagatctagcggaatattaaacatatgaatccatatgggaatgaaatcaaaagctggggaatcagaagcactgtgagaagcccaaggtgcagtgtgaaacatagaatcaccgatgtaccaaatacctttttctagcactttctcacgaatgaaatcatttggaattctgacaagcattgtgccagacaagtgattgacatgaatttcaaggcggcaccccttcccccacatatgattcagcacactttgaatttggttatatagaggaggtctaccattaaagtagcatatgatgaaatctttatggaactcagcccctctttgaaacactgtatcaggaatgtgagtagtaggtcttccaaattcagagaattttataggagctaggcgtttcaaagaacggtttacagattttctcagtttttccgccagggtccttggaacagaggcagacggaggcctacttgaagaaggggctcttataagaggagattgccctgcagaaggagcagcagcagcagcagcatcagtagatgaggtcggaccaccaggagtgataggaggttgaccagaagtggtggacaaaggaggattgtcagaatcttcaggggagggattagaggggataggggcagagggtaatataggattggaggttttgatttggtaagagaaatagaagccttgtttgtgagcaagagagaggttgattttggtttaagtatagtgaaagtttcagctaccttatcttgtattgtagcagtaattccagatctagaagaatttgaaaccgcatctggacaaacagaaataggagtctcaacaagatgcatctctacatcagtagtagttggatcagaagcaacgaccaacacagagcctaccactacaggctcaagaacacgagcagtttgcaatgaaagctttggggtcttggaggaactggaggacagggaagggaactgggacagggataaaataggggaagagggatcagggggtcaggagggagaggcggaggagggatctggttaccaccagcggtgggaagcattggattcaaggcggaagcacgaccattcgagaaccagcggttctgcattgggaactgggacagagagaaaaaagaaaaaagaacacacaataccagacaaaaaaactatttagcaagttatatattcatatcacctcaataccatacatcacaatgcttaaaataaatagagaatatagtataactattcgattccataatttaaggtaaattgacctcgaaaaaaatatctacaacctccaccaaataaatttgtttcgaaaacgtttgatatattccttaaacaacgtaatttataaattcaaatcaaaaaacagatcttcaaattcgactaaatctatatattcgattcaattgattgtcattgaacaattaataaaattaaatacccgaatatatcaagtatatatcttaactaacattatacacaaatattattctaggttgtactttcctaaaccctatatcaaacaattcacgaactagattactataaatatatggtgaagaatgcaattgaaagtcaactaaagaaaagtgaacaagctacacaggttcatcagatatggagagtggtgaagaatttgatagtagttattattttacaaatataagaaatagaatttatttactaataaaacttttttattctaactattacaataggaatatattctgtaagaacattgttttttgttaactaaatcaactttcagttatccaaaaaacacaaccaaacttttcaattaaatcataatgaattgtataaattaacattattctctacatttgtaatagatcagacattaaataaaattcagtttaccaacattaaaaataccaaacaattaaatgtataatatttacgtaaaatatatatactaatataaaatttaatatcacaaaataagtacacgttttattttaacaaaaaagttttaacaaaattaattaaacaaaaatacctacatgtatgtgcgggtcatgatctagtattcaataaaagaacatgaacaaactctatatttacataaggaatttgaatacaacaagtttctctcatatgtggctttagaaattataaatgagagaaatttaaaatattcattttggcctaatacaaataacaataaaaattgtctacaatgagagactaattttctgatacttatgttactgcgagataaatatcttttaaatttgacgactctttactaggaattatacaatcaaacttatgtaatggagctatatattttaatagtactccaaacttttaagtaatattacatgattctacaatatttaataaatgtttaaaaaatatacacctgattgaaataagtttcaacaagaaaaacatggctattttgttggtgtatcaaatttattttaagcaatctacatctctttttaatctgtttattcctagatgataaaggacaaacaacaatatcagttgtacatggtaaaatagtctaccctctacgtatacacataaacggttaaaatgaacacaaattacaatttagaccaatggaaaatcgattttactcaaacaccaacaaactttgaacaaagaactgttacacgtagaaccaaacaatatgatgaaaagtattattaaaatttagatcctttagaaattcaccctcttttggaataaattcattttatgcacatttttttttctccgattataggtctagccaaactattactaactcggaaaaaaatacagaaaaaatattcacaaaaaaaagagaataaacctatcaaatttcacctaggtgatttgatagaagtcgtatcacctagttttcctacttctccaaaagtttcagatttgaaatagacaaagaatatcaaatttaaattagagaaaaaaatatcttaaaggagaatttttatccaataaagttaaaaataaagaaaaatggtactttgacaccttcaaagaattttttttttaaagagaattatggtataaagatatgaagtacatattctattttttgcatggtttgaaatatgtgctgtagaaaataaaatagattatccttacaaaaatgaatcaataacattagttcaatagtatataatacatgggaaatgactattgagaaatacaaaagaattcatccaccattaaaagatatatgttgtgactagtgcatggatagaaaaacaagaatttaaagaaatcagaagaatttatacttcttctctttcagggaatacagttttcgtctcaacaaaaaattctttaacaattcctgcggctggacttggactggttagaattgctccttcacgaaatttggggtgaatttacaaataaacataaataaagggaggtttcacgaatttttaaaaataagtatcctgatcactaaatattacaaaactaaagaacgtcacacagatggtgatcgaacaataccgacacctaaacctctgtaccacaattcgacgcaattcatcgttacccaaaaacctctgtttcgattcctagacactctcactagggttttacaactatggcaacgactcgaatggttagggtttcgcaagatggttcgggagattactgctctgttcaagacgcaattgattcggtgcctttaggtaacacttgcagaactgtgattcgtctctcacctgggatttatcggcaacctgtgtatgtacccaagaggaagaatttcattaccttcgccggaatctcaccggagatcacggttttgacttggaacaatacagcttccaagattgagcatcaccaggtaacgtttgctatgttcttagtgtttttggtacgtgtacggctctgatttggttgttttgttttgcaggcgtctagagtcattgggactggtacgtttggttgtggtagtgttattgttgaaggtgaagattttattgcagagaacattacttttgagaactctgctcctgaggtaatcatataaagtctcttcctttattactacacaaagtttagaaattttactcaaattagtttagggatctataaagtctcttcctttgtatgttcttattaatgttcagattcaaagtttggaaatttcttctgctgagattagaattaagagttgtctatggtgattttttatcctagttatgttatttgaccactttgtatatagggatcagggcaagctgtggcgatacgagtcactgcagaccgttgcgccttttataattgtcgatttctcggttggcaggttcgtttatcagtcctttgattcaaatgatttgtgtaaacttgtggaaactttgtgttggttgttcatagtttagatgtggtatattgcaagtaggttgatccaatcttgttatagcttatttgcaaaatgtgaaatgcaggatacattgtatttacatcatgggaaacaatatttgaaagactgttacatcgagggaagtgtggatttcatatttggaaacagtaccgctctcttggaacactgccatatccactgcaaatctcaggggtttataacagcacaaagccgaaaatcgtctcaggaatctactggttatgtattcttaaggtctgcttcacaaggattacttacaacttctacattcttccaaggaaactgagtttctactaacttgtttgcagatgtgtgatcacgggtaatggtcagagcgggtatatgtatctcggaaggccatggggaccatttgggagggtagtccttgcttacacttacatggacgcgtgtatcagaaatgtgggttggcataactggggaaacgcagagaacgagagaagtgcttgcttttatgagtataggtacatcatatgacatctcttaactgcaacaagtggtaatcacgaaacagttttttgatattcttttggatgtaaaatggtaggtgctttggtccgggtagctgttcgtctgaacgtgttccgtggtcgagagaactgatggatgacgaagctggacactttgtgcatcatagttttgtagatcctgaacaggaccggccttggttgtgtctaagaatgggtgtgaaaacaccatattcggcttagagtactgaaaaaaaatgttgtaactgccatggtgaggcctagaataacaaaggatcatgaagaacctattgtaaacaaccctagtatcaaactttggattatcttttgtccaagtcaataagtgcactacaaaaggatcttctatagaaactatgattatacacttcatagtttcttcttgtttaactaaattggtaaaatgttttggttatttttttgtgtaaataagattatataaaaatgggcatttggtctagtggtatgattctcgcttagggtgcgagaggtcccgagttcaattctcggaatgccccaatttttttcccacccaactaaaacttcaagtttctacaacactagaatttagatgtaactatcttcttgatttgcttttacagattttgataggtttggtgaagaacatcaagcagaagattaacaagagcttcacacagaacaggttaaaatagcatagaagatcaatattagattctcagatctatcataaacaaaattgcgaccatagcaatagaaagttgttcagttagaaattggtcaggcaggtgaagagaaaaaggcttcacctggtgagtttgaagtacaagataaagataatggcgaggacaaggactgtgattatcgcaccgatggtccatttgtttctattcattctcctagtcattgttgtcaatattttcttgctctttccgacgttatcatcgactccatgaagcgtttcatgggcccgtaagagagactgtctctgcccgtgcaaatcctgaaggattgaaacaccaagctcttctgtctccagtatcgttctcctactgtccttgattctgtctgtggttcggcctaaatggtctgttgacatcatcaatcttgatctttgatcagctgaagcctaacacccatttgtatcatcagtcagagagatcaaaatatgttttaagaacacgatcaagattgagtctctacataccgtcaatgtgtcagccataccagcttctagtaactcatctcgagcagtagcgtttaagtttccagatgtgattctcttcacttccgtcttgaaattgttaagatcagatttgtattcccttaatttgacaaggagactggatttaacattgggtggaaggtttcttgcctcgaggtccattttcttaacctggaaagaacaaaaggtagatagaaagtaaccatcgaccgcatacaggacaacggtgaaacttccatattccattagagcaaacgcaagatcacataccaaagcttctgcttcctcaaccccagattttatttcagatagattctgcttcttttgttctgaaaattggtaaagtccaagcttatgatgaaaaagggaaaaaatcttggcataagtaagcggtctatagtgatgatctattcatactagtgatctatcaactgcaacctatgaaactaaagcaagcaccatattatttccttacaatgcatgaaggagacagagacttgtacaagttagaaaactaatctctgaaccctatagtgaaagcttctgcattctcatagtcacattcataagctaaataactaggttaactgaatcttcaatcactatctctgaaatcttcaagtacactaagaaaagtttcgtgttttcatcggtgatccatcatcagcgagtccgcgacctatgaaactaaagcaagcaccatatatcttaggttatttgaatcttccatcaagagcattagctgaagtacacacactaaggaaattgaaaatacctccatcaagagcaatagctgaagtacatttctttgagagatttgcagaaatctcacagtattgtctctcatatctttcgaaaccttgactcatcgttcccagaaaccactacttgctaaaaaataatcctgcagaatcaattacaacaaaaaatcagtaaataatttgatctctaaaacaacctagaacgcataaacacgtataaatttaaaggggaagagaaaattaacatcggcgaaattaggggagattaaacatgttaaagacaaagtggaagaaagaaagattaggatagacgaagggaaaagaatcttacaagatccgaatcgatctgtagagaagatgaacgccggcgataacggaatgtggatgacggggagatccggcgaatgtaattacggagcagtgaaaattagagatttttattttagttattttaattgttgcactaaaagaaaatatataaaatttaggtttgacaaaaaataaaaaacttgcaacttattcaaaagaaagttgaggaatagaaattctataaattaataatttttataaatattaatttatagatatttagtatttacataaaatttaatattaaattctttttaaattttttttttattttagtttttcttatgttttgttgttcgtatattcaattatattagaatttattttttttctttttgtaattttttttttgtaagatattgtgtccgtatatctacgacgttaacgtgatgcttaatctaatttttccttacataaatcttaacaatggtttctcatataaaaaatgttacaaaatcaaatatgacagatcaaagcaaaacattatgtgagtacaaaaaatatcatatcaactgtactctaaaagagttgcaattatggcttgcagaaaagtttcacataaaattagttttcaaatatatgctttatgattattaatttataatattattgggaccatatttttacacaaagatttcaaaaaaattattatcttgttatcttatcgattttagttaatttttacattagcccgacttgggaccagcaaaattttattaattttatcgtatttattaatttatcaagtattaatttatgtaatttctactatataagtgtataatcatgcaaccataaaagaaattataattcacaaataaatgtactcctagtaacatccacggtcatccaaactctaacaatactcataattgtaggaatttccaataaccatatggtgtgacaagtgaaatcatgcaacactggatgtccctctactgaatcagaaattcgttgaagactgcatcgctttataattctcaaatgagttggctactaccagttggaatttactacatttccattaggttcatctagattcttctttggggtttatgggtttttgtactagagtaaactctttttgtaaacataattatggtcttgccttttaatcggaaaaaaaaaatgtctgaagccaaatttcttcttaccataacaacggtttttttgtcttctgggataggtttaccaaactttttaacatcaacgacaaattaaaattaagggtatcttagaatttcaactaaatatattttacgtttattgatcatttcgaaattattttgttttaaactcttaacgttataaattttttaaattattaaataatagtttagataatttacttaactatcgctacttttatgagtctttgtaaatatatgttctgtcacgaataatttggatgtttagaaagcaatgaacaaaaagtgtttttcagtttcatactaaaatttatggttacttaaatttacactagaactcgagtaagaaatatctcacatgatatcacttatgatatcacttaatcaggataccgctgctatgtggatggtttatggaaagaaagtgacaagttttctagaacatgatggtattgtagatcatcaaatggagagccaccaaccatgggagctgtgaatctaaggagtttgtctccaatacacgtagatgtggaagtcctttttgagctataaagtgcatgattgacgtcgacaaccaagatgtagttttcttaacaaactgttcaaccgaatgaccggcattttcagcatatttggaggaattacagaacgacaagggagagttcactagcttttctttatctttaatctctcgtaattcaaatgtaaaagtggacaatttggcatgaaaagtctataccgaaaaacatcatatcatgtatgtaaacaacattcgttagatataattgttttgagctttatctaattaatatgggaaaattaaatttaaaggagttctacaattttttttgtccatatacacctttttttggagaatgccaacttggaccaaaatacccatactctatattttaagcatttttgaaaaagtttaacattgataacatgtagatctacataaatatagttgatttgtaaaaaaaaaaattgttatttagttgaaaaagttgatttttttatagataaagttttgtctaaatttcttagaaaacgatttctagtgatctactttgtttagaatttctgttctaatattttgtacatattctacaatttttagaatacatattctacaatttttagatattgaatatcctattttctaagattgttagaaataaaaatagtctaaatatcgtagaatatgtattctaaaatttctttcatgttctaaactatgtgttaaattgtattctaaatttttttatagtttctgaaaacagtagaaaacgttttctaagaaattttcacttttacaatttatattctaatcaaatttagaatttttttactaaactatttagaattcctagatatagaaagtgaatctttgaaaaagtaaagtaaatatttattaaatattatgttttaatagtatattttctgttaagattacgattttttactggatttagaaaacaaattctaatttttttagaatacaaaaaaaaacacccaaaaataaattataaacaaacgatttgtgccctagtcgatttgtgtcctattattgatctcttcttcttcacgttcttccttttccatctcgtgttctatttttcattatgcatatctatgtgaggagtggtatgtggagattgtatgataacaagaagtggagatttattgttgatgaaaaaagagtggagatttattgaaaacttctattttaaacaaagggtttcaaaataggaaaatatatcagaatttgtaaatatattaagacatatatttttaattttttgttaatttgatttcgaaaaattaagggtaaattgggttataaaatcttaagaaaacctatttgactaatctacaaaaaaaaggaatagatggacaatttattttgtagatatcctttacatttaattttggttgacaaaaaaaaatattttttataacaaaatgtgtttagggtttaggatttaagatttgtggtttagggatagggtacaattattattttccatatcaaaaatttaatattatatacaaatatttaatttatgcaaaatatcatatctccttttcatatcaaatattcaaataaactagtatttttaacaaaaacaaacctaactgtattatcacaaaaatctaaacgactaaaaaaaagaaacaaaaatcgaaaaaggttattgattgaaaaaagtattgagatagaatccacaccttcacgaaaaaaaccaaaaaaaaaaaattcacacattcattacaaaatctcacactattcaattaaaagttcagatcatcgtctatatttaataatttcactctcactaaaaatagtaaattaaaatcttaaacaaactctataaacctgagaagaaaaaaattggaattgaagaaaaagtcaagacatgaagtttacaacattagtttgcatcacatttattgtagtcctcgtttcatttatggctccaatcaattcagtgaatcaagcttgtaacaaaattgagatcacgggatgtgtaccagcgatactttacggagataaaccaacaacacaatgttgtgagaaaatgaaagcacaagaaccatgttttttttatttcattaagaacccagtttttaataaatatgtcacatccccgcaagctcgcgcaatcttaaaatgttgtggtattccttatcctacttgttgatgtcagacgtaacctagaccaatactcacatcatccattcaagtaaccttcttcctcttctatatttgacaaaattatatacaaattaacttattataacaaaaactaaatgactaaaaataacttattataacaaaactttttttttccaatcaataaactaaaatgaaagcacaagaaccatgtttttgtgatttcattaagaacccagtttttaataaatacgttacatccctgcaagctcgctcaatcttagaattttgtggtattccttatcatacttgttgatgtcctaaatattaaaatatttaaagtaattattgatgatacaatttttttataagaactatgataatatggagaactcatccctatgtcatgaagcatgttgattccatgtaatgttttcgtagatcacagtttgcttatgaattatgataaaaacaaaatctagttgtgttatgcatttaggttagattttaaaggttgctcaagagaaaaagaaatataaatgaaaggagtaatacttaatacaaattaatttaatttaatttctattcattgattagatgaataagaacatattatccttactatggaaatatttgttttcctaataacgctatgattatgtaaatatatactattaataatgcggcaatatattaaaataaaataaaatagcaattgtattcaatttattccatgaaccaaaacaaaacaaaaagaaaaagaaaagaatcaactcactctatgaaaaaaacaaattaagaacaaaagccacactcatttcaactagtgaactgaaaacataacaatattccaattcttcaaaattatatctgatcgacatataacgaggtgaggtattttgtgattttaccttccggataggtcactccttccccttcattatagccaacgaagcccgagcgtacacatgaaaagtttgttttcagaactcgaagtggcacatcagttgtcttcaagaattcttcgttcattatcttacaggtgttcataaccatttttcggaattcacgaaagacttcagtttcagtaaccccatattgattcatataacaattcaatccagtagagacacatcctcttctcatgtcatcctagtcaaggtaaacataagttagtaatcatattaaattatatcttaatgaatggtgagccaacacttgttaactttttctataccatcatttgttaccaagattaacaaaggtatcgaatagagaaaagagttctagaacagaataaaattatctaaatattttttttgatatactcctagatattgtgttataatgttcttaattttccttattcttttcaaataattatttctagttggtgatgaactaaaatatcttatttagaatcttattgactacaagaattaagtgggtaattggttggaatgtaactgtagaattttagttgtagagattttgttgtatctgtgttggctacagctgtaactcttattgttgtaaaattattgctgtaagtttttgactttaaataattataaaaaatgaattagtaaatataatagtcgtaaaatttttttttgtagtaaatgaaaatgccttgcattactgatttaaataaatatattatgatgatataaaaataaaaaaatcctatgaattcttgataaaataaatctagtgaattaaaatttctacagccaagaaaatagaaatttgaaaatttattctactacagccttttaaaaaaaaaaaattgggctgtaaagctacaacatgattggtacgtaatcaaagctttaagaaaagttaaagctgtaagtcagactggtacgtaatcaaagctttaagaaaagttaagactgtaagtgagacttaattcctcaaacagaatatctacttttaaattctacataaattcttacacattttttaattcattttctctatctattaaaaatggaaaggtattataatacaatgcctcacgatattttgatttaaaatattgtatccatgtctacgtacctcgaaaccagccaggtcattcaaataacgcacaatttcagctgaagattgactgaatttagatctggatttcaaaaagtcataagcttccactgcatcgatattatccatacccatcaaagagcctgctacaatcacaaacgccccaatctcatctttaccaacctccatgtactcctcaaagctcggcacgttacccgcttgtgccaatttggccaagtcaagattggatttagcgaatctcttgtactgcaaacaaatgtttaacaaatgtaacaccaatgtatatatgaatttcgcatctagaacaaaattttttaagaataatataagacatgagaccattctttaattagctgctgactgttagctcgaatgcaatgaaatttaacatgtttaaagcaaaacaattcttaaagtttttatacatagattaagaaattatttacatctttatttgttctcaatcgaaacaatttattatctacctttacatcagtcaaccaataataactcaaactacatatataatacaaatattgatagaacatgaaaacaaaaaaaaaataattttggattgaaaatgtaaaacatcactttggataaaataattttttttgcctaaaatatcatttattatgaaacgaaaggaatatggagcacaaattattaagctcaataaaatagtcttaagtatgattttcatggaaaaagttataaaagccatcatctcgagaaaagtattttaaatacaaaggttgtattttattatgtgctattaaatcagtcgaacacattcttttttacaactagaacactatttacatcttttttggttcaaataaaaatgcgtaaaaatcgagccccgaattttaaataattcgtttaacacatcaataagttgcacttgcacacaacctttaaactattagatacaatactattgtataaaatcttatatatgaaataaaaagagatctaaataagtgtttggttgattacctcttcttttgtttgctctagactgtaagatcttccttgtggtctcaactctttctcacattcctcaaaggcattcaatataaatttaaacacgactttcaaatagtcagggtgtgtatccatggcatcatccggagcccacctgtatatgatcatatttatatcatcatcatgaccatcgactctttttttgaaatttttcaacaagtagtatacctttgcaaactattgatgaggctttcgacctcagaaaaagtagcatatctgtcacatgtgtcatcaaccagcaattcagccataaacaacttagtctgcaaaatcctcgcatgtgagaactgtggctcgaagaacgttgctgttgaaaagaagtgcatttcggtgaccaccggtctgtagtaaggcggcaatttagagtgtatgtcctgatccttataccaccttacattaaaaacatatatagatgatgagactatatttattcaaaggttgtataatggagatttttacatactttgtaaggattttgacttcttgaaggtaaagacgctggactaaattgaagttgagcttggcaaactttagtagcatctcgtcatgaccaacttcttgttcatagaaccggatatattgcactgcaactattatctccatgttccaatgctgagatatactaagagcatttcgtatatgcgttgagagatgagacgggcacatcccgtcttcagctaaggacaccaagttgtttgatgcaaagtccaacgcttcatccaatatataatctgtcgtcgtccctaagtgagcggcctcatacaagctcaacatacccctcgcatcctcgataagactttccttaaacttcccattttcctctttaaatctcctgaatacatctataagaaaaaatggatcatatttaagaaaaatatagggctttagggcttgaacttctagatatttaaatatatatatatgattccaataaaaaaagaaatgcacacaagcatatatataaggatcgcattaccggaagacatgttgtaaccatatgttctgaaaacccaaaagatggtggaaattgtgtacaaatcatcttcaccggcaataatctcatctatcttctcgaaaccatcttttagactcttctcgatctcctcttcaaagtgatacgcgagaccaaggctcactagcaaatagatcataaggcttctcttcttcaccgagtcatagcctttagaagacatgagcatctctctcacgttcggctttagtgcctctatttctctttcaagaacatccatttcctaaattgttatgtaaacatgtacagcatttagttcctgtacaaatatacatgtgtgtgtgtgtgtgtgttatactagactcaccgagacatcgaccaaaacagagtggaagtaattagtccatttagaaggtggcaactttgagattggacgatcacaagaagcacttaccttcaaaccaacctgttttgctggcttaccgcgaactgacgtaagtggaaagcgagagggtttcatttcccaacacatgttagttcgagaaggaagagagagcggagatccatgttttggaccaaaaacagttattgtttccatgttttggaccaccaatgatatcaaattgatttccacgaccaaatttataggcattactgtaatgtgatcccaccgaaacaccaaagcatcaccaaatatattaaaaaagatcaagtccctatattaaatttggtagtacaatttttttttgtgtctgccataaacttcttcaactagccttgtttgtttaaatttttctgttaccaatttgtaagggcttcgcccaatgtgtctgtaccccatatatgctcctaaaaagtcataaatatgaaaactgtttgacaaaaagaaaacaaaaaatccttcctcagtttgcaatttttatatacagttttaaaaagggtattatgaatatacatagaagattacgaaattaagtgtcagaaaaaactactgttgagcctcatgaaaatacatttataaccctatatcatatttgctcttgatgttaaatattttgttaccttttaataataatgttatcatcttgccacaattatacaatctttgaaatcaaatcgttggttcaatagcttgtaatttgtttatatcgttaactgtagtattaacatgtcaaatatttttcatccatatttcgctaacaatattatcctgatgaaaaatacttgggttcacccgtaggggtaaactcttctattcaccccctttattttagccaattaaaatctgacacctaataataaaaaaaataatttaatttaattataaaatctaatttgtcaaaaaaacaaaattatgtatcggtttgggtttatttgaaaaggtaagggtttagattttatgattaaacgaggttaaatatcggtttgggttgagaaagtacgattagagtttagattttatgattaaacgggttaaatattggtttaagtttataaacagatttagattttacaattaaacgaggttaaatatcggtttgggtttagaaaatacgattagtatttagtttttatgattaaacgaagttaaatatcggtttggatttagaaagtacgattaggatttagattttatgattaaacgggttaaatattcgtttaggtttataaacagatttagattttacaattaaacgaggttaaatgtcgctttgaatttagaaaatacatttagggttagttttttttacgattaaatgagtttaaatcgcggtttgggtttacaaagaagaattaaggtttagattttgtaattaaacgagattatatatcggtttggattataattataactttaatttattatgtaatttaagtaggatttgacatgatatatttttattgcttaatgcaaaaagaggtgaacaaaggggttcacccctcctaagtttcgttctatcctgataatacgttatctgctaactattctgatgcatgtattttctctacatgattattcagtcgcaagtcaactttttttgctcttcatgctaaatattttgttaccttttaataataatgttatcgtcttcgcatatatatgtgtctttgaaatctaaacattggttcaataactgcaaatttgtttatatcgtcaaatatattattaacatattaagttggtttgtacttcatgtcatttcattcatgcctgtgacgaaagtaggatgaaatttaattggggtcaaaattatataaaacaaaaacaaatatattattttgacaactatcctatttatgagttttcatttgaaaagtactctttttcttattaattttgtaatgcaatatattaaaaaattcatttaaattaaaagctgtatttgtagtaaatcaaaattaaattcgaaaattagagaaaataacaaactaaaatcgaaatgatattagttaactttatagttaatttttgagataaagattatctactatatatattaaaatctaagaatataatatctaaaaatattgtaaagtctatcctttaatatttgtcaatgttatataaaacaaaacaaaccggttttgagaaaccttaatattcgaatagagaacccatccgaagccgccacattgagactgcaaatactcaacggaaaaataacctccaacgatctaggaagatgtaacccgtacgtagatagtgacacaagatctgtcgccatcccgccactgtaaaaccgctttggaggaggaagaagataaccgagcttgagtttgttgaagaggcttcagtcttagttgtgagagagaaaaaagcggtagggagtagataaggaaaccatcaacggtggcatagcatcgtcggaccacatacgatctctcccgtcactgactgccctgtgagaccttatgtgtcgccagaccccaaacctaactatgaccctctttcgttcgttgccgtgaagtctccatcttccacactgcatcgcaactccgccggtaaagctcttatcgtcaaagtgataacaaaacaatacgttgaaaacagagtaacacaaaacagagtaaaagctgaataatccgattgacttgatataacgttcctaaaaatgcgataccaattttcacttgcaagagtctcgacgtgagaacatccggcaaacaatgaggaagagtctagagaattctagagagattacaatcatatattcgttgtgtaaagcatgaagtaaacgttaaccacgttaacaacgtcttcagtcaccatccaacgtcgtaactctcaagttgattgccagctcaccaatgcgcacgtgcttatcttcttaacccaaacttcccacgtgccagctgaccttctagaacactatatcacaaagtctcatggtattgtttcacctccattgctccattgattttgatcagaaaaatctcgccaagttgttgcatgggatcatgattgaaataccacaagccacggggtctcatcgttgatggaatcgacagagaaatctcatcgacggtgcaagaatttatgctaagaaaaaagaaaatttaaaagagaaaattgtccgcgagtgagatcaatccggtgcgatttttctctgtgaaaaaaaatagaaaatttttattttttgttggttgcagattataatacacgaatttatcaaaccatgattcaaaattttctacatagatagatgcaaatcatatatatgaaattttctacatagatagatgcaaattttctacataagtgacacatcatcacaccagtgaatgccacatgtcattctaaattattatcattaaaaataacaaaatttagtgataaaaatgaaaagttttacattgcattgaatcatccattaatcctactcttaactaaatatcttcatttaaaagaaaaaatacaaaaaatcatgttaatgtatcaaacactactttcattttacttttcttattttgctattttttaatagtcattacttgataacgactagaaagtttcgtgtattgcaacttagttgtttgctacttaaccttttttagtttagtaattttaacttacttttttcttacattttttggtctacatgattgtctttttgtgctttatgataaattgataacattaataatgacatgcatgtttttttaaagtaatggtcttttcagatgttagatataccaaaaaattaaatatacgacactatctccaatatgactatatgcaaatgcaaagagagaaacataaaattgttgacttagaagactatttaattcttgctttttttttctttttcatgtgaaaacttttaaaacaaatgagtagttagttatacatttgttattcaaattatgtcaatccaatatttagcaatgtgtctatcatgatgtgattggaatactagatcatgagagaatacatggaacaagaaagtgtttgcttagattcaagttagacaactttcaaaccaaataagtaacataattccataccattgtatcatatattgttaatgtaaatatttcatgatagttaaaaagattagaatctttggtatatagataagaagatttatacatgaaaaaaaaattcattgatatttgaatcaaaaatgaatctaactatacaaatataattacataaaatgaatataactttattaactacataataacatacacgaaaatagcataaattaccaataaaaatagttaaacataattatttttaaacaattttcaaaacaacaacccacgctacgcctggtactcacctagtcttacatataaaaaaaaaggttttactttatccttaacaatttattttttaaaatagttttttcaattaaacttaaaatataacacataatcacataataacttccgcccacagtgctattacgacggcgggtcaacggcgggtcaccacattaagccatacttttaaatccacactttacctgaaaattgcatatttctaaattgactatttttttctctattcactgtcatttaaacacactataattataattgtaactcctataatctaattactagattttaacccgtggtacaccgtgtgaacaatttattttttaaagttagtatacataaaagtttgcaaattgtatctatttataaaatatttttattttatagtttacaattgttattaagtaacgtcctgccaaacccgtcctgccaacccgtcccgtaaaaaaactatttattttattaatattgatcttatttatgatatttttatgaattattatctaaatattttgtaattttgtagtaattaaatgctatcaaatatctttgcggtttgatgattataatcgaattgttatagtcatggagaaaaacaatatcaaaaatgataattttgtagtaattaaatgatattaaatattttggaagtttaattttagtaactaaacgtgtagttaatgtggagaggtttagggaagattgttaaatatcaaatatttaatttgaagattttttttctaattatcaaaaacaaacattaaaatccaatggcagccattgtaaataagtcccaactacaggatttatttcacaaaatgactacaaaaatatatatatatatttcataaatgtaactttcatcacttcttttcctataaataatcattctcacatcctcttccaccatgtctcaaatcctaaatattttatttgttttgtttgtgttcttacatgggttgaaaactcaattaagaatcattggaagagtttgattatatactttatttaatatatattatatactttatttaatatatatatatatattacattcttttaaattttatttcttctttgctttttgttttatatttatttttaattcaaattacatatgtataatataatcttgatggcaataatataacctaaataaaggggcatataagaagatattaaacaatgaaagtaatctttgggattttttaaaaagcttttgattgcacttcatatgattttataggaaatgtattcaatttgttatttacaaataatttggaaaatactttaggttatgtgtaagattatatccacaacttagactaaaatttgaatatcattgtaaattttcatttttatcactaataatgtttattttacctcaaatgctcacaattactgaataaaattattatcatagttgaaaaaaacaaataaattcatgatattaaataagttatatattttgatattgtatgatttgaataaatatcagtgtagaaaatgttattgacatttacgaaaaacaatttcctaatttttttttaaaatttttattacataaactaggactcaaaacccacgcgatattgagggggaaaatattataaatttatttacatattaatttcttttaaacaaatcaaactcaaaatgatttttattataaattttagtagttatttaagagtatatataaaactaacccgaaaaaataaccttaaatattttgacggaagtttgcgataaaagacacaacggagaaaattaaccgccaatgttaatgaaaagttacgataaaaagtaatcatcaatattttgatagaaagatgctaaaaacaactgaattaaataaccgtcgatatgttaagagaaagtaacgacaaaaatacaggaacaaaaaagtaactattaatattttattgcaataaaaaaattcaacaaaaaaaaataaccgtcaatattataacggaaagttgcaatgaagagacacaaccgaggaaaaataacggtcaatattttataaaaaattgcgataaaaacacaaacggaaaaaaacggtaatattaagaaaaaattacgatgaaaaacacgaaaaagtaacaatgaaaattttaatggaaaattgcgataaaaataaaataatcgtcaatattataacataaagttgcaataaagagacaaccaagaaaaataaccgtcaatatttctatgaaaaattgtgatcaacgacacaaacagattaaaaaccgtcgatgtaaaagacagtttcgatgaaaaacacaaacaaaaatgagaaccatcaatattttagtaaaaagttacgataaaaagatataaccaaaaaataagcgtcaatattataacagaaagttgcggtaaagaaataaccaaaaaaaataactgtcaatatttgaaggaaagatagcaataaaagaaactaaaaaaacaaataaccgttgctattaacgaaaagttatgatgaaaatgcacaaataaaaagttactatagaaaaataataatgaaaaaataatcatcaatagttaatgaaaaattacgacgagaacacttgaacgaaaaaaataatcatcaacatattaacgaaaatttacgataaaacaataaccaaaaaaaataaccgtcaatatttttacaaaatacaacaattaaaagatacttacgaataaatacttgcatacatatttaaaatattttataattaaacaacattggttaagtagcttcatgcactatcttcatccatttgtaattatttactcgagtcataaagcagcccaccattcatgcactatcgtcatccatttgtaattatttactcgagtcataaagcagctagcccaccattagttttatatatttctcattaagttataagtaaattattttagcacttcgtttgtttggttggtaaaggagcttcatgcactatcttcatccatttgtaaatattttactagtcatatagcagtccaccattccggattttatatttccatgatttaaagtttcactgatttcgatcacaacaaattaatctcttaaataacgcgtatcaccatatttaaatcaatttttgtcgcaaaagtttttaggacctgaaatattttgaacctgaaatttacaattagtcacatattcattcgtgaagaccgatatagtcacttggaattttgcaatagttctattcgtttttttgtttccgtccatcagttttattaaataatcggaaagagctggattctctttgagagagagctacaatggttctattcacataatttctattaggtttgtatttctgtttttgatttgacaatattggctacgattgataacattgcataatagcataatgacagaagttgcaaaataaaaattggcaaaatgaaaacttgtataataaaaaaccatagaatgaatttttaaaaaaaattatgttgattggatatactttgtagatgtggccaaaaaaaaaaaaaaaaggatacactttgtagtatgacaaaataaatattatattaacaatatatatatatatataattatatacttttatacttaataaaaataatgtttatacttaataaataaaataatgttttaaaaaagatttaacatattttgagtaatatttgatactaaagaatgtaagattattaaaaataactaaaagttgtgaaaatgtttttttgtattattaattaatgatataatttttgtgtaaattttttttttttcttttacaaatgctaatatttagtatgtatagaataaaacagtctattatgcaaataaacaaatatatactcacttttttatataatgaacttttactttttacttataattttaggcaaaaataaaaattctacgtttttttcgttttctaatgcaattatgtagattttctggattgataaattttcttcataatcgcattagaaaacgccatagtgtcattatgcttatgtgtgttaccaatcatagctattatgtaaattggtttaattcggcttcaattttagtacacattaatttgtataaaatattttatcattttggttttaattgtttcttattttccagggtgattctgatagttttagggtccgattgatgacctacaaaggaatacaaggaatgaagaggaacatgattaagaaagaacaaacagaaaaaaaaatgataaaatatgaatgaagaggaatgagtgtagaggaaaaatagaacacatgttactgtaaatgataaccaaaacatagaacaaatagtaacaaaaagtaaattattttttaaattaaatattaaacgaacatgggtgtaattaaactttttaattaataaatgtttaatttgttttcctgtttgttcctcgtcaaatttgggaaggaacaattttcttctacgattcctcaatatataaggaatgattatgaatagtgtgggttcacatgttacaatttagaaaaaagattactggtaaatggtaaaaaaaaagaggaacaacatgttcctgcccattcctttcctaaaaaggtggttaccaatcggatccttagacttttagttaagtagatatgtattactgaaaaactatttcaaccaaacgaaaactcaattcatttttgttaaaaagaacataactatgaaattaaagcttttttggagctcagccacaaatgtgaaatatctctttttcacaaaattatcacgccaaaatatttctgttttcttctacacttcataaactataaatactatataactcgtttttgagttatttgattcataatttaaattatcccttttatatgtagaaatgattggagctcatgagacacaagagaatactttctttcacgtaaatgtataatatggattggtttctttatctagaatttgaacttaagatgtatacattacggagctttactgcacacaaattcacataataatttagttgatgaaattcgcggttttaatagtaacaaagatatatacacatatatatgtaaaaaaaattgttactgttgaaattgtactgcactatgcggttcagcaatattcaaagctgatattgcataaactttcactttacaggattaatttgcatattttttagaaatgaaagatttgacaactttaaagattattttgcagaaactgtaaattatgtcacatatttaaatatatattcaaaaggtagatcgagtattcaaatggttttcactcaagtgttaaatattctttctagtttaagtaggcatgcaatttttttgttttgttttttgcctgcattaactcttagcggttagtagtatatataaatatatatactaatccttccgatgcattattagtattgtttaaggttgtttcacatattaaaaaaatcaattagacaacctcaaatttaaaatatctcgtgggtaaagtttgattccttaaaactaaaacaaggcacctacctaccaaacaaattgtttgtttagtaagataatgactgtttttatactttcgttgtcaggaatcatattcttcaattgtaagacttttcacagaatctttattattaaaagacaagagggataccttggattgttttggtttttttttaattatttggaaattcgagtttaaaggttttatatttctcagggatctatactaggttaaattcatctccttcaaatgcctcataacatgtttcgaacctaacatctctacctaaaagatttaccactggaccaatagcttatcggtaaacattggatagttttcaattttcatactactatttgatgacatttattaatatttatttggccttatattcttattctaagtttttcttccacgtccacaaacctgaattactagtacgaggaggcgaacttattgacatattccagagcaagtttgtgcggatccaatagacccaaagtgagtccttagcataaacaagtctccatataagtttcaatataagtgttcagttcggataaattaatcccaagccaccttcctttctgggtttacaaacatttagccaagtatctttcgccttgctagtgtttagaaacatcaaaacaagtgcccactcttctcatactgagaaacttttttatgctttatgacaactcaacagatttatgacaactggactgttagtttttcccgatttggattattttccttgtgttattttgtatcgtttatcgtgtcaaggcctattaggtgcttctaaattatagtgaactttatttttcaaatggataaagatggaagtgcaaaaactaatgtactactcacgttgccatctttaccgaacatatgtacgggtacgggcctgtgaattctaaaccataacacgtacatgtttctctcgccataacagatactgaacttcctcgatctatttcacatagaatttagtccagtctgttctagatcgattcgttccaaattgtttccactttttatgtttttaatttattgttcttgtatccgcctctgtttgacctttttaaggctacgagttccaactgatttttcattgaccaaaaatcatttttcttaatttataatgtctcgttgagtaacacaattactaagaaaagaggcacctagtaacctaccaaaatcactaagaaaaatgatttttcttaacgggaatttggtcaagaataccatattttaagaattattttctaattctactacatttcaaaattcattttcatttgtaccacattataatggattgtcgtagtcatatgcataatgttatctccgttgagcgttgtagagttgtgtcaaaataaaggtaatgttggagagagaaagtgaagcggatcttgttccctatcttctaattctcttttccatccagatcttatccatgatcttattgttatattcagggataacttttattacattggagaacaattttttctctaaaattagtaaggtaaaaacaattttaaaagtagatctaggtaaagacataatcataaacttggtttccaaatactaattttagaagaaaagaaacacaaaaactgggaacaactagaaccgtcaattgggcatctgaccatgggctaagcccagtccacaacattatggacagtccatggtcggcccgtaaagaaaacgggttaaatggtctaaagaccaattatgtccacgggtttaatgggctagcccacacggtctatggttggcccatcaagtttctcaacacatcaattttcttctcttctctctccctcggcgacgaagctccctctctctctctttctcgcttcgacctctctctcaactcctactccggttagttctactagaatatgaatccgttgattagaataagttctctctgaaatatgcgttcatatgatagtctcatagattttgttctctaagtccttatgcaatttcatcgctttgttcttttctattccttaattgtgattctgcatatgctttctttgatttcagcttgtgggtttgtccaaatttcacttgtttgctattctttgttattctctctctcccttcctttgatgccaaccatgtgtttgatggaatgcctcacagaatatgtagagttttgttttggtagagcttgtaattacttgtgtaaagcttggtgtttatgtatggagctaagtgtatgaacgtttagtgtgtgtttgctaatgttaatgaacgtttagagcttgtaattaagtaatcgtttctcaccacaatccatcacttgtttgaccaaacgttgtttgacaatctgatttgtttgtaggctccagctgagcttgagaagagaaaacacaagctcaaacgtcttgttcagtctcccaactcctttttcatggtaatgtaaatttgaacctttctccttcttttgaaccctttaggaacaaagtctatgtggttagaatctatgaactagtttcgactttaggaatctcaaatttcaaaacttagctgcagctttagagaatacattctcgtattgcatatttagagatcaagtttctgttttccttgtgaatcttagctgaattgtttattacttgtgtcttgataatttgtttgttggattatacttgttctcttttagcagcattattaagcttagaattcaagttcttgttgctttagtttaatttgcttcttgttggattatatctgttctctttctctcattctctttttttgtgtgtatgtctttatttgtttatcactgctaaacgtgtgtatgtctttatttgtttcagaaatatggaattggatactcaaaacttggttcaaatataatattctgaatcgattgaccagtaaggaaaacttgactcatgtgcgtgataagatggttcaactatttggagcttataaaagaaccacatgcaacattgcagcaagcacttctcaatcttcacgaaaggatatcccatttggatatgatgtaagttgctaattttgtgtgtttacagtattgaactatacggttggtcatattttcttttgttggtcatatttcaggggttttactcttacttttctcaaagaaatggaactggaaaatcaccattagatatgtacttggaagagcctgtgttagatatggtctcttttagagatatggatgttattgcatattggaaaaacaatgtctcgcgttttaaagaattgtcatcaatggcatgtgatatcttaagcattccgatcactaccgtggcatcggaatcagcttttagtataggtagtcgtgtgcttaacaaatatagaagctgccttttacctactaatgtgcaagccctcctatgtactagaaactggtttcgtggatttcaagaagttggtaatattcacatcttgaactcgtttataatagtaaacttatatggcttttggactgcagcttttagattaatagctcggtttttcttattgtagaaactgatgagatccaaggtcaagaggacacaaacaccatccttgcatgaacgtttcaagactgggaagaaacaggtacatggctgttctcttaaactctgagcctatggttatgtgtttattattctcagtctgtgacttagaagcttatgtaatcgttttttcttttctttgtttctcataaacaaaggtttttgcttaagaaacaaggaaaaatagaaccatgtaagacacaaacaaagctccaaacagtaacgcagagacgaaatgcaagttgtgccacgtcaaaataaacttctttaagtgtagttgaaaaatcatgggctgaccatgggctgaccattggacaatggtccttaatggtcttggacaaattttcagaccatgtccattaaagaccaaccataaaaacccatgaaagatgatggtccaagtggacatgaccattgggctttggacagcccaattgacacttctaggaacaacaacaaaaatcgaaatagataatcactagttttcaaaaaatcaagagagaagtagtagtagaaacaatgaatcaaggattaaatttggaatctagttaggaacatggacatgacgtgagagaaaaaacattttcagtaaatcaaatttagattttgtgttttgaaaaaatcatatgaaacaagaaagagacaaaaaaaattggattgtgaatgaaataaagaagtaaacaaaaaaaaagagagaaagagagatagaaaaaagaaagagacagtgaggataaaatagacaatatacaagccaaatgcggtatagatgaaaaggtgaaggtaaatgtggtagatttgaaaataaattagaaaaattgttctagttttgttattttttcctttcttaacacctatattctacttttttgttcaacaagactttataccgctttagaagatgcttctaatatattttcctttaatataagcattttcttcatagaaaattttaccgtgtggtacaatttaaatttacaatcaattgatctatctaagtgcccattacataatagagacatggttgttgtttttctctctgtcaaacatcacttatattaatttgaaaggtctttatacaacagttcatttagccataatggcggatttacagaagcagagaagaaagaatcttgagaattatttaattttcctaaataatgctatgctattacaagatcgtttaataaaaacaaagagaaccgaggaaaattttgttgtccataattggatgtcctgtaacaaattagtgatctcccttctttgatgtgcatctcttatagtgttgatgagaacttcacaatctccctcgaatattacatttgagaaacacgacaccaagcttgttgcattgctactgatagagctttagtttcagctatcaaaggagagactgtattattcagttgtgaagaaccccatgcctttgctgcaccattataatctcatattttccttagttatgttatgttggtataacaaatatttaattgaaaaaacatacaaaaagcaccaaaattacaaaataaaaggtaagtattccgaaaaactcgcaaaatttattaatcaaaatagaaaacaaattacaaatggattcgtcttggacacgtagtaccattaacgtcatcccttatattcgtttcaacaaatgggaatcagaaacaaaaacatgaaatcctaaaagtatagaaaacacatagtttgctaacccatccgctagacgtttagccttcctatacacgtgagaaatccggactgtataatcctttacaagaaaaccatgacactaatgcaccaagaactaccttgtcttcagaaacccagtcaccatctctgactccttttctagatctaggagaccttctacatctcagcggctagtggtgctgaacatcacccaatattaacggtaaaaccaccacaccattccccatcactatttctcaacacgccacctgcacatgctaggtccggatttcctcgaaatgcacaatcagtgttgagtttgtaccaacccatattaggtgacacccatccaatcaatcgtcgacaatcaattttcttttgttaattaggaattttttttaccaaccgtgctattaataaaccaagcctcgagatagtaacgtttaagtctaggagagaaagttactgactattttcttttcttcttttagagagtcattatttttcttttgattcgttttttgagtcataaatttttgttggaaattatgatctttttctctagattattgaatggttgagtaatgctacaaattcattcaaatctgactaatgaaaaatctagacggctaactgatagaccaaaggatgaccatgtttccaacataatccataaaggtctggactaatttatgcgctcttccttttacctcatcaatatagttagtatttaaagaatttgactcgtcattcatacatgataaaagagccaatgtgaaaagtgatggtactcatctcccttattcaatatatataaaaaaagattgagatgatttcctgttgagtaaagggatttatcccatattttactctctttatgaaataatcacacaaaagattggaataatgttgaagatatttttcctatgatacaagcacaactttaccaaaaaaaaatgtgttgaaaaagattaagtcatcatggttcggtttttgtttttgcgtgagggtaaacaaaaactaaggctgtagtagttgatataggatggtttttaacctatgatataagtattgcttttagagtttttttttgttatttttagagtatttttaatctttttccgattaatgtgtgtatgaaactaatttggagattatggattattgtggagcaaaacttacatgacaatttgattttacttgtcttttaaattttaaagatttacaaaattggccaatactttttttctgtttgcaaaaaaattccgaaaacgggttttatgaacacaaaaagattgtgagaaggcatgatcgggaacaaagtaaaatattaacaattttccgaatgattttttcaaaaaagctaataaacatgggcagtacatataattctacggtcaaaattttcaactctaagcatacggtgttaaacaatcaaacccttaaccactatacaacttgttaatatatccttctccaacaaatctcttaatatatagacgatatgtaagaagtaagaacacatcaagtaatacacatgatgaaacttgaaatgaaacctatctaggaaaggaaaaaaaactaatatttctctgtcaagtgaagcaaacaaaaaaaagcctccagattatcattgaggtttctatggtcgagaagcatacacatctgagtgttctgaatgcttattgaggcaactcgagatcgggccgtcgatcaaaagcatcactagtagaatcatctggaaatgcgtctggatacgtagccagaatcttacttttaatgctcctgaagcatggaacaaatcatgagccacataagacgaacctaaagagcttagagtcagaaagggaatagcataccttagtttcaagaagatgtaatcgaggtctgctttcatcgacttcaaaagacgggtacttctagcgaattccaatgatacatcactaaagcaattctctgcaaattcgttgtaatgggagagaactgcattgctatcctgtagcctccccaatctaagacagaggcgcaacatatcaagttcttcacataaaccaagtcaccaagatataaaaagatgaaaaagattcaaacaaaagacttgtcaccacctataaacaccgtaaccattaaccgcaaccgcatataacgaactcacatcggtggagtctagtgtgatcaatgttaagacgctagattagattccaccagtttttcatcaattgttatcactttatctaactagattaagcttgagagagtcttagaccaagattactaattgataccaattttaggacaaaaatgagaaacttcaaaagcttacatacatgagatgctgcaaatgtctaagagaattcaaatcttctactttaacaagagttttgaattcgttagacacttcttgtgaagctgctcttatggtttcttccatctgacacttcttatgaacctgctctaatggggttcttcaacctaaatgacaaagaacataacagccaaagtaatgtcttaaatcagacagaaccaaaactcgtactcaaagactcgaactttctcatacatatcaacctaaacttgaacattccacattagccagaaagcattagagtcagagattcaaaatatatgacaaagaacataaaagcgaaagtaatgtcttaaatcagacagaactaacataaaaaaacctcgtactcaaagactcgaactttctcatacatatcaacctaaaattgaacattctacattacccagaaagcattagagttagagattcaaaatcctcaactaccaaaacgaaatcaccttttcgagaatttcttcaagagatctaaagcaaacgtaatttgaaacaactgaatcaagatcacaaagaggcaaatggtaatattgagtacagatcaaacgaattagaaaacgttaaaattacagaatcagcagaccttgtggatgagacttgattcggtaatgtcggacttcgacatttttcgattataaaagctttaatttacagttttgtacgtaaagagacaaagagagtgttaattttcttaaaaggccgagatctatgaagaattaaatggttgatgggcctgcttttggggtataaagcaacatgtatagccactatgaaagtagacgcactgaatactttatagcaacgtactgatttcaaataaaaagttacagaagttgggaagccaataccagaaaaaaaaaaaaaaaaaaaaaacatgacatttgaagaccagtccaagtatgaattttaggaccatatgaaaaaaccataataatgtatggggtattgtgaagttaggaacttttttggggcttttatagatataggcatattttggcccaaaaattagaaaagagacacatttgacttgagcttataagtttaagaactttttgatctgtgaaatgacaatattgccctcaattcccttgtctctctgtcgtgcgcctgatttttccgaccaacaatcttctgcttctcaccgccgactcaacactctatcaaaatcataattttcaggtccaacaaaatcgttccttcacctctgacaactcatacaacattttcttcaccaacctcctccgttaaaatccgatagatctacttaaaagagtgttgatgcaaagaatctaaactctatggggataatgtctagggaatccacggattctaattttagacacaaattaaatcaattcattctaaaccaaatttagttgctagtgtcgacgaagcttcccatcacggtttgtaacatgagatcttgaaagcaggcagtcaaaggctggtcgattaggccttcaaactgcaattttcaaatctcaaattggagattggaaatcagataaatataacttttatggtcgtattttggggcaaaaagaaaaaaaatgatagatttaaagagacaaagagatgaataattatggtagtcattgaacaatagcaattacgagtattcttctgtatggtttgtgtgtgtttcgaacctgggttttggattccttatggttgtgtgggtgagagataatccaactaaaaaaaattaaaaaagagagaagaggaaattattaggtttgtctgggtgacgaagggtaaaatcgtcaatatcaagagatagaagtacttaattctataagcacatgcattttgtgcctgtatcgacaacgacatagaattttaagtgctttattcgtaattgatcccatttttttagtgtttatgtagatgagtatttttacttttggtgatttgcaagaatagccatatttaataaatgaattaagaatatagcagcataattgtaacaattaataaactagcatgagagacaatggaaaagacaattttagtgtttagctgtataaaaaatataaatggactattatacataaaagtatatcatattatacactttaattgttcataacaaattcatgaagtattgtaaaaaataaattggacgataaaaaatataaccaaaaacatacattatagtatgttttgattgaattaaactagagttttgatggaagaaatctaaaccctaagagaatttagaaaatccaaagaaactaattttagacatgatccaatcaattaaactctaattcttttatcctcaaactactaatgattttgtgttctatataataaacatgaaattagagagttcggcagtttcaataactcaagctgaattattgaaccaagaataagaaggtaacatttataagaaaatatcaaattcaataaaaacaaaggactaaaaaatattgaaatagtatagtattgctgccatgagtggagatttgaaacagacaataataagaaaccaaaaaaatcaagttctcaaagttgatcctaaattgagtgaattattgaaacatgggctgacgaatgtggggattacgaagttatgaatggacatagtagcgaataaattactaatgtttggagaggaagagcaagccgccgtgcttctcatgcagctctctcttatggattttgatgttgaggatgatcagaatctggaattgaagaagagcaacgacatacccaagatggatctagtgatctacaaccccatcgacatctccaaaatggattacggcgagctccggcggtaggatttgaagtttctgtggaggaaggagttgaaaaaagagtggtgatggtaagagtgatgaggagatcgagggttcgagttgggttgctgcaaggcttccgtttctggacatggcggagcggaagccaacgtagacaaaaaataatataaaaaaagaagagaaaaacaaaagaaatggaagaaatgtgtgagggcaaaattgtcatatatacataaaatacataaaatattatcttcctttttgtcaagtgatagtttcttaatttaagtttttttttttgcgttagttttgcaaatttctcttttactttctctaaaagactaatttgacctttgttttttttttcttctttgaaactgatttttgtacaaaagaggttttagcaagatcttataagtgaaataaaaattaatttggaaacgcagaagccaccgatgccgacgtttgctacaatggagctaagatatttttgccagactatttctctttcgaaatccagataagaaacaacctaattagtcaattacacatccaaaaaatttgattaaatgatcgtttatattatcgcttgggttccttatatggtatcatcattagggtttagttatcttaaatcaatcgagttttgtgattagaaagagattttgggataaaagatttgatttttttgcaaaaacattggattgagaaagcagctaagagaaagaagatgatgagatgatgattcaatagtaaaatagtcaaatcatcaaataaaaatgcccatctacataaacctaaataaaaaatgtttattttcaaatatttgggttatttctataaaagcgccatgaattttagtacccagattttgagaaaacatatgtttctctatcaaagcataaacaagaaacaaagcaatgagtagtcctgacctgaggatattccgcattgaagggtgacattcccaacagaatgatgccaacacaccaccaattagtagttgcacctgaatgataatgctaagtataaattatattttaaacaatttatttaaatcatattaatttatgattatgccaagtataaattatattttatatagttgatgcgacctcatattagtctcattaaatcagctaaggttgcatattcggtctccgattttgtattttttaaaaacatttgaatccaaattgcaaaattaacacctttttgtttaaacaacatgccatttcgacccacacgtatcattggattccaaaaccgttgtgttgactaatttatattaatgttgactcgtaattatacactaaaatacgagtttcggtatgtaaactgaatttttcaagagttaggatataaattagcactgatcgtttgttcggattggaaaacacacttttgaaaattgttcgggttgaaaatgaccatttttcctgaattattatatgcttaacttcttttttctaaagatatattattatttgtttatctagtaattttctatctgcaaaatgttgtttatcaaattattttgtctcaatttatataactaaggagagtccaaattccgaatctttaagtgcaaatcataagtatgtctttttctgattgtgatgattcgattttaaaaggaagtagatcaaaagataattcaggttacaccattttgatctgtgaaagagcaaagctttcagatcaatcttgtaagaagatatagtccttgagatccaccgattcacatggatgctatgttacaaagccgagatagaccaagggtgaccctcgtgctctctgctacaattacagtcgaagatgtaatctgaccttgccgggtcgtggttggaaccggcctgtccggatatagtttaagaacagtgaatataaaactcattcccttaatcaagctcctctgttttgaaaacaagaatgaagaaacaaaggaaggagatgagagaataaattgtaaagtccaattatcaaagttataaaatggtaaagaagagaaggtatctaatatctatatgatccaaatcatatttttcagagagtatccgagctacaatgtgaaaagaatagcaaataattcaaattgaaactttaaaagctttaaaaaataaaaattcattagtcaaaaacatcatgataaggtgacaaattaacttggttgtggggtggatccacccaagcgaagcggtcagacaaatagttacatccagggggacaccggctaaatttgttaccagcgagggagtagtacacaaaagatcgcgcagcatgtgatgtatacatgttattcctatccagggccaagagactagctcttgtaagagaggtatggtaaccggcaaatactgtcaagccaccaagttctttcttctcttcccatacctcgcgtttaaggttaagtttaaacactgaggcttggttgttgtagttactgaaagtggagataacataaacgtctccttcatgctccatcatcaacactcgcatacccatcaaacttggctgacgaaaagctaaacaaggttccagaggaagaatacaaggtttcacaggaagaatattccaggttgctctgtgcgggtcgaaaaccctgaggtagccgcaggtactgagacaaaagaacataccattcgaaaaaacacatttgtcccatttgcgaccgcgtatgtggttcccgaagcaattggtggtccaaacggtttcaccaagacgccaagtcatgatctcaaaatagtagttgacacaagcaaccaaacaactagttgatgtaggagcggctgagaaagccccgcaacagggtaccaacagcggtaagtagacgcgctcacgggtaaaagggttaagaaagaataatgccccggggtaatcatattttgacacaagcagccaaccatttttataactaaggaatttatggcaccctaaccctggaaactcttgcttatatgattgatttcgtaatgggtcaaaaagaatgtaggtttcacaaggagtgttgggatcagtaaatccgcgagatgagcgttttagtggataaagcagccaaggacgaggctgtaacttcctgacagaagcagctgcttcacaccatgacttgcagacagcggaagcttgtatgttggctcttaactcaagacgggacagtatctcctgcaggagatctgagggaatcttttgatcccacaacagtcatgtattacacttcttcttcttcttcgattgacgatctcttctagtgtttattatactgcatctgacaattatagcaacaaggagaatataggattggttaagaaatcacaatggaattggacacttgtcattgatgttccaatgttgtacatactttaatcgttcgttcgttcgttcatgcatcagtaaaaaaacgtaagaacacaaccctagtcttaattcagagaccataaaccttcgaattctgataaagaggaatagagataaataggaatactcacgactgcatcattctcggtcaccgtgagtgcttccggggaaaacaacggtggagttgcgtagcggccggcagtgtaatgccaatcttcggtaattcacttctaccgagaatgatgcagtcgtgagttgttttccaatagggtaaatctttcggttcgggttcggtttcgggtccaatttttcgggtcggtttcggttcgggtaatcggtttcggttttttttccagccctagtcaattgtactttttcatatataagaccagatgtggtaatcctggacccggtcactattttgttccggttccattttttaaaccgcaacttatctcgaattggtttttttttgggaaaatccgcaataaccgggaattcaaagctttatactatcatctagctggaaattcacattcatgtatccctcttataaccttgacatgctttctgattactagactcaagttttctaaggacaggtcagtaccatctctgttaaaacctcacaaaatttcaaaaggaagataacaatgtcactaagatggagtgacaatcctcatataacatgtgaacaagagagaagaaatcattaccatatcactctttcatcaattttctcattcaatggtctgtgcataagtgcatgtatctaaaacaaacaaacaaaactttggactctagagctacaatatatttgcgcatcactatctacttccactctctgaaactcttttgcacatctgcaaaaaagttcaattgtagcaataagaattggataatgtctactctgcattgctgaaacataaaactaagagagaatagttcaactactgaaaatagtagagctacttaacccggaaaaagacagaacaaacatgcaaatttattgctatttccatcataacttaacttaaatgtcaactaattgaaaagggcaactgaagatggaaataagaattaagaaacaagaaacagaggaaggagatgggagggaagatcagagcaaagggatagccgaacctctgaacaataagtctctatagtatgtcgcgagtgatcccaggaactatgggagcgagttgcgtctctccttatccacacaaggcttcatttttttcctgtcatagtattaaatcaaaacttaatgccctctgaatgtggaattgaagtttatatcgagaatcaacaaaagattgaacatatgtacataatcttgagttcctttcctttttaatcacttaatatcaagctaattctaatagaaattgtaataagggaaaatatacatatacatttttggtaaggtttttgaccaaaaatgcctcacttttttactattgtcaatattagtccttaaaaatttaatcataaccaaatattctatgtctaaaaacttacaaattgtcaactttcattaaatatttcaattaaatttttatcctatactttaatttttctttattgaactatattcgaataaggctaatttcctaaaatctctatatcgacattaaagatcaatatataattttctgtcactatatttgtcttatatataatttattttgactttatatatataatacatatagttaataaaatatttaagttttctacatctactgtaattcaaaatttaaaaacagacatataatataatactcaatcaatgaaaacaataagtgtacaagatcccacattgcttaaaattaataaatcgtttagagtcatactataaaaaagaccaaaataattttggatatgaatgagcgggaaccttaatatatcaaacatccaaaattaaaagtgttattcggtttactccggttctttattttaaattattaaaaacttaaaagttttaaaatattaaatatattaaaactttattaaaattcaagtagtacaatttttaagaccataaaaagttttaaatattaacaatttttaattttttgaagttttaaattttgtaaatatttgaattttataagaagtttaaacatataaatattaaaaagatattaatacgggcgatatactacgggtgaaatcctatatgtaataatcaaaatgaaattatgaagtttggatcgatatttaaacttttttgaagtttctaatattataaatattcgaactttataagaaaatgacaaaatgatgaataatttcatgggacgaggttatatggtgggacgggtttggattgaaattaatacgggatggtacactatagatgaaatcctagaattaacaatcaaaatacaattatacaattttaaacactaaaaaaaatattaacgaaacaaatatataacttaaaatttcaacaaaaaaaattagttaataaaatcgtcttgaggtgtatcataatatcatacattaaaaaaacaatagaatgtatctatagttcatcttaaaaacaaaaatttaattttttatttaataaaaatataagcttatgatgtacctcttgaatatgttatttatatatatatatatatatatatatatataaaatattaaataaaataaaaatctctaattttctaacaaaaatattaacatgcggtataccgcgggtcaatatctagataatacaagttttaaattattattacctctacaaaactctaaccacaaagaaaaataatgaattttaatattaaattaatatacaacaaatatcagaacataaaacatgaattacccaagtttaacataaataaaaactaggtgtcaagaatatatcattcatatacaaacaataatttttataaaaaagatttatataacttttaaataaacatatttatccgcggtgtaccgcgggtcaatatctagttggaagtaaaagaggttacttaaaaataattactatatatgcattctatgtaaactgtcatcaatacccttttttgaatgacctcgaaggcctggatcctattctggtatgttttaattcttcatatgtcaaacctaaaacaagctttgtgtgggatgcttaatctccatgtacgaggtattcatgtgagagaggatccacttatttcgttccagttttacatctatccatatccgaattttggcttctgcttcacctgctcccatcatatggatcttatgcttcaaagtatattctgaaaattctcgaagagatctaaaccttatgctttggttctaaagcaatcctcaatcgattacatcaccatagtctcccgaatctttgtcctcgtgctactttgggtagttcatcttgctccggtgagaatcaacgcattgattctttcatcaacgtcacaaattcctgtggccatgacttatctgtcgtctttcgaatctttcgaaaatgatctctcgattaaccatgacctcacatgtctcaatacgctcccttgctattgcctcacaactctctttgttttaaaatcgttgaatcttatctatatctttatgacatttgggaatgtcttattttgtattgctttaaatttggatcacatatatctttttctttgtatttgttcctttgaatgaatgaaagaaagtatttgacaaaaaaatagggtttatattatatattctatacaccgtgcatgttctatgaaatttagattgtgatctatacgctctacatgatgtacaaaatttagaagtcatttacgtactacgacttttggaattcttatttctacgaaatttagaatatgtattatatattacactttatgttctaaaaaaatagaaaacattgtctaacttttactttaccttctatgtttgttcgaaaatatcacccttatattctacaaaaattagaaaacaaattatttttaatttagaatttcttaaggaaggaaagtgaatataattgcttctagaactaactcaaacaaaaaattgaccagaatttcatacaataacacaacacacaagtaacttccgccaaaccttaatgaatctttgcttccttactctcggatttgtcgtttcgattgagggtatgatttgaaaaaataagaagagattgtggatgaggtttgaagaaaaaaagagatttaggctgcagaaaaatttaacggcggaacaagaggacgaagtaaaataatgtcgagttttattttctatccaaaaagtattatttaaaaaaaaataaaaaaatcatcagcttggttttcagaagaaaaaaatcaataattttggatggttgttttctttttggaaattgaaagtataatatttgacttatattaatttttttttttttgacagcaattgacttatattaatttatatgttaccaatctttaatctacatacatataaggacaaaaactttagaaaacttccttcatttctaattttcccttataatattaatgaattcagatcttcatatcaacctaaaccgataaacattgatgaccaaaatctctcaatcacttcacaatccgccaattgcgagattgcctctcaaaagaaccatcgcagatctagagaccatagcaaccgtctcgcttgagactataaaaacttttctaatattgatggttatatgttgcatcatcataaactataacataataaactcagtcattaattattaaaaaaataataataattttacaaatatcctgaggatcaacaagtaggaaaaggaatattacaagctttgcaagttttttgaccatttggagaattaaaaagtgcttgtacgtaccacacgccttttatgaattgacacaaacacgtttggtgttctaccattacttgacagcaatgtggagtcggtagaattttagagttggtcaacggtagcaaacatggtacaataacatccattggattgcatgtcacatctccggtcggaccttcaaccattgtggctctgatcaaagttggagacaattggattactgtcaccagcacgagcagtgtcaatgttgtaaacttcatgtcttacaaattggtttttttttttttggttttaagaataattgagatttgggttttgtttgttttttatttatcgatggtgagagttatattataaatgtagttggagatatggagttttatatggttccatcgtgtgatctagagtcaataaatatatcttatctcattattaactaaacttaaatgcatatcatgtttatgtgacattaatttgttgatatttttttaatttacatattaataggttgcctaaataactagaaaagtaaataaattggttttgcactctatctagtcaatgaatttgaatttacacgtcttatttttggaagtccactttgacattttatttatgaatttaatatgcagtgcacaaaagatttgaagagtctcaaatataagtatgtttagctattaaataccattttctgaaatattaaataagttagcaaattatatattcatgattgaatattgataccatgcacgtagttaaatctgaattttggttaacatttttaattattactggatatataaagaaattggtatttatctaagattctgttttctattttagggatattttgatttataattttagagatttttagaaaataatatatatctccctaaattttgtagtatagtatcttgattatacaactacaatattttactctttttaacatttaattataaatttcatgtgtacttattatataaagttttgtgaaaacttgataaacaaaagaagaagaagtaagcctcatccaaataggaagattacaaaaatcagttcattccgaacattcggtcttagccaaacttaaccaaaactgaaagatgtctaaaagatgcaaaccatatgagttttaaggtttacccgaaccaaactgaatcacctaattttgaatacaatttaaattcagttgcgtttgcggctcttgtaaagttttttttttttaataccagtagttttgagccaaatttcgtaatccctcaaggcccaaaatcacatcatgtatttgtttagtctcaaacgtcactcaaaccgacgacctctaaacttcgcctaggatctttaccagttgagcttagaggtctttaccagttgagctaacaacacttgattattgtaaagtttttgccactctaaacaaaacagaacaagacatataaagttttttctgtgatcttcttcttttgtagtcttctagttggttctgagagaattagcactcttcctttaaacacttaaaatctctttaacaaattattagtggatgtttgtcaactgttgtcctggcgcgagatgtaccgtttgattgcgggaactcgttaaatcggtgtagtcctttctgtttattgatgttgaatcatgtgagttaatcgactgaggatcaaagaatgtaaacaaattttaatattaatgaatatagatctcgaatctctaaacccatcattgactttgtgttcaaacaacctgtaaacttgagacgatctcgtgattactattataattatcttaaaatatgcatatataccaagacaagaaccacaagctgcgggataaagtaaagaagccaaaactgtaaactttgatgttttgattttatttagcttaagtttcaatgacaaagatacattggttttatagagtttctattctttaacctagtgtctccttgtcttgcttagttgtctttgaatgctatgtgtttgacttaatcatcgcacgctccaagcatttcaaatctgttcattgtcgctacctccgtactgcaggactgttctgctaatcctctgcttttgtcttgttctgcagataaccgttgaggacgacagggctttgttgtgttatggatcgtgttgggcttctgtagctttaggcccaactgcgaagtgttgtcgttttgagctgagttactaatactccccctcaaacttggagttggtggcaaatcgacgccaagtttgaatcttagagttgtgaacggagctgctggaagagattttgtgaagatgtcagctagttgaagataccctgggatgtgattgacgatgagctccctaaacgcgacttgttcacgcacataatgatagtgagttgcgaagtgttttgttctcggatggaatgatggatttgcagtgaggcaaactgcagaaagattgtcacagaatagttctggtttctgcaactaaggaactcctagatctttgagaagattgacaatccaggtgatttctgaagccgtctctgacattgccctgtattcagcttcagtggagctctttgctaccgttggttgttttcttgatgaccacgatatgagattgttacctagaaaggtacagaaacctccagtggatctccgtgaagcatgacatccagcatgatcactatcactataagccctcaatttacagtctgtgtttttgttgaaagaaattcccattgtagtggtacctttgatatatcttaaaatgcgtttcagtaggtggaaatctgatagcgtaggagcgtgcatcttctgacagacatagttcacagagaattgaatgtctggccttgtgagtgtcagatactgcaattttcccgcgagactgcgaaaatatgttggattatcaaagagttgtgactgatgaggagcattgtctggctgaattggtaatggtgttgccactggagcacagtctttcatgccagctgtgaaaaggagatcttcagcatattttggttcagataagaagagacccttttgatgaaattgagcctgaattcccaaaaaatagttgagtttgcctagatctttcatcttgaattgtttgttgagttcgttgaggagatttgacagtagctttgagctgtccccagtgatgaccatatcatcaacgttgagaagcaacatgataacatccgagttctttacgcagacaaagagagatggatctgaaaaactgcatacaaaaccaaaagagagtaagaagttactgaatttgtcaaaccatgctcgtggggactgttttagtccatagagagacttgtgtagcaggcacacatgatttggtaatgccttttttacaaatccagctggttgcttcatgtacacagtttctgtaagatctccgtgaagatatgcgttctttacgtccatttgcttcagttcccaattcatgatggtggcaagatgcaagactgctctcacagttgctgatctaaccacaggactgtaggtctcaaggtaatctattccctcttcttgattaaagccttgagctactaatctagctttatacttgtctaaagatccatcagctagaagctttactctgaaaacccacttggaacctaacacattcattgcagcagtccacttttcatcttttaaagcttcagttactgttttgggcattggatgagagactttatgagcaagcatggcataccttttatttggtttgctaatacctgccttggatcttgttaccataggatgagttgattctgtagctgtagttgttcttgatgcaagttgctctagtctagaaggtaacggagaaacgatgttgcctataggatcaagatctaagctagccgtacactcaggacgttttccatcacttctagacctttgctccggtgttgtttcattatcttgctgaagaactgtttgtaacggtatagcacttattggatctgcaatcgttagttgcatattttcagagttctcctcactcaaaccatttccaaaaattggttgattttctgacatggactcttgttgatgattctctgtagaagcagttgttccattttcttgcgtattggtttctgatgacgaagtagtggaaaaaccttgaagccaagctgcaaacaatggagttggagatgcagtctgctgattgatgtaagtgtctgcgaatgggaaagattcttcagcaaacaagacatgacgactcagataaactctgcctgttggtggatagaaacatcgatagcctttgtatttatcagtgtatcctagaaagatacatttcagagatcacggatcaaactttgtgcgagcatagtctcgaagtgttggaaagcatgcacaaccgaaagtccttaaagccgagtagtttggaacttttccaaacaaagcttcatatggactaatcttggttgctagagctattgttggtagaaggttgctgagaaagtttgatgtaaagaaagcttcaacccaatatttctgtggtgtcttgctttgaaacattagagtgagtcccatctctgtcaactgtctatgttttctttcagccatgccattttgttgaggtgtgtgaggacatgacatataacgttgtatgcctgaatcttgtaactgcttgaaaaacctttgactaataaattctcctcctccatcactctgaaaagttccaattttcgtttgtaaaagattctcaacagaactctgaaacttgatgaatattgagcagaaatctgatttcctctttaatggatagaaccaactaaatcttgatagattatcaataaagattacatagtactggaaaccttgaacagaagaaacaggagctggaccccagagatcacagtgaactctctctagaggtcttgaagcaataaattcagaagaagaaaatggcaatcttgaactcttcccaagtcgacaggattcacacgccgcattggtacttttattgattttgatcgccttacttaaagataaaagctggaggacttgaggattcggatgtcccaatctcatatgccacactgcatcagatgccttgacttgtctggttgagtagaacatctgaaactttggattctccaacttatagagaccatcactagtgctgcttcccattgtcaaaactttgcttgttgctttgtcctttacaagaacaccattagcatcaaacgtaaaagagcatggataatcttttgttaactttgatactgacaacagagatttagctatatcaggacaaactaatacatcttttaatggcagattacctgacgttgatggtagactagcagaaccaatgtgagttatgggtaagaaattaccatcactcgccattattgtgtcattaccataatagggctgactttgttgcagtctctgaccattgttggtgatgtgagcagttgctgcagagtcaggaacccaagcaccatcatccgtaacatcagtaatatgcaaagcagagaatgcagcagcagcagcttcagagtactgatagctttcatcaaaacgatgccaacattgaatagcagggtgtcctcttttaccacagatctgacatgttggtctttcaccggacgactgagaacttaaagaaagaaactgttgctgaaaacctcgacctctagttgagtagtttccgcgtcctcttcctctagatcctttacctcgacctcgagaggagttgttgaatgtaccaaatgctaggtgtggtgatacatctgctgcagtgtatccttgaagcctatcatcatagctttttagacgaaacatgatttcagtataggatggaccaggagaacatccaaggtgttttcaagtgaagtaatcagtggctcatattcacgagttagaccatgaaccattgcaaaaatcttcatcttttctgtaacaggacttcctactgaagcaagctgatcgcaaatattctttagacaacgcaaatactcatccatggtttttccttcttttgacaaaccatggagacgacgctgaagctcaaagacacgagatgcagaaatacggttaaaatgacttgcgaggtttagccatacctcttgagacgttttggaaccgacaaccacactaagaatgtcttcagtaagcgaacccagaagccatgacttgacgacttgatctgaacggtgccacgcctggaaatctggatttgcagctgtatccgtgtgaccttcaatgtgaggaaccggaatggtgcttgctggaaccgagattgcgctagtgacgaacccgagaaggccttggccagagagaaacgattcgaactgagatttccatagtaaatagttgcgatctgtaagctttacggtaacgcaatttgagatgtctaacgacggacatgaataaatttccatggatctatccatggctctgataccataaaggaaagaagccaaaactgtaaactttgatgttttgattttatttagcttaagtttcaatgacaaagatacattggttttatagagtttctattctttaacctagtgtctccttgtcttgcttagctgtctttaaatgctacgtaaccatatcacgtcgtctccgctttcttttctctttttttttttttttttttttttaacaataaaaataaatggaaaaggaaatcaaaagagcatgtttgatattccaaagatgaaaagtagtaaatcaaagagacgaatctcaaatcaacatttttattttttttcatagttgcggaagcaaaaaaagcctttaatccataggaattaggatcgaaggctctgatagcatgataaatttgatgagagtaaccttagtagtataatagtttctctcaattatattcattagccaaaaggcttatttatacaagaatattacttgcatagcaaattctttagattatagaaaaaaaaaaaaaacaaaaaaaaaaaaagagaagaggagagacgtgatcatcttcttgattcggtcaatttttttttttttttttggccacggtagattttttatttgctagcaaaacttgctagttatttgaagaagaagatatactgacgaagaagacgttgtttattgtcacgcactacaaaagtgacctgaaccaacgatttacttggataaggatgatgaccaacaaaaccatatggttatgtttggtattttttaaccggtctttatgtggtttttgtttacactacgaaaagataaaagccacgaagatgactgacggatatgatgctgatccggcggtaattaatttgaattcaaccatgactactacacaagtttcttcatgaacacgaaagttcgaagagcaaccaagacttgtgatctaaaatcgatggagatacaactactaaagtattttctatcgaattgatgatataaatgtcattgatgaccctatagtgggtatgaagaccatgaagatgatttgatgattgtccaatctcatatgtgttaccacatatgagcttgcgggagggtattaggagatctcgggaattacgagatcgacttgaaaggaaagttaatattgtaaaatatattcttgttattaaataggtagatttactattatcataaatctaaagaacttgttatgcaagtaatattcttgtataaataagccttttggctaatgaatataattgagagaaactattatactactaaggtttcctccaaacttatcagtttgtcttaatcatcgcacgctccaagcatttcaaatatgttcattgtcgctacctccgtactgcaggactgttctgctaatcctctacttttgtcttgttctgcagataaccgttgaggacgacaaggctttgttgtgttctggatcgtgttgggcttctgtagctttaggcccaactgcgaagtgttgtcgttttgagctgagttactaatacgggatactatagaactcaaacaaagaaaaatgtgtgaacatatatgctctatatgttctgagatgttttcacgactattttgcttgcattatacttagtgattcttaaaacctctcatcaaataatctcgcccacaactctatggactcggggttggagccggagtcgaaactcatatcactcacttgccaagtctatactctcagtgaagattggtgtcaagattcaaattcgaacccggattcggtttcaaagttatcatcatgtattattcaaataatctacttggccacctcaatggatttggattcggagccgaagccacaatctgagctgatgtcactcattactcaaacaacatgtgtcttcaactctttagatttgaattctcagcctagaccgctaaggaagcttatatatatcactcatttctcgaaaatatctctctcataccaacgctatatacacacttggagccggatcaatacatgttcatggacctcgttgttgaagcagggagtctccagccggagatggagctcatgtttcttgttgcagaaacaatgaatctcgagcccaagacgaagctggtaacactcgttcgtaaaatattctgtcaagaaactcttgtttgtataaactgaatctcttagggttttaggttacattgtttggtttatatataggttacaacttgagcataaagttaacctattctaaatatcaaaaccgactaagcccataggcccaatatcccccctcaagctggagtatggaggttacaaatacccagcttgacaagaaaatcttcaaattgttgacgtcccaaagccttcgtcataatgtctgccaattgagtcgtagtcgaaacgtgtttggttgctatgaccacacgaataatctcatcacgaacgaaatgaacatcacgtctgacatgtttggtgcgagcatgaaacaccggatagcagcaagcataatggcggataagctatcggagtgaagagtgattggtgtgttaaccttaatgccaagagttggtaataactcacaaagccaaagaatttcactcacggtatctgccatggcgcgatattcagcttcagccgaagaacgagagacaacatcatgctttttagttttccaagataacggtgagtcgccaaactgtataaaccaaccggtaagagaacgactagtgatcggacaagcaccatgatccgagtcacaccaagcagtcaatgttaagggcgtgttagcacgaagtagaatgccctgaccaggactgtttttgtcatagcgaacaacacggagagcagcgttccaatgagcgttttgtggatcattcataaactgagacaaaatatgaatgacataggacagctcgggtcgtgtgttgcccaagtaaataagccgaccaacaagacgtctataccttgtagggtctgaaaaagaaccatcttgcgcaagagacaacttgtgattttgttccaaaggaaacgttgttggtttgactcccatgagacatgtttctgaactaatatccaaagcatacttacgttggcatagatacatccctatggggctacgagccacttcgatgcccaagaaatagcgcagaggtcccaaattcttcatatgaaaacaagaactcaaataatgtttgaattcgttaacaatatgaatcgaggttcccgtaataatcaagtcatcgacatagaccaacacgtgaagccttgtaataccggtcgcgaggacgaagagagaataatcagaatagtcttgctcaaaaccatattgtttcaaagctgaaccaagtttcgcgaaccaacaccgaggagcttgtttcagaccgtaaagcgacttgtgaagacgacagactttagtgttatcatctgtgcgaaaacccggaggaaatttcatgtaaacctcctcatcaagatcaccatgtagaaatgcgttgtgaacatccatttgatgaacttcccaatctaaagatgcagcctgttgcaaaaatgttctcacggtgatcatcttagcgactggtgcaaatgtttcggagtagtcgataccttctttttgattatttccaagaacaacaagacgagctttgtgtcgttctaacgtaccatcagaattgaattttagacgaaaaacccatttgcaaccaatgggctttttacctgcaggaagggtttcaacagtccaagttccattctcttccaacgcatcaatttcatctttgactgcatatctccaattttcatcttcaattgcttcttgataagactttggttcaactcctgaagtaatagccaacaaaaaatgttgatatttatctgaaaattgtgagctggatatgaaattgtcaattggatatggcgttgatgatggatgtggattatgaaggagagaagtgacatagtcagcgagttttgttggaggtttctttttcctgaatccaaagccgagttgttctggttcagagttactgtttgtatccgttgaagacgaagaagtggaattatcagtgacgtcatcaatggcagaatcatgatcggccagagaattgtcatacgcttcattgatatcttctgattggtcaggacgagatatagattttggagacgatgaaggtgaatcaaccggatgtgtctgcgggtttggttctgtatgcgtagtagaatcaaccggatcggtttgaggttgaggttattccggttcagttagaggcggagaagactctggttcggttggagattgaggaggatccggttcggttggagagtgagaagattccggttcattatcatcaaaaccgttggtcaaaccgatagcttcttcttcattacttaagcttgacgagagagatggttgatttgggagctcaattgtataaggtaaaacagattcttgaaagattacatctcgagagaccgtaactgctctggtttcaaggttataaacacgccatccctttttgccaaatggataaccaacaaagattgcctaagtactcctggctgcaaatttatcacctccatgtttttggttgtgaacatagcacaaacacccaaaaacacgaatgtgattcattggtggaggtcgattataaatgagttcgaaaggagtctttccaccaagtatttcagtaggagtacgattgatgaggtacccggctgtcaaagcgcaataaccccaaaactcaatgggaagattagcttggaaaagtagacctcgggcaacattcaatatatgcctatgctttcgttcaacacggccattttgctgcggagtgccaacgcaggatgtttcatgtatgatcccgtgttgattaaagtaatctcttagacagatgaattcgcatccgttgtcacttcgaattgttttcaccttagtagaaaattgacgttcaactaaagcaacaaaattcttaagctgtgtaggagcttcttgtttggaatgtaacaagtaaatccagactgctctcgaatagtcgtcaagtatggtgagaaagtatttagagccacaaatggaagatgtacgataaggacccaaagatcgcagtgaatcagttcaaaagcaacatttgtcttattataactcaaaggaaaagactctctcgtttgtttagcgcggatacaaacttcacacgccttagtatcaaacttagtactaaaatccaaaaactttaacatatccatagctttagaagaaggatgtcccaaccgcgaatgccatacttccatagatgatgaatccattgaatgaacggctgcagctactcctactcctctcaaaaaataaagaccattctcctgttcacctgctccaatcagggtcttggtgatgcggtcctgaatgagacatagccgatcagtaatctgaaatacacaactacgttctctagttaactgtgatactgaaataaggtgacattgcagcccatcaacaaaaaacacatcttgaatacacagcgcagaaccaaaaacaactcgaccctgtttagtagccatggtgaaacggccatctggaagtttgatgagtacaggagccatatcgcgaacatcgattaaaaattcaagagtgcctgtcatgtgattagaagctcctgtatcaataatccatgactcaagaaaagatatacctgatttttcttttgagttgagtttcctgtttgcaagtgtttgcactagtgagtcccattcgtcgttactcaaaccaattatcccgacgcgatctgcggatgtgagagaggacgttgacgcagataaggctgtgttgacaccaaaactttgcaactgattctggtttgaagtggtttcatgattaacttgaccagtcccgaagcttttgcccgtcattgagcccaccgaagaggttgttgttccacggccaacaccacccgaagttgaatttcccttatttgaattgtttccatttttatttctggaatttgacttcggattgtgctcccaccaatctagatagcctattttcttgaagcagttgtcggcaatgtgatcggtgcgtccacagatggtacatgaaacagagcttcctctgttgtcagaaaaattcctagaagaattggtttgaacagcaaaactgacgccatctgatctttcttcatgagtgcgacttagatttttggattcctcgtccagagttaaagcgttgtaagcgtcttctaggcttggtaaaggaacacgtgaaagcaaatttgatttaacggctccgtagatggtatcatctagacccattaaaaactgatgcaatttgtcctcttctcgctcttttcgaacctcctccattgtttttgcgttttggtaatcggcaagactcccccacagctgagttagtttgccgtaatatgcttcgatagcaagacctctttgtctgcaatttgccaattcagttttcaatctttgaactctctggccgtttttcactccaaatctcttttgaatatgagtccagagttcatgagagtcattgatgtgagatagggacgaagagagcttttcttcaatcgtgagtttgatccaagagacaagaagcgcgttgttagcaatccagtcttcaaagtcgggatcgtcgtctggtggttgaggtatagaaccgtcgacaaaaccgaacttctttctagctttcaaagccaagcatatgttgttggcccattcgtcgtagtttggaccacgcaacaaaggcttggagatcacggttccggggttctcaccggaagttaaatcgtatggagatattgtacggcgattggtggtggaggttatcagagccgacgacgtagcagaattcgtggccatgattttctcctttgtgagatagttttaaaaaacagaaaataagaaacagagttgttttagcggaagtttagatcatagaatcgaacaaacccttgagtagtttaggttttgctctgataccatgtcaagaaactcttgtttgtataaactgaatctcttagggttttaggttacattgcttggtttatatataggttacaacttgagcataaagttaacctattctaaatatcaaaaccgactaagcccataggcccaatatattctccctcgtcatctcaaaaattcaaagttgaagaaacttatttcagtttgccctcaagcacaagtaacttttaaagaaggaataatccatgtgattggagaagtcttgcggcccacgaataacaagtggaagtgtttttccttaaattggcagaaatttaggcaaccaggagaagaaggctatacacactttttctgcgaaggtggcagaaatttatgacggtgttatggactatcataaggatacatgttttgcttgtccttggttgtgtaaagctggtttcttctatgaatgtagtaaagaatgatgttgttttctgctacacatgcaatgcgccaagatttctgagccactagtccatccaagtcatttgcatcctttattcctaacaaccaaaccgggagagaagcgaagacatttttcagtttgcaaagagctaggacattattccagaaaggaaacattcaattgcattgagtgtgactacttttctttgtgtttcaaatgtgctacattacctcataaggtaatgtataagcatgataaacatatgttcactctttcttatggggatgagataagtacaacgatgtattggtgtgaagtttgcggtccgaaccgactgatgatgaaaaatcagcaaaataaatccgaaggagcggttttatgtgtgatgagtactgtagtgttaccctacacattcaatgtatgtttggggtggacttatccttgaagcccgatatattattgtccgacggcgacctatttactccttttgcaagaagcattgtccacacaaagtagctctccaatgttctgtattaatatcgtgttccacatcttgtattgatgctaaggacttaagttgggtagccgaattttgtgaaatggaattttgatggactctgcgtgcaatgtttttaggtatgacatgtataatgtgtctgatataaacgttgtataaaattggcatcagaggagaaatacaatagttagaatgaaacagctaagttatgtacacatgatcaaaccttaaaaaccatcaaaaagaagaaaggatagttactattacagtagagtttaacttagaatccaggtatataaaagtaacccggcaaagtaaacactgcacccacatattatattatgttctctactattacaaaccattgaacatgaaagaaaaaaaatgtctcaacaaatggttaaaacattcagatcacacgaagctctgtaagaaaggcggcgcatagatccaagaagagaaactgcggaccgttaactctctgtatatccagcaagtacttctcttcccgggctttgtatagctgtttcaaaatcaaaagtgaactcagaaagtgtataattgttcttcgaaaacagttggttcaagttctaaagaaggttttagtctatgtcctagctggtttagttttgttgaactactactagtgggataaaacaacatcaggatcttagtctttgctccagcacaattctacgaatgtaaaccccgttgatcgattcatatccctaacaaaccgaactaggcagttgtttattttctccaaggaatgttgttgatacaaatgtatgtgtgagtttatagttacctgaagttcaaatttgatgacagtgggtgaagtcatggcacagtcatcctcaatgatgctggattcatctctgaagtgcagctgattgttgaccatagtattctgaccatcagctaaaccaggaacccatcgacatttcatgttgtagtgaccaatcttcttccaacacacattgagttcttgaagagctttcaaaacttcattcatgatttcacgaggatgcgcatgagactgttcaaaacaacaaggtaacagaatgattatcgatttggctatgtagaggcaaagagtacagatatctgattgtgtgttgcattcagaagactttatggtgaggaacaaaaagaatcagtaatcaggaacaaacctgaagtccaagagcccattttcgatcaacagggacttgtgatcttgctcccaacccgtagtgatccacatgtgcaggaatccagtggcctacaggtgaagcgcccgcttcaggtgtgcgcataggattggaaccactgtcctagatgagtaacgttgaaaaggtgaacatgttagtcaaaaatgttggaaagctatctactgagaggaaagaaaaacacatactgttgtctcctgaaactcggattctagatagccacttggaacacggaaccggttatccaataacaggtagtatgtaacagtagcctggtacaaggagcaaatggcatttcagtgactattggaaactagtttcggggattaaaagcattagagacaggaaactacatacatcgttttgtgttctgttgcgtagagattccaaaacctggtttctatcaaatcccatgttaaccacttcttgaactatctcctcattgatctgcaaaacataagagatattgttactatcacagcaagtgaactctattaatctccaaatggcactgaaaccaacctttttagcctgctctactgtatccggtggagagacagcaagataacgagggagatgagtctggaaccaacggtgttgacggatctcaggaatggtgattcgtttcaccgggtcaactataagcatccttgggatcaggtctctagcctcagatgataaatgacttggaagagtgtaaatcccaccctaaagagaaaaaaaacaccttgataagttacttcacatacatatgaatccatttaagaagagtcttttagctgaatcaaagtataacgtacagtaccttaattttcttgaaaaggttgggaatgttttcatcatcaaaaggaagagtaccgcataatagagcgtacaatataactccgcaactccatacatctacttcaggtccagcatataatttacctgatataacctacaacaagaagtaagagataagacactcataagagaaacgagacatagtcacataggtgaaaaacaattcagtaactttactaaactatatacctcgggagcagcgtagttggggcttccacaactcgtctttagaaaatgaccatcccgcataacattactcaacccaaagtctgcaatcttaatattacacctcgaatccaatagtaaattctcaggcttcaggtctctatggacaaccatattacgatggcagtactctacaccagatattatctattcggatatgagtcaaacacaaacaacactcaaactcaaagatgacatgatacgctacaaacacactggttatggtaaagagaaaacaaacctgctggaaaaagttacgagcctcatcttcttgtaatctgcctttctcaacaatataatcaaagagctctccagacttgacatactccatcacaacataaatgtcactcgtggtctctattacctcatactgccgaataatatgaggatgcataaacaaccgtagaatcttaatctccctcctcactgtaaagaagaaatatacatacattaagataaaaatacatactaaaacctaataagcagaaacatttgattatcaaagcttttgttctagaaaccactaaagctaaaagtaacggtgcttgtatatacctttctcttccatctccatgttcttgatcttacgacgattaaggattttgatagcaaccttatgccctgtgacaacatgctctgctattttcaccttcccaaaagacccaattccaagagttttaccaagcttgtaattcggtaaaatcgattccactccattattgccaaatctatttgatgaatgatccatttcctgtgtcccaattcaacatcaaactcataagtaagctctcttagcaacttctctatagaaaaacatcagtaaacatattaacttgctcaaataaaaaaaaacattcttcaactcaattttcatttcatcaaatctaatctaaaccaaccataagcttgtaagaaaactgacaagaaccaccgacataactactttgtaatggtggttttggtctgaaaccaaacaagagactcacaagtttgagtttagaagacaaaattgataaacctttacaaagaaaaaaaagtcaatttacctgaaaagcttgttaatttcgaaaaccgtcttggagtagatccgagaatcaaaaacccagataaattgttcaaacaaagagcgaagaaatatacagaaacaaggagaatcagattgatgggtataaatagggcagaattgtaaattacgatgtaatctgaagaaattcttggggaagtcagatttccaactcgtaggtgacgcagagctgagtcaggtttttttaagtcttcatggtgaaaattggtaatgacgaatcaagaaaccacaaaacccagataaacatttattgccatttgcaagcccttaaattagggcctttttgcccattttctgtttttgtttgaaaaactagttttttaaggtttaaaatttttatattactgtttttatgatctatatatacatttttgcagccactttgtgaaataaatcctagagttggagtttatttacagtggctgccactcgcatttaataattgtttttgataattagaaagaaaatctttaaattaaatatttgacaatcttcccaaaatctttccacattaactacacgattagttactaaaataaaacttccgaaatatttaatatcatttaattactacaaaattatcatttttgatattgtttttctacatgactataataattcgattataatcatcaaaccgcagagatattagatagcatttaattactacaaaattaaaaaatatttagacaatgattcataaacatatcataaataaaatcagtgaattttttttacgggacggattggcgggacgggtttgacaggacgttacttaataacaatcgtaaactataaaataaaaatattttatagataaatataatttgcaaatttttatatatagtaactttaaaaaataaattgtctccgcggtataccgcgggttaaaatctagttttctatatataaaagcgtgctaatgataaagcggataaattaagaagtttcagacgcattttattatataaagtagagtttttaaagttaataactcaactgatcgtgacacgtaacaagtcaatcgttcatatgttgatattgtgtcggatttttttttacttttttcctaaaagaaataggcaatttaacaaaaacaaatatttacatatactaatttatatgtctatatctaaaaaaaataagttatagtttacttaactaagaagggaaactaacaataagatggagtgtatagaattaaattgtatttgtattgcaaaatcgaattgtatttgaaatgtatacaatcaaatttaattgtatttgtattataataaaatagatatttaaattgtattgcataatcgagattttttaaatattttttctaaaagaaataggaaatttaaccaataaaaatacatacaccaatttatatttctatatctaaaaaatttaacttaaaattttcttaactaagaaggaaaactaacacaataagatggagtgtatagaataaaattatatttgtattgcaaaatcaaattgtatatgaattgtatggaatcgaattaaattgtatttttatataataaaatagatatttaaattgtattgcaaaatcgagattttttaaatattttttctaaaagaaataggaaatttaacaaaaacaaatacatataccaatttatatttctatatcgaaaaatttaacttaaaattttcttaactaagaaggaaaactaacacaataagatggagtgtatagaataaaattgtatttgtattgcaaaatcaaattgtatatgaattgtatggaatcgaattaaattgtatttttatataataaaatagatatttaaattgtattgcaaaattgaatatgtaagattgaaatttggtttaaggaaatactaaattaaatactgaaaagtatatgaattattatttaaaatttaaatatcatcaataagatggatgtagtctatagaattaaaacagtttattaagataaaatagatagttcaaatgtagaataattgctgagaatgcccttttcacactacctttttcagttataccctttcatatttgacattttcatttctactttcagtaaatttttaatgactattttacccttatttggaaattgttttttgcctaaaatattccaaataaatttcctgccaataaaataccatagtttttgtttttgagcattttttttaatacaccttttacacagaattcattgtatatactcgtatatagctttcattgtatttaacaactgtataaccataatacagtactgcttccaactgtacagtatagatacaccgtataagccgtattttagaacactagtgttttataaatgtatgtggaaagttgagcctaatagttaggcatgtcaactagagataatgctcgtatgctggcctggccttactctaaaaacagcgaattcgggttaaatatatatatgtcttgaaaaatttgctcttttagactaaatgtttttggagcttagtccggctaggatcggatcggacaaaaagtcctacataaatattttgatatttgttttgttaaatatttttgttaatatgaaaattgttttacaaaaaaatttgaattgaaaaacctaaatctagttttctaattgtgccttacatctttgaagtattctgattttatatttttatttagtataagtttaaacaatttattggattatttctttgtttttaaactttttctttcctttttttttggttcaacaaaacttttattttaaattaacttagttttagtggttatttaaattttgattgactcatgtcatacatatgttctttctttttcagagatattataaattataagtttgtttattcgaaataaaaagcccggaaaagtcatgtagccctattatggtcaaattgggctttaaaatataggattagaagttttatggaccgggtcggtctcgctctaatatatgtaggtttgtatgtcttaattgcatatttctatatactttatcttgtatagatttgtatctcttaattgcatattttgattgaaatttcatttgaataattgagtagaaaaatcataaattaatttgaaaaatatatatataagtaaactaatgcaaatctgtaaatattctaataaatgttaggtgtataattaaatggattgagaagctatgtgagaacgacatgttagcatgacattttctttaattacacatgaaaataaggttatttctaaaaagtatttctcaattaatatataggggatttagaatgttgttcaaagttcttaccagctatataataagctcgactttggtttttctgttcgaaatctcaaagcaccaatttatagtctaactaattagctcttaaaatcattcgatcaattatttaaactttatgtgatttgtgttattatattttgaactcgataaagcaagctacttatgaagatagctagtgaagaggtaaataaattttcagattctggggtagagttagaggtttttctattcaatgacatcctttttctacaagttttgttaaatagcggtatgtataaaatgactacatgtgaagttgatgtataaaacggtcataatttgaaaattagagtattgaatgacatatttcccgttttggttacggtaaaacgatgtcgtattgggaactaacggagactagttaacggctgttatcgagtctgttacgccagataacgtcaaatggattttggcctagtcaacgattaagtcaacaacgttccacataaatgactcttttgagctctaattaaaaacggatgacaaaaaaaaaacgattaaatttgtgtaaaatctcggtcaacgatttttacatgtattaaatagtcatattcgaaattcacgtatttaataaccacttttttgaaagttcatgtattaaacgacattttacccctcaaaaaatgtatatacagtataacctctataaattaatactctataaattaataacctctataaattaataaaaaaatttccggttcctacttggagtaggaaccagtgtaaaaagtgacacaaatcgataaattgtttttcctaattgtttctctaaattcttatatcaccacaaatgtttttgttatgaacttattaaattgtttttcgaaaaccccagttccaaagggctaacataatttgataacaaaagagattcaacaagattcacaaaatataacaatctatgtagtatctgtatctctataatccaagcttttatctgtctaaactcaactagaggagattctacacagtagattcatcaaacagcttaagtatagtagtactttttggattacaatctctaaaactttttctatgcacaatattctttacttctccagttacttgagttcagtaagagggaatggctgcaaaacggtacccttcagctcctctccatgagtagtaagcaattcgggtctcgtagaaacctgtagccacaatagtgaaatgtgtcaaggccatgaaaatcactgctttactcacagcatacataggtaaagagaacaaaaaaagaaacgatgatttcaaaaggcaaagaacacaagctgtgtctacttgatccaactcactcaatgtctacatgaaacaacaagattctgttttcgaatcatgcatccagcaacatggaggaacttagaagcataaatagctaaagagaacataatttcaacttaacaaagaacacaatcaatgtctagttgatccaacactcaatctctacaatccacatctaccaacagattccacaaggctttcaaatcaaacaataagcattgacattaagtatgaagaaagaatagatagtttcaactcaagcattgtctacttgatctaactcgctcagtttccacatcaaaaaaacagattccacaagggtttttgaatcaaacataatacactcagtacaacaactgaagaaattcagaggcatgcaacactcaatctccacaatccacatctaccaacagattccacaaggctttcaaatcaaacaataagcattaacattaagtatgaagaaagaatagatagtttcaactcaagcactgtctacttgatctaactcgctcagtttccacatcaaacaacagattccacaagggtttatgaattaaacataatacactcagaacaacaactgaagaaactcaagaggtataaatacctaacgagaacacaatttcaacagacaaagaacacaatatgtgtctctagttgatctaaatcactcaatctccacactaaacaacagattccacaaggtctttcaaaacaacatcatgcatttagccatttacatatccaacgacacgaggaacacaataagcaaaataaataaaaaagacgaagaattcgaactcttaccagggagaaaagtaaggatcccaagaacaagtaacgcataaccttgagagctatctccttccatgtgaccaatgaagataaaaaacgacaaaagaagaagcaagcaaccaagaaacaaaagaaacacagctaatgctatagatttccatggaactctatcaaatgctttcggtgaataatcgaaccgaggatcgaaatctctcctttcaccaacaccatttccatagccttcatcatcttcatctcctggaagctgtgcataccgtacacttctccttgacgccatttactaatcagcaaaaccacaacacaacacatagatggatcataaacaccataagttcgaatctgtatctaaaactagaatcaatcaggaacgaaaattcccacgcaaaaccaaaccgattccaaattaattactaatcagaacgacgactaataatctgatacaactatgagtaataagagagagagggcttgcggaggaactcaccggaattttggttactccgccgggaagatcaagatcgaactaggattcggatctactttgacgaaaatggttcttcacttcttcttcatccgtaacgacgcgttttgggtttgataatttactgattaaatcctatacgtttactaaatttatatttgagccctgtattaatttatgaattttaaaaccccattctttcaaaaaagaaaaaaaagttttcttagagtagagaaaactggaaggaccaatgcctttttttttttttttttgtcatgcataatttatatagaaactgctacactccaataaaggaggtcttgattacaagggaagaaaaccaagccatgaaggctaagcaattcgctgctacaaaagccaagcgaaaaccataacaacagaaaattacaagatagatacaggcgaacatacaactcaagcaataaacgatatcttggagtccatgaaccttgacaaccatagagcatatgagatgaaacgacgccttggggaacagagagcacatatagtgatctgttgggaacagagagcacatgtagtggtctgttgttcatgattgatactgcaactagggcagaaaatacaatcctaattccggctaacaatgcctttctcttttctattttaatctttgagagagaggaagtcttctccgatgttccactttggctccggcaacggccagcttttttagtggtgttggtcagctttactctagcgtcgttggctttcttagcaacgtcggctattttctgaatttgttttttgtttttctttcctttgtctctctttaacttcagttttcttaagtttcattactttaattagatccttacatatgggtgtgtagttctttgctcctcctttgcttaaagggtttattttgttcttcaaacttcttggttttaatcaattaagaacaaattgaagttgcagagcaaagtcacgtttagtatctttggtttttttggaagtaattaggcttaatttctggactgatgctttggatgattgaatttttattctcaggtttgatgaaagcaaatcccaaatatctaattttccttatcgattgaaaagcttttaactgaagaagaagaagaagaagatgaagaagatttacaggtctacatcaagtggagtcataatccatcaaaactcaattgaaatttcgccttgtttctttgggcgaagaagatgaatgaccttcccaacaatttcggcttgaaaggaagcttccaacgtcactgcaactttccggtgatcggagactccctcatcttcaacttcgcacgtgtcatccattctgtttttcacttgtcacgtgtgtctacactacctttccttcacgctaaggatttacatttaggcattgggcttttatttgttgttcctttacttaagggttttccttgttgggtttggttttcattttcagatc
